United States Patent Application Publication US 2007/0054278 A1 - sequence listing, part 110

SEQ ID NO: 98151 - DNA, 24364 bp, Homo sapiens
tgacttagtgtcccggtgagttcatggcctgctgctgaccgcgcaccgacccccaaagtcactctttgcacctgtaggagctttggtccgttcagcatgaccagactggagagggaggagacaggcagggtgggcagagaaaccggagtgactcagtgactcagaaagtgggacgctcagcgtgagaggtgtatcagtctgtgctgctgtaataaaatccttagagtgggcaattacaaacaatagaaattggctgggcacggtggctcacgcctgtaatcccaacaccctgggaggccgagggggcagatcacaagagaggctgaggcaggagaatcacttgaacctgggatgcggaggttgtagtgagccgagattgtgccactgcactccagcctgggtgacagagcgagacactgtctcaaaagaaaaaaaaaaatagaaatttatcacttacagttctggaagctgggaagttcaagatcaaggcgccacatctggtgagggcctgttgcctgtttcctggttcctagatggcaccttctacatgtcctcacatggaggaatggacacaggggctgcctcaggcccccctccttttttttgagacagagtctttctctatcgccccagctggagtacagtggcgtgatctcggctcactgcaacctccacctcccgggtcaagtgattctcctgcctcagcctcccgagtagctgggattacaggtgcgcaccactcctggctaatttttgtatttttactaaagatggggtttctccatgttggccaggctggtcttgaactcctgacctcaggtgatctgcccaccttggcctcccaaagtgctgggcttacaggtgtgagccactgtgcccagccattaggccccttttatacagtcagtaatccgttcctgagggcagagtcctttcgacctaatgacctcccaaaggtcccaccacctactactatcaccttgggagtgaagctataacataagaatgctggggggagaacaacattcagctaatagctggtgggctgcggagggggcagagggcagagctctgttctcccagggcttgtccaccgagagggccccagcccaccagctgggccttttggtaagatcgcaaggcagatggtcaattctgcaaaaaagaagcctgggtgcgtggctcacgcctgtaatcccagcactttgggaggccgaggcgggcggatcatgaggtcaggagatcgagaccatcctggctaacacagtgaaaccctgtctctactaaaatacaaaaaaattagcctgctgtggtagcgggcgcctgtagtcccagctactcgggaggctgaggcaggagaatggcgtgaacccgggaggcggagcttgcagtgagccgagatcgcgccactgcacttcagcctgggcgacagagcgagactctgtctcaaaaaaaagaagaaaaaaatctggcaccacttcccctagttcactgagaaaagtgacgccgtctggacacatacccacagtgggacgcagtggagaggccagaccagggaaactgaggcccaaccagtggggcaggtttgaggcaagagtagtaggaggggagggggcagggggtcccccctccaatgcccttggctgagcacgggttcttctgagctcaccggtgctcggagctgcctccctgacttggacaaccatgtggaatggccatcccgccctcaacaagtagaggcaacttcctctctacagtgaggaaattgaggcccagtgaggaagcctgtggccaggagggtgctaggggtcctcacaaagtgtcctgaggggacccacccctcccttgatgccagaccacctggccaggctgcaggagcagggcccagggcctccaggagccaaggcctggccagggctccatgttccccgaggcctttctgactcaggctcctggcctctgggagcctggcccttccagggagccacaggggatggaacctccatctggagcaggggagaaggcatggagtccaggcttgtttgaggggccaaggctgagccccctccagccccttccctgctctgccattaggacctggctcctcccaacttctatacacatcacatgggccgcgtccccccactttgcaggctgagaacatctgacgtgacctgggcacctgaggggcacccggcacagcaggagcatggacctggagaacctctgttcttccgtgcatcaaggtccgagtcgtggttctgccccttagcagctgcgtgactctggccaagctcctcccggcaacaggcctcagtttccatatctgtggatggcactaatcacgatgatgacctgaggagaccgttctgctgatggagtgagcagaatcacaaagctctcagggcctagcccggggcatggcaggtccgcaggcgtccaagggcacagcacagatgtgggagaaagggctgcggggccctcccgctccagccgaggacacggggctcagggatggagcccaatactgtcccagagctctgctgcccaggtgcctcttggggaaactgaggctcagtcccacaaaggcatcagtcccactgaagacagggccgagtccccagcccctcacccccctccaggggtctgtgccacctccagggagccgtggcggctccatgtcacctgcgggcaaggggctggtgtggaaagccccacggcatggtggaaagtccgaaattctacaggggcctctttgttaaacctccatgcaagaggctgggtgacgcctgcccacaggggtcaggccccagcccaatgacacaggtgacccgcaaagactgcaggtcttttttaaaaagtgaagtgcagacttggatctcgctttgcagtttttaattcccctttaaccatctctgggctaaggcatccattgactcacttaaccatctggggagggaaaagccaccgggttgcagggggtgactttggggcaggatggcctctgaaggggtgggttgcccctccacacctgtgggtgtttctcgttaggtagaacgagagacttggaaaagagacacagacaaagtatagagaaagaaattgggggaccaggggaccggcgctcagcatacggaggacccccgctggcctctgagttcccttagtatttattgatcatttttgggtgtttctcggagagggggatgtggcaggatcataggataatagtggagagaaggtcagcaggtaagcacgtgaacaaaggtctctgcatcataaacaaggtaaagaattaagtgctgtgctttagatatgtatacacataaacatctcaatgccttaaggagcagtattgctgcctgcttgtcccacctccagccctaaggcagtttccccctatctcagtagatggaatatacaatcgggttttataccgagacattccattgcccagggacgggcaggagacagatgccttcctcttgtctcaactgcaacgaggcgttccttccacttttactaatcctcctcagcacagaccctttacggtgtcgggctgggggacggtcaggtctttcccttcccaggaggccatatctcaggctatcacatggggagaaaccttggacaatacctggctttcctaggcaggggtccctgcggccttccgcagtgttttgtgtccctgggtacttaagattagggagtggtgatgactcttaacgagcatgctgccttcaagcatttgtttaataaagcacaccctgcacagcccttaatccatttaaccctgagttgacacagcacatgtctcagggagcacagggttgggggtagggttacagattaaaatggagtctcttatgtctactttctatgcagacacattaacaatctgatctctctttcttttccccacagcctcaaaggagaggaaagccaagttgctgggagcaacggttactggtcatcccaaagctgtgtgcgctggttccctggcaccccaggggcttttatgcatgaactgtgcagccagtgggcccaagggttgccattgaacttgatgttagtgagctctcccttcgtgagacccctgcccatggatgagcaaggagaatgggggtgtttcaggagcagacagggatcctgtgcaaagctgggcttctgtgcaactttcgcttgcagttatttaaatatttttgctgtaaatacagaactgcaggggagagggcaggaaacccagcgagcagcagcccggcctggctggggacaggatgtgtctgttggagcggggaccggcaaggcaggcatgcaggcagggggcttccctctcggggtcttcggaaggcgcagtgcagggagtgagagacgcccaggcctgggcagcgagagggccctgctccccgctcaaggctcccaggacattccacacaggagccagcctgttccaaccctgcactgcctgatactccacagccaccactgagatggaccccctccccctcagctccccatgacgtccccagcacctgaccccaggctgaccacctcggccaccacctctggccccaccttcctccccaggtttgttcccaaacacccctagagtcttttccggagcaatctcagacgtgcagaacgctcagggggaccctgggcctgaaggcggtaggagaaaccgagaccgacccctggtctagaggagaggtgtctgccgctctccatcctggactctggctgcccaaaagcaaacggcacgcctgcccacgtgggaatcttggtggcgtctctcactgcatcagttagcccccagcccagtgctgcctggattcaggcttcctggtaccttcgtccacccttcagccctaatccatgctggccaggtcatctcgttctctggctcagtgggaacactcgtgcccagagacctctcgtggttctctgcagcctgcacacagggcctgcttccctggcttgaccgcacagacaaggggactgttaccaaggcctcccactgaggccaccccccctccaggccatgcctgcggggccaccacagcctcagcatcattgcaggccccaggcctctgcacctggtcttgttttactgggggcactgtccccactcacgtccacctgggaccctcggctcctgtccactgcagctcccctcccggacaccttcccagatgcccccggaagctcctgtccaggccacagcatccctcagcctctgtcactggtcctaggaagaccctttgggagctctcactcagggccacactcaggacccccgttgtggggctggccgccttccttctaaagcacctggaggaaggaaggagggggtcaatgcgagcctcaatccccaggcgagtgtgccccttttaaagatgagggaaccgaggctcagagaaggaaaggacttgcctggcgtcacacagctagcctaagatggtgaggtcaggagctccctggcaacacccaggctgccgtaccgtctcctgcatcagactgagcctccatcgggctcctcccacagccccaggcgggcccctgagtaggggctctcagcttgtgtggaggtcccccaggaacaccaccccgatccagcctccatggaggctcttgccggccactgggaggggccggtgcaccctgggcagcccctgccagggccctgagacccgagcctccccgccgagggcacctgtctcggctttgccccattcgagcagggccctcgccgaggcaggacagggccacattcggaagtgagagttctctgagtcccgcacagagcgagtctctgtccccagcccccaaggcagctgccctggtgggtgagtcaggccaggcccggagacttcccgagagcgagggagggacagcagcgcctccatcacagggaagtgtccctgcgggaggccctggccctgattgggcgccggggcggagcggcctttgctctttgcgtggtcgcgggggtataacagcggcgcgcgtggctcgcagaccggggagacgggcgggcgcacagccggcgcggaggccccacagccccgccgggacccgaggccaagcgaggggctgccagtgtcccgggacccaccgcgtccgccccagccccgggtccccgcgcccaccccatggcgacggacgcggcgctacgccggcttctgaggctgcacckcayggagatcgcggtggycgtggacagcgccttcccacygcygcacgcgctggcygaccacgacgtggtccccgaggacaagtttcaggtgggctccccgcccgccccccgctgcccccaggccctgtgagccagggatagtccccggggaagttccaggaggaccccgcccctccagatccccaagcccctccagccttccccaactccctccccacaaggagccaggggcgtccctgatgacaagttagaagttggtccccttcccccagccgtccccacacctcacccccaagccaagggaatggcctccaggttcccccagccccaccctcaacacccctacaccaccacctgactccaccacaagccgaggagatgggcgtggagctgtccaggtcgccagcgcctctgcytgggagctccaccctctagtcatgatggagatgggcaggccgcagggtgtgggggaccatggcagggaccctcatgccaccccactgcaggagacgcttcatctgaaggaaaaggagggctgcccccaggccttccacgccctcctgtcctggctgctgacccaggactccacagccatcctggacttcyggaggktgctgttcraggactrcaacctggagcgctrtggccggctgcagcccatcctggacagcttccccaaaggtgggtcctggtggactcagccatgctgggggcctggggcagctgctgtcacctgctcagcccagctggactggaaccggagtggtgtttgaggagcccgtgggtgatgttccaggaccgtcttggatcctaagaggcaaaggggccaggcctcacctgtctggccaaggtgtccagttctggggcccaccctacccctggagaaaaccctgaggttgggaccctgctcctgcccctgagctgcagatgtggacctcagccagccccggaaggggaggaagcccccggccgtccccaaggctttggtaccgccacccagactccccaccaagaggaaggcctcagaagaggctygagctgccgcgccagcagccctgactccaaggggcaccgccagcccaggtaccctccctgcaggggaagccagccagggtctccagtcttcccgggcttccccgggagcccacgccccctccccacccgggctcccacccactgggtgtggggccagcctgcctggggctgtgggggtctcctctgggtactagacccacacactggaccagcctctcagctccctcctgcctgaaggctgagctccccggagctggtgaagtaggcgggcgggtctcatttcccttttactgatgagaaaccagagcccggcaaagggactacccagcactggaccgccccctccacgccctcccaccgcgggcccctgcccaccggcactcacccccactgagaggggaggccaggctgcccccagctcccccattcaggctctcaactgaaggccaagccccccaagaagcyggagagcagcgcagagcagyagcgccttccactcgggaacggtgagcggggcccagtgggagcgcctcccttctccctggccaggggcaagkggtcaggggtcagagcagggcctgccctctgagaccctgtcctaggggctggggacgtgctggcctggtgtgtcattccaagggcctaagctgcaccaccagacccaggaaggggacaccttgggtctaagcatgatcttgccagtcgcccctgcccccactgcaccctggttctgggacccccttctcaggcaccttctctgcccgtccactccctatccttcaggaccagcctagacatagcttcctccagaaaatcatccctggcccccagctgcatgcaggctgaacccttcctgtccccttctccttccttcccagggcactggactccagagaccccctatctccctgagggcagagcctaggaactctgtgtccctcccggcacaatacagggcccatgtcatgggggggtgggtctggtcattggtcatgccttcctatccaytgtgccagctctgctgacactgccaccccccagcacacgcacacwtgggtgcacacacgaacacacacattctcatgtctctgcacttacctgtgggctgtctgcacatggcagggctgggtcccctccttggcctgccctggctggaaggaaagggctctgcagcccagtgctgcctgcttctggcatagagtatgtgcttgggaacagtcttccccacrggtgaccccaatgggtgttccctttcccagggattcagamcatgtcagcttcagtccagagagctgtggccatgtcctcyggggacgtcccgggagccygaggggccgtggaggggatcctcatccagcaggtgtttgagtcaggtagacgctgtggyggkgagatggggctgatggggagacccaggctccaagatggaaggaggaccacgcccctttgcatcctggtgrtcccacagcagaccggactgttgctcaggtagccagagtttctgcctgtggttctgctgactttggaggaggagggtgagcactgaagtctccctgtcgggggaccttctgcaaggccagcggtccaggcccacatccccacccgggatgtacagcactccccagtcacctccatccatgtgcatgggccctcctgggccatggggttgcatycttagaaagttctgcctgtgctgctgagaccctccagggtatcggcattcttcaaccaggacagcctgtagcatagcgtccttgccccccataccctggccagcctgcagcatcctcgcccgccattccctggccagccgctgaccccatgcaatcaccagtgccatctgaccagggcacagcagggccgctggtggcagacccacygtgccatcggggcattccatctcaagtccctgacacggtgtctcctcggtgctggacatgggctgggaacaccaagcacagccagggccctggtcttgcacctctggatggtcccaaggcccactgtgttacttcctaaggctgttggttaaattggcacaaactgggaggcttgaaatgacagaaatgccaacatcgaggtgtctcggggccacactccctctggaggctccagggaagaatccttccttgtgtctcccagctgctggtcattatgggggtacccctgtgcyccttgttcctgrgctcaggacccaccgctccagcctctgcttctgtggtctcacagctgtctcccacgtgtcctctttataaggacaccagtcattgaacttatggtccagtgtgacctcatcttaactaatcacatctacaaagaccctgatttcaagtaaggtcacactctgaggttctgggtggacgtgaacttygggggacgctgttgaacaccctggtgtagatccaggacaatccccgggccccagactcgactggggtgggggcgggctggaggaatgcaggctgtgggaactccacctgtctctgctagaccccaccctggggcctacacgactgccaaggcaggtcctgctgggcgggtgagccaggaccagccggcatctcctcccaggcggctccaagaagtgcatccaggttggyggggagttctacactcccagcaagttcgaagactccggcagtgggaagaacaaggcccgcagcagcagtggccygaagcctctggttcgagccaagggagcccagggcgctgcccccgtaagcacctgaccttccctggggagcctggctcttgatgccccccgccccaggaacagcgttgcctctgggggagtggctctgctgggggctgggggctgctgccgagagacgcctggtgccacagccatgtgcaccctcgctgctgaggctgcccccattgctgacgcccctcttccttgcagggtggaggtgaggctaggctgggccagcagggcagsgttcccgcccctctggccctccccagtgacccccagctccaccaggtaatgccctagaccacaggagaggcccctgtctgcccttgctcccctcgggtgggtcctgctgcctctgcctttacctgggcactcagggatgagcaccrgggcctgagcccctacccacagggtacagctctttttctttaatagacagtattyttttcctgataatacgcaatggtaatagtttaaatgagtcagagaaagtgaggtcttctcaggctcttaagagcatggcgtttggtccaggctgtacccgctgctctcagctgggcccgtgggtgggccgggcgcccctgctatagccaggaggtcaaggatccactgggaatgccatgctcatctttcgtccccagcatggtttcttaatggggtagaagcagtgtggggggtgcctgccgtggtgggttacagatcttgaccacttggcaccaggggctctgtggggccctggcacttagsagtgacaggagccagtcctgccctgcaggagcacccgggctggtgggcgtctgggggattgttagaatgagtgaggtcattgccgtgcaggaccagcctagcctggctgtctgggggsattctggaggaagtggtacctgggagacccctgaaggcacagcaggcaccatccaggcagggcacaaggacggtgggggctgcaggtggaggattcagcaggcgctgaggtcgggagagacctccctgggcctggccccactgccctgtgagraagggttcatgtggttggtgtacagttccggggcccctggaacgcagcagcctgcaagaaaccgggttttcttcccaatagggatggccccggggggtgtctgttggagaccagatggatggggaacaggtggtcagggcagaatttcaggccctggcagcatgggagcagggcagagactggggagttcaggtacccagagatgctgctgggggagctgttttgggaaggaggtggctctcaggagggtgctgcaccccagcccagtctgcatgggcgtctcttgcctgtgccagaagaatgaggacgagtgtgccgtgtgtcgggacggcggggagctcatctgctrtgacggctgccctcgggccttccacctggcctgcctgtcccctchgctccgggagatccccaggtgagcctgcacctctgccagcgcaaccaggccaccccggttcacggccgmctccacccactgaccctgaagggaagccaccccaagcctctcccatccaagatggaarsgggttctgagtcaggtcactgggccgtggggccggggcctggggttttcccaccctgccacctgcctcccggtctggccacacctgctgcccagcctggacagctgggcccctgagggcagcaaagcagaacagaggcccagggcgaagatgccaccctgtccaagctcatcccaggctgcagcccacgcccccatgggtagccggcccccacccccaagccccaccccagagtcccactccagacagggctggggagcacagaggccacagagctgtgccccccagggcaggtgggagtttgtccaccaatgcacaggacgccgggcttagtgggggcgggaggcctcctctgcgttcacatcccggtgctccttccccacggcccaccgagccctgcccccattccaaccccacaggacgtggcagtctgtgggaggaagagctctgggtgcagtggggacccacgttcaggcgaggctctgccccagcccctgagtggccgtcatcaggccccctctcagccttgtgcctcatcactagaataaggggcacagtgggggtcattgctcggctcctgaagccgttcctccttgccgtctctttctgcccttgatcacctccccattctgctgggtgccattccccttaacaggtgggtcagyttagggaggcccccggcagggcccagccctgagaggcaggcaaagccaccagggctcgcaggtgttggggattcctggggttcatcagagagcacgccaaggggaccctgatcacgctggccagggccaccccacgaagggtaaatgtccccctgctgggctctcccttcctgtgtctctgcccatctctctgctgtgcctcggttccccctctgtgaaaagacatggtcggagccctggagctccacccgtgggtttggggatctgtcacccgctgtcttgttctgcatgtctctgactggtggacacacgagcagtgggacctggaggtgctccagctgcctgcaggcaacagtccaggaggtgcagccccgggcagaggagccccggccccaggagccacccgtggagaccccggtatgrccacgccccctcctagccgggccacccctcctgtccacatggccacgccccctcmtaggctgggccaccccctcctgtccgtctgtcccctggagtcctgtgggacaggactgccccagccatagcactatgtcccccatgcccaagcccggtccttgtggtctcctgcagtggagtccccatcatggttcctgtgggcctaaacccagctctcctggctgcgggtccaccccggggggcactatgagcattgataacggccccggaagatgtgttccttgttctgctgctgtgaggrtagtaggtctactgtgcacagacccagtgttccctctgacagccctgagggccagggggccccccgtgtgtagacgggggaggagggaggaccacagagccaggaagtgccacagcctttcccactcagtgtggacgccttccaccatgccagccctccgcccccaccatgccaggcctctgcccccaccctgctgccctgggtttcagggtcccagcagtcactgactcctgggtggtgccgggcaggcgcccgctgcccctctgatgctgacccttsggttccagctccccccggggcttaggtcrgcgggagaggaggtaagaggtccacctggggaacccctagccggcatggacacgactcttgtctacaagcacctgccggcyccgccytctgcagccccgctgccagggctggactcctcggccctgcaccccctactgtgtgtgggtcctgagggtcagcaggtgagcggggagtgggggtcagggtgggctcttcaaggagcccaggacctacggggcggatgaattcacctgaaacaggaggagagggaggccaggcgagaaaggctccgggaggcacagggcctggggctgtggggrgagcgtggggggctgcsgggggaaggggacgctcctagacctccactccagctcctggccctgggcattactgctccccccacaaggcaggacaatgaagggggggatgtcccagcacacgtgggagccctcccctccctgcctcaattcccttccctgcacccctgtgggcaccgcctttcaggagactcccgcactcagccccaaaggaggccaggcccgccaagcaggagagaggtgcgggcgccaggcttgcaggcagcagcctgagggtgcttgggtcgcccctgcctcctggggatgggactggtcccgctgtcctgcagcctgcgtggcaccgtgaggctcctcacttgcgcctagacccgccgtccagccctgggtggtcccaggggagagcgcacagggctcgggttcrggttcagctacatttcccccggccccccgcgtcaccccgygctgttgcctcccacagaacctggctcctggtgcgcgttgcggggtgtgcggagatggtacggacgtgctgcggtgtactcactgcgccgctgccttccactggcgctgccacttcccagccggcacctcccggcccgggtgagtgagcgtggtcggcggggaggcctgaacccacacccacaccctacaccccaccccacactccccacccacatcatacagcccacaaccacaccccacccacaccccacactcccacccacaccttgcaccccaccccacacccatgccctgcacccacaccctacactccacagccacactccaccacacccccacccacaccctactccccacctcatacyctgcacctcaccacactccacagccacaccccaccccacaccccacactcccacccacaccctacacccaccccacaccctacacccaacccaaacccacccamacccaccactcccactctccacccacwcccacmccccttcctcacmccccacmcccccatcccccactcaccacccacgcccacaccccacaccccataccccggaggtggcactcctgctcccccccaggsctggcagcccctcatcctctgctgcaggacgggcctgcgctgcagatcctgctcaggagacgtgaccccagcccctgtggagggggtgctggcccccagccccgcccgcctggcccctgggcctgccaaggtcagtgccgcaggggccctccatgcatgccggtgctgggggtggggaaccccttgggttggtgttgggggagcacatctcagggcagaccctgggtgccagcttcgagggcttgcaccagacgcactgaccatgtgctcattatctgtagaaaatatttcccctttaaaccaattctttttggcaacttaaatatagttaaaaaggaagctccccccgagggttggtggctgacgtcacggttggctgtgtggccgcctcacagcatgagcctgagagtcctgccagggctccctggtggggtgaagggagagcgggagcgcccggcctgcaggagcaaacccccaccctgtctgacccctccaggttgtctcacccccagccctccctggggccaggatccaccccactgtgtggccagagccctctcagagaggcaaagtgaccccgggtccagccagtagctcttcctgtcctcctgctccggggtcagagaggacctgggtggcgcggagacccctgactgctggggcggctgggcttgccctggagctgggtgtgggggaggcccgagtcgctgctgcaggagcctccgggggggtggcctcttgccctgaccgtccccagcagaggcctcctgagcacatcctggccaccgaggagcctttagggatcctggggtgatgacacgtcccacctgctccactggcccatgctctttcccagctgtgcctccgccccgtatacaccgtgtgggtgacaggccaccccggcgtggtactccccaggagggtgacagcctaccccagcgtggtactccccgggcaggtgacaggcttccccggcatgcaggctctggcctggcatggcacaagcctcagacccagccctgcccttggggcttttgtggaacagtggcgtggcccacagctgtcactgtccccttccttctagaagcctccctcctcacaccacccatctggagtcaggagcccagccrggcatatacgcagatgcccctccctaaccccaggcagctttcctgcaactgctcccgcagcgggtacctcgtcattaacctcctgggttctgtctctgaacagcagagacctctttcttgtcatcgtgatgtgaaatgtaacgccatgtcagaggaaaagttctggctggccttggcctcccccctcagcctgcccccttcctccagggtggttggacgtggccccagaccccrtcctgagcagctctcccaccccctgggagcatccttaggaccggggagcatccaggggctttcccctccagaccgggcagcccctccctcagccatgcagggctgccgggcctcgcagcgccagtgttcacccgagtggaggagctgggatgtggctgtttggggccacaaatggggaattccacagggttcartgtaatatggtctcctctctgctgggggtgcctgcctggggaccttctcccactctggtcgctcacctatagtgtgggctggccctggtggtgcttgtcgggggcgggggtggcatggaccaggcactttcctctctgggcctcagacttcccctctcagagtgggactccttgctrgttccctgagctccctcgttttccccaggaggccacacagtgtggaggctgtctgggggccgtgggcagctggccgtgggcaggaccctggggaggcagccccagccccatcatgcccacgcagccctgtgcccccacccccartggagctgggtgtaagaattcccatctcagtgtgggggaaacacccccgcggcccctaggcccygcggcctctgtrcccccaccagggctgtgggagttgggctgacctcttctctttactgggttccaggatgacactgccagtcacgagcccgctctgcacagggatgacctggagtcccttctgagcgaggtaacgcctcccctggcctcctggtgctcctccactccccctcccctgcctcagccggcacccaggctccccactctgggggaggactgccggcccccactgctcttgagccgtggaaactcaggctgtccctgctccacccaccaggagccccagtgctgctgagcacctggcaccccccacaggagcccccctagccccctygcaggagccccccccggcccctccccctgcgggagcccagtgctgctgagcgcccccagcccctccccaacaagagcccccacacggcccctcccctgagggcctgcaccctggcaggcagaggctcgagcaccaggctcaagatccactttcccagggagggtggggcgtgggagtggggggggggtcccagaccccgtccctctaagatttgcttgcccctcccaactcaggcctctctacgctaagatgggcaggtagaatctgtggggaaaatgtgacttttaagggctctgtctgtttttgccaagaggataagctccttcagcctccacgggttctcctcagtgtctgatgtggcacccgggggtcccagctgaccatggggcaggggttctgccctgtgcagtggccgtgccccacacaccctgaccgtgcaggtgtctgcagagccccagggcctgagagtgggccagggggcccagcgctgggtaatggagctgcccctctggatggggtccccgggtatagctggagaaatgagcgacgggctcacagcctctcccgggtggcggtcttattctgctggcatcgtggggcccgtggccccatcctgtgggagcatcaggctcctgagcagaataagtagctggccccgacccccccaccctgaaggagccacccgaggaggcagaactgccatgaactgccatggggatgtgccctgggcttataggatgtggtgaagtacacaggacagggtcctcggtctggcctgtgccatggggaccttgggcctcagtttccccacctttgatggaatacggtgaagtgcacaggacagggtcctccccagactggcctgtgccatggggcctcrggcctcagtttccccacctttgacttagagggaaggttggatggtgacttcttgtaacgatggccatgattctgtggctgcggcrggggcgcacctggaggttctcaccgtcactctgtcccgcagcacaccttcgayggcatcctgcagtgggccatccagagcatggcccgtcyggcggcccccttcccctcctgaccccagatggccgggacatgcagctstgatgagagagtgctgagaaggacacctccttcctcagtcctggaagccggccggctgggatcaagaaggggacagcgccacctcttgtcagtgctyggctgtaaacagctctgtgtttctggggacaccagccatcatgtgcctggaaattaaaccctgccccacttctctactctggaagtccccgggagcctctccttgcctggtgacctactaaaaatataaaaattagctgggtgtggtggtgggtgcctgtaatcccagctacatgggagcctgaggcatgagaatcacttgaactcgggaggtggaggttgcagtgagctgagattgcgccactgcactccagtctggtcggcaagagtgagactccgtctcaaaaacaaaacaaaacaaaaaaaccacataacataaatttatcatctcgaccacttttcagttcagtggcattcacatctcatgtaaccattgccaccaccatctgcagagctgttccagcttcctgaatggaaactctggccccatgaaacactcactccccattcccctcccaacccctggcaccctccactctactttctgtctctatgacttctccagggacctcatggaagtggaatcacacagtatctgtccttttgtgtctgtcttattttactcagcatggtggccccaaggttcatccatgttgtagcatgtgccgaaatctgcttccttttttaaggctgagtaatattccagcacatggatggactgcattgtgttcatctatgctttcctcagcagacacctgggtgcttccaccttttggctgttgtgagtaatgctgctatgaatatgtgtgtgcaaatatctgtgtgagtctttgagtaaaatcgctggatcacatggtaattatatttttaattttttgaagaactgccatcctgttttccacagcagctacaccatttcacatccccaccaacactgcatgagggttccagcctccccatatccttgaaacaattactattttctgcatttttctttcttttcttttcttctttttttgagacggagtttcgctcttgctgcccaggctgcagtgcaatggcgcagtctccactcactgcaacctctgcctcctggcttcaagtgattctcctgcctcagcctcctgcatagctgggattacaggcgcacaccaccatgcccggctaatttttgtatttttagtagagacggggtttcaccatgttggctgggctggtctcgaactcctgacctcagacctcaggtgatccaccccccccccccccccaccccacgggcctcccaaagttctgggattatgggcgtgagccactgcgcccagcctgtgtttttcttttatagtagccatcctaatgggtatgaggtggtacctcattgtggctaaaccatgtacgtttaagaatttacacacacacacacacacacacacacacacacgtgatgaagctgtaagaaaagggagagaataatgacccaaaatgtcagcacaaggatgcctcaggggtagacacaggtgtcttcttagcgccttttagcccacgcatatgtgcttgcgcagtctctcggtgtgttttctaacatttcacaattaaataaggagtagttgatattcacagccaccatttccaccgtatatgtagagaaaaatgctcaaatcctagcgatcagcccgctgagctttcacaaaccgaacacaccgtgcggtcacgaggcggctctcccgaacaccggctctgcacccccagggcccggggaaccaagacttccccaagggcccagcaaaagtgagggaggaggggaggaaaggagggagagggagggaggagtgctggctgctttccgccagcgcctcgtttgggtttcgctctgctgaggcctgaaggcgccctgagggcccctggggggcagggaggggcggtggctgcggccgacagcaaggaacctccggagaagcgaagccgggccagacgtgccaccggggcctcggcgctggcgaaggggcgcgtgcggccgcactggggccagccccgccctggtccccggccacatcctcgagaccaccggggtggaggggggggtctcactgctcagggcccgcgtgacattgcacaggtttagaaacgcacagcgggaaggtggccccggcgggccgagggcgcaggatccctgctccgtccagggtccgtcctgcgaggaggcgccgggggcgggcccggggcggggcgggcggaaggcgcgcgcggggcggggcggggacggcgacgcggcgcaggcggcgggagtgcgagctgggcccgtgtttcggccgccgccatggccgcggtggacctggagaagctgcgggcgtcgggcgcgggcaaggccatcggcgtcctgaccagcggcggcgacgcgcaaggtgggcgggggtcccggccgcgtcgcggcgcagggggtggagggcgcctccgccctggcctctccggagcgcccgccgagccccgggacccgggtctcgggccggcccggcctcccgccccggcctcccgccccggcctcctgccccgggtctgtcccccgctcttccccggcgcggtctccggcctacgtgcggccggccacgttctcggcctccgcctgggtcttggcgccgcccgcgccctgccccgggggtgtgtccgactctgggccgcggggcaggacctcccgaggagtccccgaggccacgcgagcggagggcgccggtcccgccacccccagagcctggcccttcctggttctgaagcgacccggggacccggtgcctcccgagggccggcgccaggctgcgggcttccgggacctcctcccggctgggcgggggcggactcactcccggaccgcgcctcctcctcggggccctcgcggccgccttccttgtgggtctagctggggaagagggcggtggggagatgggctgcccggggcattgagcaaagcccagttgtcacccttttcgcaggggtactggggaggcctcaggtggtggggactgggacttggcagagctgggtgggggtccggcctgagggcgtggtgtcctcgcacgctccctcccggaggcctggtcctgcccactgccggcctccagtgtctctggcctgacatgtccagtgtggcacctgtggcacaggacgccacctaccctacccctcaggaggagagaggagaggatttaggagaccagaagtgaggtgctgggttgggaaggggcccagccagcaccccaaggctgtgcagcggggtctggtctgtcttttagagttcagaaaatggttgagaaaatgcggacacacacccccacccagcttcaggcacctgaccctccttttccctatctggaagccaggaagaggcgagaaggaagccggccttgagtgggaccaagccagggaggcaggagtggctcgtgggtgtcactgtctgaaccccggcctgcagagggggctccttcagacctggctgagccaggcctgtggtggctgcccacccgcccttttcacagctgtggcaagagcgggagctgctgcttgttgccggctactggcagtgtcctggagccagtgtggctccacaagtcctgtcctgtgtggctctgggtcacgcctttcctgtgggccaggggtccgtgttgtcgagaggggagggcgttgttcaaggatgtctttttgcacaataacctgtgcaaaggtagctagaagacttgaagcaggccgggtgcggtggctcacacctgtaattccagcactttgggtggcctggtgggttgtgggcccaggtgggagaggaggcccgtggccttggagggtgaactcgggaagctccatcccatgagattagacaagaaaggccccgagtctggagggcagacaggttgctgtggggccagcccgcctgcccaccagggaggcgctttcttggtgaggctggtgaagccccaaagcccacctgtggttccctgaaacacagagggtccccaaccagcttccttgtttgcaaagtgggagcatcagcagtggagggttgggaaagttgagagcctggggtggcacgtgccccccccaccccctgccaccccatgcacagactaaacagagaaggggggctcgctggaggttgctgaagggccagcctggcaggtggttcttgggccagcggggaggggcacccagggtgacaggcggttctggatgctggtggaggatctggagatgggatgcccctcctggccctgtggacaggccggctgggtgggcctcccatctctgtctgagctgggggttccaactgctcagcctggccccagtgcctgatatggagtgggcagcgcttcctggctgcagctgggagggtgcccacagtgcacctgctggccgatcatggcatcccagttgggcctgtgccttcctctgcaaatgtcctcccttcccaagccccgtgcagctgcagcgtctctgtatgtgagctcccatgcgtggacagggaacaggtggttttctgcaagggaggaggactccacacacttccccagttcagggctggggctgattcatggaggatgatctggggcgagtaggatgggaggaactgacattctgggcagaaccagagtcctgtttcatgagttcggaaaagcagtctgcagggctctcccaggccaccactgctgctgccgtgtggctccccatggtgggtgctctgttttccttctcggggccccactgccttcctagaaaggctgaccctggccgaggggaagcctgtggcatagtgtgcccttctctttgccctctatgtcagccgggcagcaggagagtggggactgggaggcactttctgccccaatgctgaagtctgcgtttgttggatgtatggaacagccagcctcaccatcctgccagtgttgcccagtcctgggacttctcgggccttgatttccccttctgtgaaagggggttggggacaagacaggccaccttgcaagttccttccagccagcccacaagtcctgtcctgtgtggctctgggtcacgcctttcctgttggccaggggttggtgctgttgagcaggggagggcgttgttcaaggatatctatttgcacaataacctgtgcaaaggtagctagaagacttgaaacaggccgggcgcggtggctcacgcctgtaattccagcactttgggaggctgaggctggtggatcacctgaggttaggagttcaagaccatcctggctaacatggtgaaacctcgtctctactaaaaatacaaaaaattagctgggcatggtggtgcgcatctgtaatcccagctactcaggaggctgaggcaggagaatcgcttgaaccaggaggtgcaggttgcagtgagccgagatcgagccacggcactctagcctgggcgacagagcgagactctgttgcaaaaaacaaacaagaaaaaaccccaaaaatcagccaggcgtggtggtacatgcctgtagtcccagctactcgggaggcagaggcaggagaatcgcttgaaccggggaggcagaggttgcagtgagccaagatcccgccactgcactccagcctgggtgacagaacgagactctgtctcaaaaaaaaaaaacagacttgaccaaaaaaaaaaaaaaaaaaaaaatggcccggcctgcctatgcctaccttcatctcgccctggcctgggcacttttaattctctgggccctttgtctagtgccccctccctgcccctgcaggacaccgtgccctgcctttccctggctggtgtgtttggacgttggtttcctgttatcgcaggtgaggacttagcttcctggcccgccacgcctccctgacatggcctcctgtttggagccttcaggctcatgcttacatccttagctgatcattaaactttgtgaccatttcatgctcactgctttcttgcccgggagctaatggtgaggaaaggtcactgggaaccagcgcaccaacctcagacattgattttgttccagccttttttcctgggcaggggtggctatcacctgctggtaggcagcggcaggcccactgtcctgcctgccctctgactgcggtgtcggcgactgctgcccgaggtttattttgagaaagaaaagccgattaaagggccattaaaaaggtcttttgaagattacagcttccaatgaggttaacagagaaaatttcctccttcaggccgcagccagtcccgttctaaaatccagtcccaacaacaaagtggccatgtgacatggccactttgttctcctcccaagggctcagcacaaagctgggttttggcagcttcattgtctccgggcgtcaaagcaggttttattttgcagagcaccctgaagacatttggaagtgaggggtacccttgctgacccctgatcctggg

SEQ ID NO: 98152 - DNA, 25022 bp, Homo sapiens
ggggtcgcggccgggcagaggcgctcctcacatcccagacagggcggcggggcaaaggcgctccccacatctcagaatatgggcggccgggcagagacgctcctcacttcctagatgggatggcggccgggaagaggcgctcctcacttcctagatgggatggcggccggacagagacactcctcactttccagactgggcagccaggcagaggggctcctcacgtcccagacgataggcggccaggcagagacgctcctcacttcccagacggggtggcggccgggcagaggctgcactctcggcactttgggaggccaaggcaggcggctgggaggtggaggttgtagcaagccgagatcacgccactgcactccagcctgggcaccattgagcactgagtgaaccagacaccgtctgcaatcccggcacctccggaggccgaggctggcggatcacttgcggttaggagctggaggccagccccgccaacacagcgaaaccccgtctccaccaaaaaaatacgaaaaccagtcaggcgtggcggcgcgggcctgcaatcccaggcactcggcaggctgaggcaggagaatcaggcagggaggttgcagtgagccgagatggcagcagtacagtccagcttcggctcggcatcagagggagaccgtggaaagagggggagagggagaccgtggggagagggagaccgtggggagagggagagggagagcggcaggctcttctttatcctcaggcttcagctcagacatccctcacctgctagaaccccctttaccactttttagatactgcaacaaccctagaacacgttaattcctcctgcctcgtgctgtcattatcacttcttctaattccacatctatttagaactccagaagacattattattgttgttctatgcagtcattgtctatttagatttacccagatatgcaggctttttattgttcttcattccttcctgtacttcatacttccgtccagggccactttccctctgctgaagaaatccttttagtatttattttagtgtatgctttctggcagttaattctgcaaaccaaaaagtatctgagacaggtctcaatcaatttagaagtttactttgccaaggttaagaacaactcctgggagaaaaaagcatggaatcacagaaacagcctgtggtctgtgcctttctccaaagatgactctgagggcttcagtatttaaagaggaaaagtgggctagaggggaaagaggaagggtgtggtcacatgactgaatgtacatggtgcaagagaaaaggagccggtggggaggagtcaattgtgtattcatcttatgcccagcaaattggcactttccataagataaggtgaacttagagcagctacttgtggtgatgtttaaccttttatctctagctatctgcttaggaactaaaagaaaggcagcttcttgcatgactcagctttcagcttaattttttccttttggcagagtgaattggggtcccaagtttttatttgcctttcacatatctctatgatttgctttttctgaaatatcttcatttcacttctgcctttatatgatgttttcatttggtataaaattctatgtagatagctgttttctttcaccacgttgaagatgttaattccattgtcacctggcttccatggttttgtcacaaagtcaggtgtaagtcctttagtttctcctttatatgtctagcttctattctctttgtctttggttttcagcaggtttagaatgtaaccacgtgtttttttaatctattctgattgatgttgatagtacatttgtaatctgtgttttgttacctttgatcaatttttttttgagacagagtcttgctctgttgcccaggctagtgtgcaatggcgtgatctcagctcactgcaacttccatctcctgggttcaagaaattacaggtgcccaccaccatgcctggctaattttttgtatttttagtagagatggggttttgccatattggccaggctggtcttaaactcctgacctccggtgatccacccacctccgcctcccaaagtgctgggattacactgcacccagcctgaatattttcttctgacctatctttcagttcattaatcatctctttcactgtgtctaatctgtttcaaacccatccattgaatttataacttcagctattgtttttttaatttccattaaattgttttttatataccccacttctctgctgaacatttccatctcataatctattttcttgaacatattaatcacattaccttaaagtgtatgataatgtcaatatcctgttgacatgataatcccatggaattattcctactttatttatatatatattttttggttttggatcatttgtctcctggttttctttgtaaactttaaatctggatattgtatatggaaatattttagttaatttgaggccctggatgatgctatttacctctgcatatttccttttgctttgggctggctgtgggaaagagagcagatcaacttagtctgggagtcagccctttggaagcttggtttcagactttgagagggacgatctactcacccctcagccttcctcccctattgcagccctcagtgctctcagctgaaggtctgggtcactcatcagagtctccctatcttgtgggctgtcaccaattattgtctccccaaccctaggagatgcaaaagctctgctcagtgtgtcaacttctttccactgcatatgtgagactgaattgtgtccccccagcattcacatgttgaagccctgacctccaatgtgatttcatttggagacagaacctttaaagaggtgattaaggttaactgaggtgataagggtggggccctaatcccagaggactggtgtctttgcaaaaggaggaagatacaccagagatctctccctctctgcagacacagcagaaaggccattgtgagaacacgccaagttggctgcatacaagttgggaggagaggcttgaccggacaccaaccctgatggctcactgattttgggcttccagtctctagaactgtctggaggctgggaaataactatcaatggtttaagctgcccagtctgtattatttatttatttttttttgagacagagtttcactcttgttgcccaggctgcagtgcaatggtgctatcttggctcaccacaacctccgcctcccaggttcaagcgattctcctgcctcagcctcccgagtagctgggattacaggcatgcgccaccatgcccggctgattttgtatttttagtagagatggggttcctccatgttgttcaggctggtctcaaactcctgacctcaggtgatctgcctggctcagcctctcaaagtgctgggattaccggcgtgagccaccgcgtccggcccccggtctgtatgtttttatggaagtctaggctaacacaggatactaatcaccaagtgcctcaaaggaaaaaaactcttcccttttctttttgaggtgggggaaggtctttgcccctcacagaaagacttcttttggtagctgatagccttaaacagatttaaagaatattttatactgatttttgggctatttttgttgggtttgtctgaggcaaccagtcctccctaactgtaagtagaaacgtctctgaacgcctcagggatttctcctcacatgccaagcatctgtgtcagtcttctcactcagccattggatactcaggggccctttccatttatggagtcaaatatttctttagttcagagaaatttcttatttttactttttctttgagatagggtcttgccctgttgcccaggctggagtgcagtggtgcgaccttggctcactgcagcttctgcctcctgagttcaagctgattctccagcctcaggcttccaaggagccagaattacaggcacacacaaccacactcagctaattcttgtatttttagtagagatggggtttcaccatgttgctcaggctggtctcaaactcctgacctcaggtgatccgcctgcctcagcctcccaaagtgctgggattacaagcgtgagccaccgtgcctggcctcagagatattttctccaattctgtctttgattttgtcctggtttccttttttccaccttctcctgcagctcctgtcaggtggacgtagcccttcctgtactgatgcccggtgtctcggccttccaaccttccctctctcttttctttttttttgaaatggagtctcaccctgttgcccaggctggagtgcagtggcacgatcttagctcactgcaacctctgcctcctgggtttaagcgattctcctgcctcagcctcccaagcagctgggattacaggcatgcgccaccaggcccggctaatttttttgtggagacggggtttcaccatgttgaccaggctggtctcgaactcctgaccttgtaatccaccagcctcagcatcccaaagtgctgggattacaggcatgagccacccagcccagccctgacctttcctctcttaacttctccatcatgggagagtcctgtgactttgtctcgcagttctttgcgtcctcagccaggacccctctcctagtcacatgtgggtcgagctttcatgtcagcaatgctgttactcatttgccagttccctgccttctcatgagtcttcttgttgggaccatcgccaggtgtggcgaccctccggaggggctctggccatttgggttctttaccctgtgctcgtggtaggccacggtttttcctgagctctggttcctccgtccattcgatcccctttggctgtgtccttcagaaacctcttggcgttcggtccaccagcggtgtcctttgtgtccccacagctgcgacagagcctttttgcatctttgctgtcacatgaaggattcggggcaggtcacagtgtgggagacagacacagcatgaattgaattcagaccaccattgtcttatagcctggctttttaaaacctaatgtcatctgagcctctttttcccttatccatgactgtagtcacgcatcacttcgtgacacagcaactggcgtaatttcgagcggtaacacatttgggttctgtgtctcatgatttctaagctgcgtgtttctcacttccacaacactgaagcgggctgccgtcatccacagcctgccggagtttagtgtgtctgtgctacctacggtcgtgttgttttatgattaacggtgtcttggagtcgataactctctgaaccctgcctgccctagggcacttccagggccagcaatctgtgggctctgaggcgccacgtcccctcggaaggggctggttgcggagccccctcccaggaccgtctgagctggccacccacctccacatcctctgctgaggccctgggctccaggttccagaaggaagggaccacaccttatgacctgcctgggactggggctgactctcagaccctctccccgaaagacttcagcagccttccccctcctaagtgggggctctagccaagaaagtgaatttttgagtagaagacggtttgtgaagttatggtccatgaagacttgtctccatggctttgcgacgttgctcagttggctgagcctttcccaggcaggacagaaacggctcagacgcttaggttcaaatccaggccctgccatttcccagctgagcctgaagtgcggcctcccccgccttcggccgggctcaccatcagatgagacctccgccacgccccggctggcaccacccgggcactcctgagggacgcaggggtgtccgccctcaggtccgttccatccgaggccctgggatcacagacatggaggccggggcgggccaggcaccccaggaatggcgcccgcaagtccggggaggccgtcctgccggcccagcgcgtttcccgcgtccacgaggtccccgttccgccggcactggcggcgtccagcctgggtttgcccgcgctcgccgacgtggcggcctggccaagctcggcgccgctcaccagcgctgacctgggggtggtttgacctcccagtgcctcagtttcttcacaggtaaaacgggtcttcttgaggacgggtgtggagggcccggggcagccccgtaggagcgttggccaaaggagcccggcctggggctgacaggaaaccgcggcggcagggaggcgggtggcgcccccaatcgtctagggtgctggcccgattcgcgcggcccccgcggacgggaccccgcgggccgccttctccgctctgtccgcggctcctgagagggaacgtcacccccagcgtcctccctcctccgccccaggtccctgcggccatgggcggcggccccggcctcacttcccggcgccccaggaacgcggcccccaggaaaggagtcggggcccgggcgacgcggggaggcgggcaagggtccccagggcccgggctccccgtaaacgctcctggcccgcgccccacagcgccctagggcttccgcgcccgmcggggtcgcgcgggacccgccccgtgacgcatctccaaccgcccagagccgcggcccggcctgcgcgcgcccgacgccccggggagcgcgcctcgtgaacgcgcgcagccacgtgacccccgtgccggccaacgggtgcgccgggatttgggggataaagcgcggccccgcgcacagttgcggcgggagagcggcggggccgagagcgtgactcgcccgctccgcgctgcttcccccgcgccgcctccccgcgccgctcgcgcagccatgtccgaggagaagcccaaggtaagcgcggcgaccccgcctgcacgcgcgtctatcgcgggcgtcccgcccccagcccggctccgcccccaccccgactccgccccgcgtcccgcccctgacaggctccgcccctccccgccctctagagccccgcccctaagtgggcccgcccaaggtgcgccccctctgcccccgcgaagcgcgctgtgccgcgagctccgccccctccgggcctggccacgcctccgctccacgcccgtctcctccccagctgggaaggcgcgcgcccagcgcctccttgagcgcccggtgtcgggccccgcgctgctgctcctgcagagcgcggcgccctcggatcccgccccagcagtgtccccgaagcgtctttgcgtgctcctctcctgagtcattgctggttggggtcgccctctcccccggcatcgccctgggtgcgggatcctgtgtcgagtgcacggagtcggctcgggaacaagcgtctggggttacccccaaggggcgcgctctgaggggcctggcccctgtgagcagcactgccgtccttccagggcgcccatcgcgaccccggtattcacccacttctccgcatcgygtcccggccatcgcgtcccccagtgtgcgcccacccctctccttcgtgtctccccaatcgtgccctcagtgtgcacctactcccacccatcgcgccccgtgtgcacccaccgcctccatcgcgtcccccggtgtgcgcccacccctccccatcgcgccccccggtgtacgcccacgcctccccatcacgccccccatggtgtgtrcccactcctccccatcatgccacctggtgtgcgcccacccgtccccatcatcgcgtccctggtgtgcgcccacccctccctattgcgtcgccctctccatcacacccccagtgtgtgctcacccctccccgtcgcgtcccccagtgtgcgcccacccctatccatcgcgtccccctttccatcacacccccagtgtgcgtccacccctccccatcaccccctccacgatgtgcgcccacccctccccatcacgccccctatagtgtgtgcccacccctccctatcacgccccacggtgtgcgcccacttctctgcattgcgcctcccccaccatgcgcgcccacccctccttatccagccttgggtgggctttagtctcccccattgccatgctggggtgtgcctccctccagtctcagtcctggggtatgcaccctgcattcaggtgcactggccattccttctcgggagggtctgtagtcgcattctccagtgttcataaaaagagaacctttccgaagcccttggtgtgcactgtcggcctctatgttacatcccagtggaagatgactagagctgaaggctctgtaaagaggctgtctctgatactggcctggtcctggaggtgaccaccctccctttrcagatgagggtggaggctcagtgccagacactggcgggaagtgggatggaaccgtcaggaaccatggtcgcggcctctatggaagtctgcactctgcttgctgtggtcagactccagggaaacctgccctatccagatggcatttggggtgacctttgctttttacattttgactccagtgaagtcaaagttctcccactctggggttgtttgaatatttaaatacttgttaaaactaggtcaaatataaatgtcctttatgtttttgtaggtggcttcctcttaatgaagagtaaatgtaataaaatacatatgatattaattttctcagcagtatttacacttagctctgccatgtggtcaatctcaggctccagttccgttgaaaacacttgtttaattccagaatgactgagtggctgccacctcacaggccccgcttctggtgggtcccctctgagcccatgtgggagcagctctgccctctggggctctgacgaaggggaagargtggastctggggcccggtggtgctggaaagaagagcttttaggtcaggcaggagaatggttctgacttccctggatagctgaggtggaggattgactgtagcaaactgaggcccatgtttttagggcttcactttttaactcacgagttcacttgcttattaggaattcaccaggggtctgggacagatcgtcattcctggtgtccatctgtttggagcagaggcactgtggccggccctgccctgccccagcctctcccggggctgcagccattccccccggggctgcagccattaccctgtgggggacgtctgggccctgcatctgtgcctttgaacacactcataccttccttccctaaagaagccagtgcatcctcatgcttggggaagtgaagggggctcatgcaggggtccccacttccatcctgcctggagctgtttgcatgctcttccttcctaggccagttgtctctgtgctggaggccacattcgggatggggagatgggggtgtgccagctcaccactcaggctgccgccaagccactggcatcccgggagtgggcaggggtgtctggcccaagactggagtcggggggtgagtgccgccycaggacacgcaccttcaggctcgcagctggagcccctcactgccaaggccccttgcaggccactctagctcccttgacagagcaccatgcctccccagggtctccccagggtgcataccccagggaagcaagcatggrtgcagtccctgggttcaccctcaggcgagccttctacatcccactccctgtatttaggcatcgctgggacagttgtccctctcccagccagggaaggaaaggagaagtggagagaacaggcgtgtgatgtacagtgcttcctgagggcagcagctcagcatggggtgaaagggtaccaggacgccccagacttgactttcagagtgagccrgagggccctgcctcattgcttcactcacaaacgactttatcccagcagtgcaggccggcagagggrtgccccacttttcrgctcagactgagctgccccraagttggctcccagtctcttgacatcagctttttgcctcaactcaaaatgcattttcaggcaacaagacaccccgattgtgccattgttgagtagcttcaagtatggcatgaattaaaaaataaaatagtaccacctactgccgctcagataggacagtttgaaaccagaaagtactcggaggtggcttccctcacatttgctgatgtcagggcagcgagaaggagcctggccgcctgctgtggggagtggccgtcctcagttggattcccgaaatcaccacttgaatgtcccatagrgttcctctgagtcacaaatgttttcttctgtttttggtttcttttactagtgctgtatagctgcatgacttttggatatgtgtttttactggtttcataagaattttttaaaaaagagatggggtcttgctctgttgcccagactggtctcaaactcctgggcttacgccatcctcccacgtcaactcccaaagtactgggataacaggtgtgagccactgtgcccagcccacaagaataactttaaaataaagatggattttctcttatttttccctagactttgtttttttctttgaattaacaatgtcagaggaccctagrcttgcattgttttacacatggatgcttaacaagtggaagttaaaaataaattctgtgtaaaaataaaaccatcacgagtgactctgaattgctggagaattttaagaattagrttggttttgatgactttaaaaagccaacaattacctaaagacttgcccwttcaagtcgcggttattttgagacacagttttgaggccagtctctggtgtcttctgcaggagggtgtgaagacagagaatgaccacatcaacctgaaggtggccgggcaggacggctccgtggtgcagttcaagatcaagaggcacacgccgctgagcaagctgatgaaggcctactgcgagaggcaggtgcggcaccttgctcccccgcagrgcstccccgtgtgcrcactggtcctgtgckttccaggcatccccagagcacgagcgtctcggggctggacccagatgcagctgcccgaggtgccctcttcgtggatgggcaggcgggggcttgtgctgtaaaattagtccaggctgggcttgtcccccatggccttttataaggtggagggacctagaggctcggagaagtgtggtgggtttttcttcctgacagggcggctgcccggggtgctgtgttctccatggggtactaacatctgtgaagtctgtgatgctgaaggctcttgggggccctgctcaggtctggccattctggggctgcaggtggcgtgtgccccacgccgctgtcaccctgtcctcgcgtatgagctggcctgaccctggagagacactgccctcatgtgcggtgtggttttccattttgttaggaaaggcaagaaagcgcgtgattctttccccttcttccccagtttcaggataatgagctgccccactggcagtgcccagctgggtggatgccttctggctgctgtttgtgacgtggkgtgtgtgtgtctgttgttcttggtaacgctgtggcggactcaccctgggccagggggtccctctctaggccacttttatrggctttgcccaccagctgctgcctggtgtgttgggggcccggccctgcagccaggcgcccttccccagggagccctgcttgcctgagtgggacctagaggctgcttttcttcagccgctttgaaaatacagcaactcgttgcccttttattttactcttttgcctgtggattttcagttagatttcctcctctttccctcccactttggataccctgctcataggggcagtcactggcgactgccttgcattctttattggcaagcagcccctgacttcctttctttgtgtttgctgagggcagatcttattttcacctgcgaaaggtgagactgagcttccagacacgcaggtcccggtcttcccagcagagtgagtggcctggcgccgtgtaggccccgtgatccagcctctgcctgatgctgggccctggcccttgctggagtttgtactgcctgggctcgtggccactgtgtgtgtgacttcccgggtgcccatgttctcctctgcgctgcgggatggcaggcgtgtggggccgtgtacatgtggggggggctctgcccttccccctgctctcccggagctcccctcctgccccacctgcactgctgcttgtgaggctggctgctcagccgtggtccagggcctcctgttcaaatccttctagaaacttgggttctctcttgggtgtttcctggattagtcctcctcccttttgtgttttgtggtggagcacatcctccagggtcttgtcagaacgggcacagaagggcagcgtctttgagacactgcatggctgaacgtgacttttgcttttataaaccttcacacttcagtatgtggctgcacgtaatattctcggttgaaacttttttttcttttttatttcagaggtcagccatgagaatagctcccaatgttaaaagtgaaaagttcaccaggcatggtggcttatgcctgtaatcccagcactttgggaggctgatgtgggaggatcacttgaggtcaggaattcaagacttgaggtcaggagttcagtgccaagcctgggcaacacagggagaccctgtctctacgaaacattaaaaaaattagccaggtgtggtggtgcaagcctatagtcccagctactcaggaggctgaggtgggaggattgtttgagcccaggaggtggaggctgcagggagctgaggtcatatcactgctccagcctgggtgacagagcaagaccctgtctcaaaaaaaaaaaaaaaaaaaaaaaaaaggtgagaagttcagtggattctgattctctgtgctttgtttgtaacttggtttttccctggaagtatctgggaccatattctggcattcagtgtttccttatgtgcctcagaggtgggtgattttctcactcatgctgctgggcactttatgggtctggacgtttatttttattcaggaaatatgccttatgttagttctctgataatttgtatccttctccagactctgttccctctttttggagttcctgttcctcctgctgctcattgtcctagatattttaaatttgataatttttctcccattttgctttgggctttattgttgcatttgggcttctttccgggaggtcatttcaactttatctttccacttcctgtggacattctcatctctgtcatgatttttaatttccaaaagttcttttttctttctgttctttgagtgttctttttttctcagtagcaacttattttttttgagacagggtctcactctgtcccccaagctggagcgcagtggtgtgatcatggttcactgcagccttgagccctggggctcaagtgatcctcccacctcagcctcccgagtaggtgggactccaggtacacgccaccacgcctggctcatttttttattttgtggagatggggtctccttatgtggtccaggctggtctggaattcctgggcttaagtgatccttctgcctcggtctcccaaagtgctgggattacaggtgtgagccaccgcacccatcctcagtagcaattgattgttttctgaaggtagtagtattttttacttcccatagaatttgaatcgtgagtgtaggtgtgtgtggtgtgtatgtccgtgtctttgtgcatgtgtgtgtatgtgtgggtgtgtgcctgtgtgtgtatgtgtgggtgtgtgcctgtgtgtatatgtgggtgtgtgcatgtgtgtgtatgtgggtgtgggcatgtgtgggtgtgggcatgtgtgtgcctgtgttgggagtgttctcctgcctccttcctgtccgttctcctctgcgctcctcccctcctctctrggctgctgcacagtgagcctttccctgactgctctcacgcaggctgacttctgtgcaagcatggagcaccgagaagctgctgaaaagctgtgtacatggatggctgtgctgccagggctgtgcatccacatggggtgatctgtctggattgcaggttctggaggcgcccagatgctacagtttgagagttgagtcctccaggctccggccagcctcctggaggcgcatctggaggggagaggggacttggcgcacagtgttgagggcacgcgctttcgtgggcctgtttccgccctgcgcctggagctccgcacccaccttctcagaaagcacatctcatgtgtgctgccgtgggaggcacagggttgtgggggtcctgcctgaggggtctgcatgtgaacttccaggcagctgttcagaatcagctgcctgccacagctctgcctcacaggttggggcgtgcccagtccctccgccctaggatcctggtccagtgtccatcagaccaccagtgtccacgcctcagtagcctctggctcagcccagcattgacatatctgcccatccccactcccgttttctttgtccttcctgtttgtgcctttttsatttacttcatttcagtggggtttcaggagggagcagagatgcacgttttaaccccgtctgtcctgtttcagttaaatcaaaactgctcgttgaggaaatgtttctgcccctgaccacatttctccattccctcaggacgcagaaaggctgcgtgctctccttcctgctgccctcctcaaggccaaagtcatggtggtaactgctccccggcctcatgcagccttcttatctgtccctcattggcacacaacctgttccttgctgagaactttgtaaaggggggaagtagtggtgccagcattgtagaagttctactcggcttctggaaagatgggarggatgacccaggacaggtcagggcaccaggacagagaagattcagtgtttgaattgaccattccacacggccactgcactgagaaactttgattgaaaagctagccactggaaggttagtattcacctggcggctcatttcccctcccctggcacatcaccaatgctagtccagcttttctcctgctcctcagagacctcctggctgacagctgtctgagctagcgtcactgtgacgtgttacgcttcctcacctgggtttcgtatgtaaagaaagggtggattttagaggtacatgagtttggatgttagtctaggacgtctcttgtgttctggtgtttgaatgtaagtcggctttccttctgccatggaccacttacctrtctgctttgaaactgaactgccactggtttrgctttaagaagttcccagtatgcaatggtgtaacaaaacctgggttgaaaatgagccgttttagctcatcagagagaagatggtagaagagtgggttctgaaagcagtggtgtcaggcaccgcgtgaaagagattgtaggcccactggtgagtttttaatactgagctggatcataaatctgcatatcagaatgctgatacttggattaaaatatttggyttttgaattaagccgtatctggaaatgtttaatggccactgcttttcctctccagggcttgtcagtgagactaatggccactgcttttcctttccagggcttgccagtgagactaatggccactgcttttcctttcyagggcttgtcaatgaggcagatcagattcaggttcgacgggcagccaatcaatgaaactgacactccagcacaggtacggagctggcttcgcgtggttccagggcracttccgatttgtgcggggtaactgccatttgggatacgcttatttgagaattgtaggtgggagctcatacagaatgccttaatgatattgattattagattatttatttttcacattttaaatttaaattttcaaatgagaaaactgctttgcagacatcattcttgctgtttggagatgragccaagtgctgggcccgtcctcactgtaagggaagcgggggtgcaaggaccactcagcggccccttcccactcattgtctggacgcttgctgttgtagcccgtgtgcagcttaggggccagctggattcttgtgccctttaagcatcttgcacaagtgacgtgggtgggcagaatgtgccataacccctgattatcagtctgcacagctcgtttctctcaggcacatgcagacatgaatgagatttcatctatcacgttgcagggcatcatactgtcatggaaagagctttggacctggaaacagacttttttttttgagacggagtctcgctttgttgcccaggctagaatgcagtggcgcagtctcagctcactgtgcaagctctgcctcctgagttcacgccattctcctgcctcagcctcccaagtagctgggactataggtgcccaccaccactcccggctaatttttttgtatttttagtagagacggggtttcaccatgttagccaggatggtctcgatctcctgaccttgtgatctgcccacctcagccccccaaagtgctgggattaaaggcatgagccaacgcgcccggccgaaacagagtttttttttaaacttggttcaagttgcagctcttgtcatttgtcagctgatggccccgtgaccaagcatcacttcatcttgtggagtctcagttttgtctgtccataaatggaaccaatacctgctttttctccctttcaatgttgtgagaatccactggaatgttttatgtggaaatatttttgcaaaacatttaagattttaaatatttactattcagtatttaataaatattgaaaacatctttgcaacaagtatccatttktacctacttgaggaaacctacacaccgctgaggcagtggcagctctgggagtgttcaccagggagaagctgctragagcagctgagcagggagggcctcgtggagtctctggggcttgactgggggtcagggggctggctgtggacaggtggaccgagaggcagagggagccctgcctgggggctctccctccagcccatagtgtcggtggcagggtgagggtggccgacagccctgatgggactcctttccatctgggagcatgactrcttccagccttgctgagtctgtgtaggaactggcagaagcttcctcttgcttagaggatggaagaagatcagggtgggtgttttgcgcccactgtgtcaggaggagagaagtgagcgggggtgtttcactaccttgcctgggctttaaatggggaggggcggggagaagctggcaatggaccctcacttgacgggcccttctgtgagctgggggctttggctttcatggcatggtcccccgcacttggtataaagcgcaaggctcctgtgggtcctaggactcagtgctgctaatcagatgttcttaattagaatctgattttgtgtaattttcagtaagaattttagacatttcagtttatcttctagactcagtttttctctcagttaacattttagctttgaatctgcttttgtgagttttgttaggggaagcttgytgaaccgtaagggctgtagtgagcatacagcaatgcctcttccatgcgtgctgagctgcagtgaggggacggacaagagccaaggtgtgaccaggtgatgtcgctagtgtcagggaacactcatgccagtgaggatcttcccactctctgatgaaaactaacaggctcccctctctctcgctgtgcctkttgtgacaaccatgacagctggagatggaggacgaggacaccatcgacgtgttccagcagcagacgggaggtgtgccggagagcagcctggcagggcacagtttctagagggcccgtccccagcccrggccgtccatcctcgcattgctgttgaatggtgagcacgtgaccatgccgaccacaaaggygtctgcggaaactcgaggacattcaccacgatgattttcctctctttgatgtacttcaagtgcaactcaaaactatatctgcagggatgaatctgtaacttaaattgggccaatcagaattgttatctttgttcaggtaaaatgagttgcaagatattgtgggtacttttgtgtgctcatttgtgttttccccccctcctacaacatttttttaaccccmaaattatagcctgaatgttcgcttttagtctggccagggatctgactcctgagttggttgcctctcccctgctcactccagtcacatagagaattggtgtttcccgcagtggggatgcagctgttggacaggtattgggggcaaggttggtagggaggacagactgtcacttgctgttacaggcacaggtgattaaaatgctaaatattgcaaatttaagctttgtcagtatatggaaaagttgaagggaaaatactggaatgcttcttcaaaggttaaaaaataaccgagtcttttggtaatttgaccccacgtgctctctggccctcaagcatgtaacctcggggtctgaggcccaggacccacccccctgccacccctcccaccccactccctgctcagtacctggcgttggtacacaggcaaggattggcacaaccaaaattggcctttttctccctcttaatattgaagaaattcccacatttctcatttggtaatggtgttgtggcctcagatttcttctagtatttgcttctgatgaatgattatggtctatacataaaaaagtaagactaagtattgctgaatttgcagttatgttgtcgtgtataagagctacttccaagtgtggttacaaatgaacccatggaatgatgacttcatgttcttctcgtgggtttgtgccgtgctgctttccaaataggtattgaatttatgcattagtctggtgatttcagttctgtgaaatattttgggatctataccaattaaacattttcatagttctgcctattgtccttccctgaggctccattgctgcttggtggccattctctgcctttttacagtcacctgaacaatgacccatcatctcttgcttgcttgaaatcttgctgamatgttctcatttcctgtttgctgtatgggctcgggtgggatgtttgttggctctgttgtgtttattcaccaatttgtacattatttgttgtcctttactactgtaaacagtaaatatagtttggtattctgtctcttggcttctactaaacactgcatttgaaggttggggcatactggtacaattcagtgtttgaattgaccattccaggcagccactgcactgagaaactttgattgaaaagctagccgctggaaggttagtattcgcctggcagctcatttcccctcccctggcacatcaccaatgctagtccagccttcttcctgctgagggatgcatcctctcctcagagacctcctggctgacagctgtctgagctggcatcactgtgacatgttaccctccctctcctgggtttcgtatgtaaagaaagggtggattttagaggcaggtgagcttgggtgttagtctaggacatctctcgttttctggtgtttgaatgtaagtcagctttccttctgccatggacaacttacctatctgctttgaaactgaactgacattgatttggctttaagaatttcccagtgtgcagtggtgtaacaaaacccaggttgaaaatgagctgttttagcccatcagttgaatgaacccaaggtgaagaaagatgggcagctgtggagatggaacacgtgattcacttgcaccaggaagagtgcacggattaaggcacaatacaggatggggacatctgccagattccctaggcagcctggggcgaagcggctgccaaaatcaatgaggaaagggatgtgtcccaggcaccgtaggttagataagaataatggccaggagcatatgtggatgtattagggcagcgctgcttgaacttccacccacaacacctcacagcagaaccagcaggatgtcctgtctttctaaaaaagatttgtagagatggagctctcactatattgctgtattagtgcatcctcacattactataaagaactacctgagactgggtaatttataaagaaaagaggtttaattgactcatagttctgtaggctgtacaggaagcatggctagggaggcctcaggaaacttataatcatggcagaagaggaagggcatggacacaaatccaaaccataaatcagttgcccaagctgatctcagactcctggcctcaagtgatcctcgtgcctcagcctgccaagtagttgggattacaggcatgagccatggtgcccagcaaaggtatgttcttgaagttgtcttttttctgagatttatgcaaatggtgcatttggaaaaatagatctgttgggattactattttcaacaagattacttatgtgaaactgactccaagaatctttgggttaaattgatgctcctggaggagagaggccctatttatcctagtatctatgcctggggtcccaactggaacttctccagtttttgcaccgaaaggttcacatcccaggaacccccactcccagggaacttgagttgtcatcttagccatgctgcaggagtgcccagctggaaacgcgtgatgttcatgggaaaaccccaccgtataacatgggttaagctgtgaggtcctttttatatttcagaactttagttgctaaagatagaaagcattaattttattctgtacagttggcctccccagggtgtgctgccctgcagtatcacacactggctgctcagagtccctgggactccactaccacttgatccaagttgagagttccacgagttagccagttaaaacataggatgcccagctaagcttgaattccacataaggtactgaacgacgtccctgaaatgttgcagagagcctggttctctgaagataaggtgttgtaacagtcctgttgaggggagagactgccatcttgtttcagcaactcatatttcaagtgacttttgtcacttgaagctgaagctaatcctgatagaagctgtaaaccacatttctgaaaaataataattggaaaacatacagtgttctgcagtaagatgtctgaaaaagatggataaaattatgaaaacatcaagcatatgttgcagtgaacatcacggcattgacagtaatgctttattgcccacatctcccataactggaaaaggggagctgctctcctttaggagcactggacagactgccttggggtgtggggtgctgtctgattagagagagagcagctcttgaatgggggaggaaacacctccactgtgactttttgcacattgcatttgcacaaattactctctgaaacagtctcaaaggaccatgtcattttataaagcactgtggtcatttgaaaagatggaggtagactgaaattttgaattttggggaattttcctacactatgcatacttgtgaagtttgtattgttaaatttcatttgatttgacaaatccgtgttaagagtatacgatgtccaggtacagaggctgccccagaaacaagacagaagtaggcagggacccatggctctcatggaacacgcttttggttagaggcaacagataagggtaatacatttatagcatgccagtaagttctatagtacggtgtgttgagtaggtgttgcagagaaaaaggtatgcggtgaaggccgggtggtgacggcctaggccacactgaagaggcaacatttgagcaaagactgaaagagcaggtgggaagagtcggggacaagagccgccagaaagtgtttccggggagggaagagtcagggactctgaaccaggccagggcagctggagtggagtgagagggagggagggtctgggagtatggcggggtgaccggaggcagagcaaagcactgcaggacttcagctttactgagtgaaatgggcggagcagagtgtgaatgtgatcagacttcttttcaagggatcatctgcaatgctggaaaggaaaagacaaatgatagattattgcaacaaacagccaggcaagagatgcaaactttttttgcaaaggtgtgtgtgtatatacatccttgcaccggacagccacgaagcacctactgtgctgtgaagtcagtaaggatgtgggttaaaatcgctcacctcacagcgggtcaatcgggaaagcacacccactcactacagccattatgggaaaaagggctcgccccttacaggatcctcaactgtggagaggccgggagcccacgcggggcgctggggagtctctcagcaccccaggggttcgggcagggacctgagccgcgccctctctcccgggggtgccctggggtcgaggctgctcggcagagccggcggtcagttcgagccgcgggcccgaacagggctctccccgcggctctctccctcggagtagaaggtgctggacccgaactccagcggagccgcacaacacgtggaggaaaagcgccaggacagctaaccttcccaccttttcaaacctgaaacccggccggctggggacggttggaatgttcagtgcgtacccgcacctcaggccccttgtctccagccccagaccgccccgcgaccatcctccccaccccccgacctcttatctcgtccccgccctgtctccccaacctccatcctcccctccacaacccccgtcctcccgcccttcggccacgcgcggctggcacagaacaggcagttagcgcacacacactggaacaggcgccaccgttcaggaagtctctacaagaccaggaccctgaggcctctggaagtgccgggaccgaaccaaccccgcagagcgactaaggcgagggcaggagccaagagaaccgtagccgcggtcgcgggttgagctcccaccacccggacagcgcgcctcggcgatcgcgcacgcgccacgccccggaagagttcctgggcccgcgacggtggcccggaagcagtccccggtgtcggggcaggaggcacgcgcgcggctgaggcgaggtcgctcggcgcagctgttgcggggccatggcggggaccgcgctcaagaggctgatggccgagtacaaacgtgagtctggggacccgggccgtcagcagcgtcccgcgttcctgctcccgggcccgcgtcgtccggcggggctggggcagggagcctggcgggggagccgggcccggggcctccaccgtgagcccccctgtgggtcccgcggagtgccgcgccctgcgcccgctgcccactctcacgcgtgaagtcgtgaagagaagccttcccagcatcagtaaaggcagcgccggcgccgtgttagttgagagcacacacagttgagtctttgcgggcttgtttttttctcttctattttttcttttcttggcagccttgagaacgtgcagtgagagcttgaggaagaaggcctgacttgctgctgcggaattaggagggaaaagtgtatgcgttaaaaggggaaaggctcgttggtggagctttgaaaggtcagattttggctttccctctaatgaaggaaaagggtttttgaacagtgccacctgtcactcctcctaggtagtgttgaggaaacctcttgagtgctttcctacccggtaaattagatatttctaatgtctgaggagagcgaagggagaaatgagaacctaggaacactcggcattccatcgttttacaccgaatgcccgcttggaagaactgctgcgagaagtcttggaataccattgtgttgaaagcgccaggagcctgagtcgccgatggagacgagatagtagccggctaagagcagggcctgagttcagacccggcctctctgcttgttagctctttgaccttgttcctctctctgtctctgcagtttccttgtcttaaaaggttaaacttgatactgcaggtgaagtgcttagcaaaatacctgatgtgtaacccttaataaagttagctgctgcttttgtaattagattgaggataattttggaagaaagttaagctaaaagaatgaatgtgagaaaaaaaataagtggtgaatatacatgtagcttgatttcgtaaaactattggtgacaccgcccagtaagagttgatgtttggcttaagcagaccaaaacgttgcaaatacaggctcactcacgtatggtcattcttcccttggtatctggaggggattggttccaggccccgctgcagataccagaatcctcggatgctcaagtccctactataaggtggcgtggtatttgcatttaatgtatgcatagcctctcataacttttaaatcatctcaaggttacttatagtacctaatgcaatgtaagtgctgcacaaatagttacactgattttttttacttgtatttttaaatcgtcattttttattgttatttttttcaaatattttgtattcctggttggtcgaatccatggatatgcagccgcagatacacagggcctcctgtaaacgttcaaataacgctcgccacctagtgtctgctaaagcagaacataaaggcacacctcagtttcccgcgcgctttgctttattgagcttcacttcgcagatcttgcattttttacaagtttacaagttttttacaagcaaccctgcatggaagcaagtctgttggcaccatttttgctcgcttcgtgtctctctcttacattttaatctattactgtgatctatgatcagtaatctttgatgttactattgtaattattttggggcatcacaaactatgcccataaaagatggtagtcctaataaatgttgtgtgtgcttcactgactggctgtttccccatctctctcccggcctctctcttccctgagacaaaacaacattgaaattaggccaatagtaactgtacagtgggctcaagtgttgaagtgaagagttgcactctacccacttcaaatcaaaagctagaaatgattaagtttagtgaggaaggaatgttgaaagtcaagataggctgaaagctgggtctcttgttagccaagttgtgaatgcaaaggaaaagttcttaaaggaaattagaagtgctgctctgttgaacacaatgaatgataaagtgaaaaagccttactgctgatatggagaaagttttagtggtttggatagaagatcaaaccagccataacattcctttaagccaa

SEQ ID NO: 98153 - DNA, 22407 bp, Homo sapiens
tctccctgcccccctcatccctcactccttgggaggccatgttgtgagaggccatgttgcagggagcgaagcctcccaccgacagcttgtggggcagctaggagacctcagccaggtcctcagagacggcccccctttccctcccaggaggctgagcccagccatgcagctcagctgctccagatgcctgagcctcagaaaccgggagacagcgatgtctattgtgagctgctaagtctgggggtgatttgttatgcaatgcaggtgactagggtatcggcctggagggggtctggactgggggtgtcacctatggggcgaaggtggtggaggaaagaagagacaaggacggggcctggggcgcatgggactcagcagcaggtgtcatcaggatagcgtttgcatgagttgggggtgagcctgccctgctgagccctgcagagctcccagctgtcagggcaggagggagcagcggttgatccatggtaccttgtcctcagcagtatccctagctgcaagccagaaaccccgacccactggctgaaaccacaaagcgggtgtcggccctgtgtgcctggtgatggcggtggtggccttgcttcaaagactcgacaggaagctcctgtgtcccccactctgcgtgtctctgggaagcaggctctgtgtgtagccccctgagatttactggggagcagcgtgcctaactcaccccctgtaagaagggaggcccagggctgggcagggggccaaggctgtgacgtaggtccagtggagccttcgtgagcccaccagagctctgaggcccgtggccgtcacactgtgcccctgcaagcacccacagcctgagcctgttggaagcttcctaccactgctggggaccagctccagactcattagcagtgaacattctgcctgcttggtgtagaagagctcagaaggcactgctctgagacttttctgtcatcccacatcttacaccaacctgaggactaagctctgatttttttttttttttttttgaggtggattctcgctctgtggcccaggctggagtgcagtggcgcgatctcggctcactgccaagctccgccctccaggttcacgccattctcctgcctcagcctcccaagtagctgggactacaggtgcccaccaccacgcccaggtaattttttgtatttttagtagagacggggtttcaccatgttagccaggatggtctcaatctcctgacctcgtgatctgcccgtcttggcctcccaaagtgctgggattacaggtgtgagtcaccacgcctggccagctctgattttttttcttgcctatattcctatctaagggatatggagagtcatgccctacaaaccataaattctcatcagacgggttttatttaaccctatatgtcataacttactttccaatctgactctggcataacatgacaaggaataaaatcaaaatattttaccccgaaacatgtttcctgccatattttgagacgctcctgcaaagccgtcctttgtgggagaaaatgtgcatctggaaggaatctctattcacatagcttgatctttttcttccaggccctcccaatcctgacgagattaactgagagtctagcaccttttaaaggtgtgaataggaaacattcgtcatcgattgtctctaagggcagccattaaagacttcaaaagaaccttggtccccacagtctttttttttctttttttctgtgcagtggcgcaatctcggctcactgcaagctccgcctcccgggctcacaccattctcctgcctcagcctcccgagtagctaggactacaggcgcccgcccccatgcccagctaatttttttgtttgttttttgtatttttagtagagacagggtttcaccgtgttagccaggatggtctcgatctcctgacctcgcgatccgcccgcctcggcctcccaaagtgctgggattacaggcgtgagcccccgtgcccagcggtctccacagtcttttatctgaacctgagcatttcctttctatggatcccaggtctttagacaaactcaaccgtcaaccagaaaatgtttaaattcaccgatagcctggaagcccccactttgagttgtcccgcctttctgaatcaaaccaacgtatttcttaaatgtattagattgctgtctcatgccttcctaaaaagtaaaaaaccaagctgtgccccgaccaccttggacacatgttctcaggatttcctgagggctgcgtcacgggccatggtcattcatatctggctcagaataaatctcttaaaatattttacagagtttgactctttttgtcaacaccacgatatagaaggttaaataaaacccatctgatgagaatttatggtttgtagggcatgactgtccatgccctttaggaatttgggcaagataaaaaaagaaaaatcagagtttagtcctcaattacttcaaggccgagagtgagttctggccttgaagtaatcttgttggagacagaatgaggtgtccggtccctttcaggagctgacccctgaagcttccaagcaaagagatgaccagataagtgagcatggtgtgtgcttaacaggcatccaggtaaactaaatgtgcataaggcctgagagcacaggatgggaacggagtggaggttcacattcccaggctgtatttcaagatggaaggtaacacaagcagcttgtctcagttacatcttcagactagggtggaggaggaggaaaggggaaaggggaaaaagttttaaaacatggtttgaggcttagctgtgtgaaaggaatataaagctcaagaccttaaaatcactaagtcaagggaaaagtcagctggaaaatgcatcaggcaaacctgcctccaattttattcctaaataagatcgctacaaagataaaaagctatgaagctccctcacaatttgcccacaaggaaattccttgtgggcctcaagatctttaccctcaaacagttctgttgaatttcaccctggaatgtaaactgatagctgatcttcacaggtgtgggacaggaggtcatccccctgctcaccggagacacatgcctatctgtttgctttctctgccttattgtttatgtaaaaatgcagatttactaagctagaccaaattgtgtattcagtgaaaggactcaaaagaatgcaatcttttgtctcttatccaccgatgacctggaagctggaagcctccctccacccccacaaccccacccggccttcaaggtgtcctgcctttccagactgaactaatgtacatcttttttttttttttaagacggagtctcgctcttgttgcgcagactggagtgcaatggcacagtctcggctcactgcaacctctgcctcccgggttcaagcgattctcctgcctcagcctccaaagtagttgggattacaggcgcccactgtcaggcctctgagcccaagctaagccaccatgtcccctgtgacctgcacgtacacatccagatggctggttctcgccttaactgatgacattccaccataaaagaagtgaaaatggcctgttcctgccttaactgataacattgtcttgtgaaattccttctcctggctcatcctggctcaaaagctcccctactgagcaccttgtgactcccactctgcccgccagagaacaacccccctttgactataattttcctttatctacccaaatcctataaaacggccccacccttatctcccttcactgactctcttttcagactcagcccacctgcacccaggtgaaataaacagcttgattgctcacacaaagcctgtttggtggtctcttcacatggacacgagtgaaacccaccaccgcgcccagctaattttttgtatttttagtagagacagggtttcactatgttggccaggctggtctcgaactcctgacctcaggccatccacctgcctcagcctcccaaagtactgggattataggcgtgagccaccgcgcccggcttaatgtacatcttatacatatattttttcttctttttccatcttacacatattgattgatgtctcatgtctccctaaaaatgtatgaaagcaagctgtgccccagccacccagggcacatgtcatcaggacctcctgaggctgtgtcatgggcttgtccttaaccttgacaaaataaactttctaaacagattgagtcctgtctcagatattttggattcacagctgctaagctgctcggttacaattgaaggctcatgggttaggggttgttcaaaggtagtttggtgaacagggggctagggcatggggagtgctgattggttaggtgcgagatgaaatctagctgtccttttggtccttttgtgctgcatggcttctgggtggggccacaggagctgttggcaagacatttagctggatccatccgtgtgagacatgcaagaaacctgcaaaggtacaatagtgatgttacctgcaggagtaattggggaagtagcttatcttgtgacctccagaataatggctgacgaatgtttacatctgcatcttagtggaattcatgctcctctatccttctaggctggtagtgtaaccgcccaatgggttcgccttgcccactgcctagacagaaccgatttatcaaggcaacggaattgcaatggagaaagagtaatacacacagagctggctgtgcaggagagcagagttttattatcactcaaatcagtctccccaagcattcggggatccgtgtttttaaggataatttggcgggtatgggctcagaaagtggtgagtgctgattggtcaggtcgaagattaaatcatagggggtcaaaatgagttctggctgacttctgtccctgggtgggatcacacacatggttgagccagattatccgtttgggtggtgtcatctgctgcatctgaatgcagggtctacaaaatatttcaagcactgaccttaagttttgcaacagtgatgttattcccagaagcaatttggggaggttcagactcttgccgccagaggttgcatggcccctaaactgtaatttttaatctcgtagcttaatttgttagtcctacaaaggcagactggtccccaggcaagaagggtttttttgggaaagggctattatcaattttgtttcagtttaatctataaactaaattccttcccaaggctagtctggtctacacccaggaatgaacaaaagcagcttagaggatagcaggaagatggggtgggtgaggagatcttcccctgtcataatttcttcagttatgatttttgcaaaggcggtttcagtggtctcattagctttacaaaggctgtttagttttgaggaagggctgctatcacttaaactataaatgtctcccaaagttacctttgcttatccaggaataattaagggcagttttaaggccaaaggcaagatgggggttggccagatctccttcaaggccaaccttctctcaccgatacaattttttgcaaaggcggtttcagaacgtcagaacgcctgtcttaatgtaactgtggcccatgtaacgatgtttagagggtcttatctgatttctaaaaggttgaaatgcttgtaagggctctgctggacctgcccgtgcgtctttcctataaatgcgtcttttctgtaaatgctgggagggagggagacaaggaatcaacacagccccagggctgccctgggtttattccaagagtttgaatcgcgtaacttggagctgtgtagcgcccatgccatccacgctaggcctgcgctcagagtcaggcctaggcactcggccatgatgcgcgtcggaccgagcccaccccgctcggttcctgggagcagcagttcagccctcactgggccgactcggggaccgccacctgcacccaccctctgctcgctgcgcgcttccggggtcgcgttagaatcgcgtcagagaagggcgccccaggccgcgcatgagcaggagcagagccaacgtgtcagcggcgcccaagcggccccagcgggctcgcgtcgccccgctctcctcaccgagccgccaatcggctcaggatccgcccctgacgacgcgggccccgcccctggagacacgcgccgcgcagtcgtcacccgcccgggatcaggaggccgggggcgcccgccggtcgggcctgggcggccgccatgaagctgacgcggaagatggttctgacccgrgccaaggcctcggagctgcacagcgtgcgcaagctcaactgctggtgaggcggggcctggccgcggccgccccggggtggggggaggagccggggcggggcgagggcggagccggagggaggagccggggcggggagagggcggagccggagggaggagccggggcgggacgagggcggagccggagggaggagccggggcggggagagggcggagccggggcggggagagggcggagccggggcggggagagggcggagccggagggaggagccggggcgggacgagggcggagccggagggaggagccggggcgggacgagggcggagccggagggaggagccggggcgggacgagggcggagccggagggaggagccggggcggggcggggcgggggcggagtggaaggggggaggggcaggggcgagggcggcgaaggagccgcgggtgagggaggggaggaggccgggggtcggggtcgcctgggcccccccccatttcccggcccgcctttgccccgggtgccctgtgggctgggtctgttgtctggggttgccagcagtcactgggaccaagtcgaataggagagagaactgagctttccaggactgagtcaggaaacacgttggtaatcagtactgggggcggccgttcccagggtactcctagcaggtgacaggaagggacgtgggtgcggtgggacccaggcaggctgaaaggcaggtaatgctgagtctcactgagccaaggaagaccaggagcttccagaagagggagcctggagttgaggcctgcaagatctccagggttccctggggactcagcagagtgaccgcgccgtgtcaactggcctcaccgtgcaggcgggtgtgggggtcagcgagagcagacgcttcctcccaggggtgtccgcagactgcccagagtgagctcttccctgttaattaaaaagcttttctctctgccctggcatatctggtgttttggctacaattcccgtgtcatttgctttcaataatgcatttctttgttttgcatggggtggtcagtactcccactaagctgggagaaacaacaaccctgtttcaggcttttaaagtttgcttcataagttgcctgttcaccctttgaacttgrcctcttataaagacgcccttgtttatgtctgtcagtgagagaaatgaaccttctgctactcagggaccatgaggaagagttcatctttttgtgtcttacaaatggagcaaccctgctgctccttatctaaaaagtaccaccccaacgtcaaacatacagtttagttgaaaatcagctaaaacaattgtttacacctttgccagttatctgggcaaccttccttttttgccatgccattaaaatcctagaatcttaaggtttgtagggagtcatyggtgatttttggaatttttgtcttcagtgttttttattcaactttaacaaaattaaagtatgtatcttttctctccccaggggcagccgcctcacagatgtaagtattgcctcacagatgtaagtattgcactgatcatctccaaatagcctcaacccaaatgttgtagcttctttcccaagagaatttttaagttgacaaaactgcacctatcaattcagtcccacacttggtactttgttcacttagcsgttttcattctgcagaaccrctaatggaaaaacaattctctagtgccaggcttattttgcagttcccgtcaacatccctataaatgaaacaccctttgtcacttggtcgcagaggaggggagcaatagtttggaacttgctctcacctggaaaggaatcccaggagggcttgttttactttgttacggggaagttgaaggtctacaccccctcttcttggtcacatctagccttgtacccccttgccgctgccccaaaggcaggcagagaataagccctgctgggagaacttgagtgtgtgcgtctgtgaaagatttttttcttctctccctcattgtctttctcagtccaaaatgtccccaacttacacagggatcgcataccaattgtttctttcttttttttttttttttacacggagtctctctctgttgcccaggctggagtacagtggcacgatcttggctcactgcaacctcygcctcccgggttcaagcaattttcctgcctcagcctttgagtagctgggactacaggcacccaccaccatgcctggctaatttttgtactttttagtagagatggagtttcactgtgtcggccaggctggtctcaaaccccctgagttcaggtgatccacctgcctcagcctcgcaaagtattggaattacaggtatgagccaccatgtccagcgcaattatttatctctttattttcctttgtttttttaatttgaactgtaccttttcttaaagacaaaaaaaagcctggataygtggcatctgggtgtaatctgttttgtgctgtaactgaaatactgcatgtttagcagtgaatatacaaacgtaccatgtccatagacacgagtcacttatacatgggacgcatctgaccaggctgtgagctgctggtgccatgcctggcgtatggtgggctctcacrtatgtgggagctttgcaggttgtgaggctttgtggaccaccccgggcacctcacccctgaattgacagtaccaatgtgatctgagatccagtytcaagcctgtcttccttttggcctagacctgttatcaagaagggatttccatcctttccttgctttctatccctgcrtaggggacattggggtccccttacctgatgtcctttgagggcatctaaagtaatgaatgctctgtctccactgctggcagcatctgacagcaacgatgctgtcgtaaaatttaataaagacagagtgcgtgcaaggaggagcctcacatttctccttcagtctgcggggcgtctgggctgcaaggtggtgtcagaggagaacctggcatactcgtgggcattcatcctgggcacactggctgagcagggccrctcccctcaggccctgggcattcaccctgggcacactggctgagcagggccgctcccctcaggccctgggcattcaccctgggcacactggctgagcagggccgctcccctcaggccctgggcattcaccctgggcacactggctgagtaaggcygtgcccctcaggccccggaagtgggttggccgtggcttcgacagttctctgtggctgatggcagtgcggccrcgatgccctgctgtgccatgcttgctagtcatgttcttttcctcctagatctccatttgccaggagatgcccagcctggaggtgatcacgctcaggtacctcgctcctgctgtcatgctcagcctggggcctggaagccggggcagagcctcacgtccctccagtgggacccagcactgtgacataacctggaaacctccaacacagactgagggcggcttccagaaggggaggggccgggacagcgagagctgggcctaccctgtggcccccatgttcagccctccttcctcagagcctcacctgggcctcctgatggctcctgtcccctgcctgccctgctgtacgcctgcccacccttggcctgtgtgctccrataagccattgctgtgttcactgggccagtcggtggtggagccctcctaaggattcacggtggcccgccctggccgcccccacggtggccacatctgccctgggacccccagagtcctggcctcttctgccccccagtgccaccactgcctaccagtttctctgcaccccatgacctgtgcccgtcttctggggtcactgccctcccagcagactaagggaagcttgaatgaacaaatgttactggactttcaggcagttggggtgtatttgggggctctggggaagagaagagctccctttatccctgaattccctcctgcctactgtgggacccacggagggagcagacgctcatggctcaccactgcccaccagacgctggatgggcgccttctgtgggtttccgcatttaaaagctcacaagggtttaaaccctgtggggaaggcccacccctctggcagctcagaagtctctagggcttgccctctgagagtgggtattgcaggcccctggtccctgactgtgacctaccttcttgatctcacaggcagccacggggtaggccagcccctgcccatcctccgtaatgccctctgaggttggcattgccatgttgatgcccgtgcccagcctgctgcccgccatgggctgaggccagtccatctggtgttcaggcatccccagcgcgggcaccagcctgtcctgcccgagccttgctgaatgaatgaaatgggcttggaggcatgctcatgggtcaaatctcagccctcccatctattggctggctaaccttgggcgaggcatggccctctctgtgcctcagtttcctttctgtaacatggaggtattacaagtgcccaccccacagggagatgaggaggagatggagcccgagtccagaggttgagcaggggtgcgcgtgcccgcccagaggttgagcggggggggggggggggtgcgcgtgcccgcccagaggttgagggggggtgcgcgtgcctgccgcggggctcgtttcactagtcaggcgacacagtgaggctgggatttcaggcctgcctccgaaaggcttacctgacagggaaacgtggagcttgtggttcccacggtggcaggaagcttggggcggggctgtggatccagccctatccctgccgctcactgagtcacccaggggccacagggcctccgagcatcaggccgctcgtgtgtggggccatttctgtcacatctcgggagggacaggaccccaggggtgttgaccgagctcaggtgcgtggtgcctgcacgcctgactgcactggagcggagcaggaagcctcgaggccgcggacgcggtcggtacatcacgctgctgcctgtgcctgaggcagaccccatcctggaaagagtcccacagccggagttttgctcttggtaaaatggggcggcctcatagctaggagctgcatgagacctgggaaaccccgagtgaagggatggcatggggaggggggctcaggacggcaggctgcccatgggggcctggtgaccgcccttctgaggcgcctgccggacgcgagtgcagccctccaggcagggggccctggctccgcgcctttgagggcctgcgggagcggctccgcgtgttcgcttgtggaggggacggaccccacgctgcagggtaaagcctgcaggtccccgctccaggcctgctgtttctcttctctgacgcgtccacgttctgtagaatggaaatgaggcccatccccagtgttgccgccctcaagtgggggtttggaaggtccgtgctcactcccatgtcacgtggagctggctcctagtttttgccatgagtttttctggccgctccctgctttggggcaacatgatatgtcccctgagaggccttaattttcctcacctgtgaaggagggccacatcccccacctcccgcactctagcgccctgaggagctgatgtggagcgtcgggccaaggggctgttgctggtggggtccaccccagtccgcctttgagttcagggcctggccttcctacagctctctcctcggcccaggtcctgctgcacgtgacttgtgacatccgatttaggcttctcaggagagggcagggacacaggtcccatgagtgccttttactgggggtggggattgagaggtggccctgggggccctggccacgtccctcgctgactgtgctggtctccgtgcagtgtcaacagcatctccaccctggagcctgtgagccggtgccagcgcctgagtgagctgtacctgcggaggaaccgcatccccagcctggctgagctcttctacctgaaggggctgccgcgtctgcgggtgctgtggctggccgagaacccgtgctgcggcaccagcccccaccgctaccgcatgaccgtgctgcgcaccctgccgcrcctacagaagctggacaaccagggtaggtggccgcagcggagtcaccggccctcccaaaacaatccctggarggggatgtccccagccctcttttctcttctccttttctgcaaatacctggtctggcgggacatagatgtgtcctgtgaagtctcctccagaggctgttcccctggcttctgtgtctcctcttgatcccgccacccgaatgcagcagcgcagcgtagggtccctcctgggactgacagtttgggtatcccccaacgaccgcaggacctggtagcaaagcaaaagggttccttcttttgcttctgtgagtagcagccctgctctgaccatcgccatgcgccatggcgagcgggggcgtcagtatctggcaagcagcatcgcactggtccacagggactgggcaggctccacgggccactgtgaacctagggtggcggtgccatcgcgcccctgccgtggggaggggccgtcccagcaccgcagtgcctgctgctgcgctccacctattggaggcrctcgtgcctcctctagccagcgccagcaccgacacagttttccaggctgtggtttcatgctgtttgttcatccttggcattctcagcacactagtgtctcatccttgtcaggtatacrgacaccactattttctcccagacaattttattgatattaataatataaacttcagggaaattgatatatgagagaaatggaataaattcaatatggtctgttcctttttctattgtgtcktagttgaggttttgaggagtatttgcttctggccaaggctggtgttgagattcctgagcagccctccaccatctgttgtgtgtcagcctgtgccakgctggggatgggacagtgaggaaccggctgctactctgggagttgtccctggaggtggatacacgtgcatgcatttcacaagcagactgtgcctgaagccacagtgaggacgggagctgcagtgcatgtggcctgcacgtgggtgaggccactcatgctgtcttctgtctttcatcccaaagctgtgacggaggaggagctgtcccgtgcactgagtgagggagaggagatcactgcggccccagagagagagggcayaggccacrgcggccccaagctatgctgcacactgagctccctcagctccgctgctgagactggccgggacccgctggacagcgaggaggaggcaacgtgaggctggagggcagcggggactccgcagcccatccctgtcccccagggtcctcccacggggagtgaatggggcttcccgtgagctgcgtctctgggaagtgagggacagggattatccggggggagtgtctgttctcatccatattctctgggagtgactcagtgcccaggtagtgatttcagtggcaggtccatgttttgcccaacagcggatgtgccagggagcaggagagggggtgagccaggccccgtgccctggcacagagaaggctcacagcaccagagctcgtgaggtgcagggagcccctggtggggggggtggcctagggccacagtgactggaatggtttgtgggcacggccatcagtgcccgtatggccttgggcctgggggccgtggaggggccacagggctgactctgcagtgagacgccggcgcctcccagggcagttggcagcgggtcacgaacgcatttgacagaagctgggcacttctctcctgcttggcagatcacacccgctgctggtgcctgtggtgggggcatcgggatgtgatctctgttaggcatctgccatccggcacagggcctgaccccatggtcaggagctctcccccggcatttgtgtgttcgggtgccccccaccctgcccctgaagccctgggtggaaggtgttacagctggggagccccagggtgccgggagggcgccccacaggtgaagtaagtgccgggctctccaggagctgccatctgtagcccctgacctcccaggagttgcctcccttctcttgcccccgtgtgccaggtgggatttgtatgagcccctcctttgcttggatgcgacccgcagacagggtttgcagaggyccccccggtgccacgagccccctgaccctcacacgcctttgtctccctctcagcagcggcgcccaggatgaacgtggcctgaagccgccttcccggggccagtttccttccctctcagccagggatgcctcgagcagccacargggcagggtgagtggcgggccgctaggggccgcggctgcctctgcccactgcacccactgcacagaaaccgtggggagggagcatggagcctcacagggccccgtggggagggagcatggagcctcacagggccttgaagagctgtgccccagggggagctgcgtgtgcgggtctgtgaatgcgcacacacgtgtaacacgtgccccgcacggagccgtcctggcccctcagcctctcctgctgtcctggtctgtggaatgtgggcccgggccctgctgggctgagggcaacaggagtcacgtggaagaggtgccacacacgcgtccacaggyggggctcctctgctcagattctccgagtgtgcckgtcagtcacttggacggcccacacccccgggaccagtcgctccgtggtggggcaccgctggccaggccccagcccttgtggagggaagcagcctcgcygtgccgggtgggcttagtccgcacccctctgccctcagaacgtcctgactgccatcctgctgctgctgcgggagctggaygcagaggggctggaggccgtgcrgcagactgtgggcagccggctgcaggccctgcgtggggaagaggtgcaggagcacgccgagtgaccgcaggacctgaacgccgctccagcctcyayrgggaccccagcgtcttccccagcccccgggagctggagggtggctgccatggccgcagccccggccccacacaaaagcctccccggtttgccacatcggccgagggcaggagtgggtgttaggtactggctaaccggggcggtggagatgcctgtctacaccagtcctgtccccaggactccccttytgtggtctggaggttytaggctggcctgggctcttaaagggaggattttgcaggctgtcctccctaataaaagattttcccaaggttgatctggaggtgacgtttcccaaggcatggttgtgacagtcttcctgaaagcaagggccgtttctccacagaatgaggaggtcttcacggatggctttgccgattccagcccttggtccttggatagatttctgttgggcaagggagacttcgagaatgctggcacccatagcgacatctgccctgagctgctcagcaggcaggcagcagcctcccgcacccatgggagagagttttgttttcttggccgggctgggcaggtgcgccttcctttctctctcctgtgaagaactgcaggagggccctcagctgtgaggttgtggatgaacaggcctgttcgccctggggtccgggcctggcacaggaagcagctagactaggggagtccttggagcatctgagaggggttttctttcctctgggaagagtcgcaagtcttatgaggatgccacaatctgggcagtgacccgtggccctggggaccttcctagtgccccccaaaaccaaggaagcattcacgtgagatggggagtcagccttccagctggtgtgtaggaaagccaggtccctgggcccttgtcccatgtggggttgagatccagatctccatgagatattcccatcctccgccgagcggtgatgcgtgaccgtgtgtgcaggccgctgttctcccaagctcggggccatgccgtgccaccgtcaccagagccagctgcagcactggggcagccactgtcgccggacttggggaagcccagggtgaagacagtcactcatccgtgcaagctctccagaagggatgcaagctctccagaaggggtgtgatctctgagcagtggggagtggagtcaccactcgggacatagagggtggrcagttcaggcctgtgtctgcctccttgggactgtggagtgggtgccctcagtaaagcgctttgttsgaatggttgaggtcgttttaaattgagtcccttccacttcccccgacatgggctgccgtggacatgcggggcttacaccagcgccctcctgccccacatcatgcacaccttgggtgggacctgtgggggcagctgcctgccttcagccccacggttccccctaccccgtccccaccattgccgcctcctgcctgttcccctcccggcacctcctcacccaatgcacccagccatggaggacagccagaagcacgtccagcccggggcaccccacagtcccactccactcctccccaagtcaccccaaaaatgggttctcaagccgagcagcactggcatcacactctgtcccattcacccagttcacaggagaggaccaagggcccaggaggtcgcgtcactctgcccgaaatgccagaaacgccaactccacgcagccagaagtgggcctgacgcaggcgctcgccacaccacgtcgcccaggagggaggcagccactgtcccgggcatcagccacaggcgaccacctgggtgcagcagctgagtggcagctgaacaggttctaacacctcatcaggcagggcaggccgagggggtctactcagaactgagtcctgatcccagacggtgtgacacaacggaggcccccagagcatgcctgtgtggttccctgggcctatgaacctgtttctctcttcctttgagacagagctgcagaccccggagcactgtccttggacaactgtccactcctgggcctggccccaggatggcccagctcagaatgaactagaaggccactaggtgtgggcccctccaccccagctcgagttaagcaatctggaggcctccggcactagggccaacacagtgaggggctcttgggaatatcaaggtgcccgagggcaagagggtccccagccccttcaccaggtccctaggccaccccactggcctgagctcaaccaggagactgcccaggggccctcaaagtggcccttaggcccctccaagccagggtctcccttgagacacctcctgtgtcccaaaaccacatccccagggtggcactgcgggcaggaagcagccctcttgggcaagcacctcccacgttcatgatgcagagcgcaggcttcgacgctgaggttaacaggcatcctgcaagcagggcgtccaccaccccgtagccgcctgcaggactcagccctagcccctggtgggcgcagctctgcgctgccttcttttcccctcttgcgtgtccaccatcaatgtctcctggatactggctcaagccagccaccagcctgcaggttggagacccccactcaggctgaggttggggagacagaggagtgaggctgtacccttctgcccccaggggaggaccaggaggggctcaggtcaccctggtggcccccagggagtcctggagagcacctgtggcctctcagggcacatgtccctttgacctggcccaggcactggccagagggccctccacccctggggctgctgcccactgggctggccgctcggtgctgctcccccctctctctgaggagttctgcaggctgtgctctccggagaccgatgcaccccacagtcagggtgattttatttctagaaaaggtgacaggtgctgcacgtgggcaggagcaggtcacagtgaggcagggccaggggcatccccctctcaacacaacctaggcgccagcagcctaccggccaggtagagcaagggctggcccatgtagtgagcccagcatggggagacgctgagggcccatggggcgccaaagccagggggcagcagcctccaaacaccgacagcgccacgtcccctgggcaggaaggtggatgccccagggcactctgtcctcctgctggagggcctggcaggctggtctcaagacaccagccggagggaggcctggcaggtggccagggatagaggcaggggatgggctgagcagggacgcagcccccacctgcctgcaggctccagacacaacagcccaggccccatctgagccctggcgctgcgctggcatgggtgggggctggggaggggcgtgggcatggctggcctcagaagcccttgtccatgctcagggtgcggcgggtcacgtgctccagctcccctgacacgtaggcggccatactgatgcggtattgtgccagcatcttcagcatgagccgcaggctcagccaccactgctcccgtggcatgcggtgcctgtgcaggacggggatgggaggatgatggggagtcaggggtcagggcagctcttcagccacgtccccagcccccccaccccccccgaccctgcagcctgtgcatgcccctctgtctgaacatctcggtatccgtggagctgggacaggtctggggtccccatccctcggaggcacagcacagagtcagcctcagccgccctcaagcgtgcccactcctggctacccgctgtgcccccatgcccacccgaaaggattgcccagtgttgtgctcagaagacttgggcatggtccctgctctccacggcctggcggggacctgggcatgggggcccaggaggccttgcggggtcagggtgccagtggggctgggcctggcacacctgcctcagggaaggtctgggccacccctcagccccacccgcctccacgaggctttggtggaactcactcgaaatcagtgtctttcttgagctcagtgacggggctgaaggccaccgccttcttcttcaggccgatcacgcaggccgagtctggggcattggcgaacacccgtcctgcaaacagaggcacgtggcagccctccatggtgaggccctgccccagggagccaggggagggcaaagtgaggcctcgggtcgcacccaccacctacccttgcggtaaacctcgcgcagcttctccgacaaccacagcatggccttcacccccagcttggtcccatagttccggtcaaagggggttggagcgccaccctggaaacaggtgaggcccggttccctggactcccctgggctgcctgggccaaggccaacgccagtgcagacaggatccccacggggagcctcccaggcagcttgtgaacacccattccttccaacccgtgcaccgttcccgtctgttcccgatcgaggaccctgcctgctctctccagctccaagtccaggccagaagctgcctcccgaggccggcagtcggctgcccctggccaagtcaagtgactcctgggccctgcatcggcagccagcggccccacctcgggccccatcacctcgggccccatgcccagccaccctgactcccctccctggctcagaaaaccccaggacgcgggcttcctgcagggccaccataaggcagggagcatgcggggatctaggtgaggggttcggcggaagtggccgcgggaggcctggcaggggtggggagctcggctcagcatgtgaatgccctggctcgggccccggctccagccccagccccaccccttcttgaaatgagacctcacctagatacaggcctcggtcccctcactggggaagggcacacgtgcccgagggcctgccgggagtgcccgtgggtgcccgtgagggctgggacccctggggccggggacagatggtggcaggaaagaggggcaggcctctcagagcctcacccctgccccacacctgctgcaggtggcccaggacattggtcctgcagtcgaagacgcccttgccctctgatgagtacaggttgtacaggaactccgtggtgtagtagtcatggcacttctcgttcctgagaggggcagcagggcctgagtcggcgggaacgagttcaggtctccccccgatcctgagtccccgctgggccaggcctgggagagggagtggcagctcccaggaaagccgccctggcccaccctctccaaggacccctcctgccttctcctgcccagccgctcctcagcagccccaccccagccccgagagttggacgcgcagctgtggccagggacccacggcagcctcaccgcagcaccaggcccctctgaatgtctgtcttcatcttctccgtcatgtgctccacgttgacctgcgggaggggcggacacggatgagccggaggactgtggggagggaattccaggctgaccggcgatccggggccagcaggagcactgggctacgcgtcccacctgcccgggccctgccctgcgctggccggcctgagtgtctggggcccaggctggcatgccggcaggtctgccgcagcaggggctgggctgggctcacctttaagtcgtggatgttgaaagggtcctcgaagacgtaggcggcgtcggcccccacagcaatgccagtcacggtggccaggtagccacagtaaccccccatggtctccacgatgaacacacggcgcttggtccccgaggcagactgtttgatgcggtcacagctctgggggacaagggggggtcgggggtcctccacgtgcccacccttccctgtaggccgtcggcatggctaccctgcagggagccctgtgtctccaaagccagcctggggctgacgcacccagacagccagcagcaccaggcttgggcccacctcccacctgggccccacaggaccaggggttctcaaccaggcgaccccaccccccagggcacagtggacagcagcctgcacacacactggctgtgagtgggcaggggtgtccctggcacccttggacagaggccaggcgctgctcttagactacccagcactggggcgcagggacattcccgcctcagtctccccatctgagctcatcacagtagcgaggaacaacgcagggcccccctggacctggaagtggctatggcagggagctgagccccttcacccgggcctgtgccccacaaaccccaaccctggcagccctcccaggtgctcaccacacactatcccctccagcagcctccgtaggctcagccccaccccacaagggcctgggcatggcaggccggtgtccaggagccccgtacctccatggcggcatttacagcagtgtcggagcccaggctgaagtcggtgccagggacgttgttgctgatggtggctgggatgacacacatgacgatgcagagctcctcgtagcgcccgcgagcctccaccagctgcagcaccccttcataggcctgcagcagtagggacggggcaggtcaagggcagcaccgaggccagggtgggccggggacaggctctgccggcggccgcccagccctgctccctgctgacctgtcatgtgccccgtgctggacgccaggacccacctgctcaatcccctggggctgggccaggcagtcagcctggtgtcatctcaggatgcctaccagggaaactggactctaaggagggtcaggagtctcctccaacccactctgaccccagatccactccatggagggcaagggggaagggctgtcatttattcattatttagtgacagcttgcccagtgccaggacaccacgttcagcgatgccgtccagcacctacacctctgcctcctccgcctcccttctttctcgtcctccagcttccgagtccccttcctcccctgcccctccccagcactggggttaatcggaaccttgtgaagctttccggagaaagtaaagaaccctcccgagcccacacacagcacttaaaaccccaaccctctcggcccctgcatcagcccagctggcacacgggtgccctcccgagcccacacacagcacttaaaaccccgaccctctcggcccctgcatcggcccagccagcacacgggttttcaggatgggccccctcggcgggaggacaccttgggtctcctgtgccctggggctttttcgtccgtgggcagctctcacctcaaacccaccgaccaccagcagggcgtgaataccatagatgcggatgttctccacaatggactccagctggcccttgggcagggtcctgcagtcaaagacacatc

SEQ ID NO: 98154 - DNA, 34344 bp, Homo sapiens
aaatgtggttagaaatcttagagctagtagctttccttgtaatactaactgttttcctgttgttctgtcgctgtgcccaatctcctcccccaggtaaagacctcttctatccttgctgaatataaatatgctgtacattgttttgctgttgttaccccccctaactatgctagaagaagcacctatagaaggatgtccccactgtacacatactacctggtcagggaacagtataactaaaactctattgtgccatacttattatgagtgtacaaggactcgcttaggaacttgtatttataatcagacctcctactcaatttgtgacccaggaaataaccaaccttatgtatgttatgacaccaagttttcacctggtaaatggtttgaaatccatgcagggtcaaaggactgttccctcttaaaccaaaccaaggtccctcccttttacctagggcctatttctctatattttgatgcttgtcaggtagcatacctagactcacccgtctgtcgtaacctacctttaaaaagagactataaaaatgactacaaatatgtatgcaagtcacctcgtccccctgggaccccagaaaaagattgtcagtattgcatatcgtggcaccctagcacacaacaaaggccaattatgcttaccaaaatgatggtaaaaccagattgtaaaacaaaaacctgtgatcctataaatttcaccattctaaggccaaacctacccatgtggactgcaggttaccccacacatgtctacatacacacatacccagcaacctacctatatgttatcaaaaaggaaacccggacccatctggcccagcaacaattctgagtctttaaatcattctataagcatgtagactaaaagttaccagagcctcctcctttaaccaaaaacctgtttgctcagctggctgaaaacattgctggcagcctaggcatttcctcatgttatgtttgtggaggaactaacatgggagaccaatggccttaggaagcaaaaaagttaatgccacaaaattattttactctgaccctgaactgacacccataagttcaagcatctggctcctaaaaacttctattacagaaagatactctgttgctcactggggaaaggcttttacagacccagtaggagaactaacctgcttaggacagcaatattataatgaaacactacggaaaactttgtggcagggcaaagataactccaaatcacctcatccaaatccattctcccatttctcttctctaaaccatacctagtatcggcataaagctccaaatacctggcaagcaccctctggtctccgctggatctgtgggccatgggcctaccaacagttgccagccaaatggacaggggcttgtgtacttggaacaattaggccatctttcttcttactcccactgcaacaaggaaaaactttagggtgtcctgtctataataaaattttaaacaaaacacaaaagaaatagagacataaaaaaagacacaaaaatagaaaattaaaaagacacagattggctccctgaaagaataattcagtactatgggccagctaggcacaagatgggtcgttgggataccgtaccccaatttacatgcttaaccacatcacaaggttgcaggcagtacttaaaatcatcactaatgaaacagcaaacgcattggatttactgcccagcaagccacaaaaataaaaaatgccatctaccaaaagagtttagctttaaactacctcctagcccaggaaggagaagtatgaaaaaagtttaatctaactaattactgcctaaaaattaataacaacgggaaagctatgatgaaaataactgcaaaaacaaaaaaattagcccatgttccagtccaaacttggaaggggtggacttctaattccttctttgaaggctggttttctgtcttcggtggattcaaaaccttaataggagtagttctagccatactaggaatttgtttaatactcccttgcctcttacccctccttattaaaagcatccaatcaactataaaagccattgtaactaggcaaactaccactcagctaatggctctgtgaatatcagcctgtgcctaaaaaagaagatctgctctttcataaaaaatcaaataatagggatgctttctattaaaatcttgtttataaaaaaagcatcaaaggggaaactgaggcagaaatttaaggaaaaataaatactgcatttattcactccaagaaaagtaagggttaagtaagaaacacaagttttcctctactgcaagcaaggctgtagacaggttgtagtgacctagcctgcaaaaatgagctccagacacccctgagcaaggttaaaagaaaaaaaacaaattcctttactgtctctcctgtactgaactattagttatgactatgtttgccaatgcttatatttagtaaaatttataaattcctgtttttctttcaacgtagctggaaggtcactagctatacaaggccacaagttatgccaagtcaacagttatgccataaattacatgacttgtaatttatgtaattaccgcctttgttttgctcttgtatactagcctatataagctaaactctgtctttgtttggggctcaggtttttaaatgtgaatccactgagccagtgcgtaccttaaaataaatatcctcctatattcacccatacttgtctctctagtcctctgcgtcccccaacaatataaatgacaatatttgctaccatttattgcatcatggtgctaagcacatcacagacagctggcttactccttaccacagccttcagtgattacagatggggaacacaggctcagagaggttaagtaactaggaattgaggccagacctatttagctccataatttgccattcttaactactgttagatatgctaattcccagaatcataaatgcacatctggaggacttttttttttttgagatggagtttcactcttgttacccaggctggagtgcaatggcgtgatctcagctcactgtaacttctgcctcctgggttcaagcaattctcctgcctcagcctcctgagtagctgggattacaggaatacatcaccacgcccggctaattttgtatttttagtagagacagggtttctccatgttggtcaggctggtcccgaactcctgacctcaggtgatccgcccgcctcagcctcccaaagtgctgggattacacatgagccactgggccaagcctaagccaccacgcccagcccctgagccacctcgcccagcccctgagccacctcgcccagcctgagccgctgagcccagcctagagcttttagttgaatttggatagctttcattaaattcccccccagcattttgcttaaggagaaacaaaggtccagaaagacgtacctggaatcatattgttttgttgttgttgttgttgttgtttttgtgctttgaagagagcggtactagaatcatattgttacctcctaattagggggctagaacctagggcccctggtttcaaattaagtcctcaattagccctttgatgaatcagagacacacaagaatattctatacatctttttttttttcctcctagattgagtgggtaaataaatcaggaggaagttagggaagggggcaattaatggctggtgctattgcaagctagtggtggtaggtttgacttctggggagtggattgttagttatcaaggcaagaggagccactggtcaccctcccccgcattcctgtctgtagcctaggtcccacagtttgggaacctccttaagggatggctgtcacacttccagcagtgggaaccgggtgcataggcctgttcttgcttctctttccttagcgccccttccacttatgatgcccacagacccacccttgggcagatttctgtggaagcctctcacttggggataaagcctgtctatatgtagaggtgactgtggtccctcaaggcaggcagctgcaaaaatctcaaaggacagagaagatggttgtagaagcagtaccatgggacccttcaatggctctgtgggctgatttccaagctccacccctctccccttggtcacagggccacctgacttccctttggttcttcgaggttatacaacatccccacctgccaaacctcataccaaactccttcctatgtttagggctttatttggccccctcctctaaggctttctctggccttcccttcctctccagggtagttgcatgctatgtgtgcctctggtaatcttttttttttcatggcttttttttttttttttttttgacagagtctccctctgtcgcccaggctggagtgcagtggtgccatcctggctcactgcaacctctgcctcctgggttcaagccattctcctgcctcagcctcctgaataatctgggactacaggcatgcaccatcacacccagctaatttttgtatttttagtagagatgggattttaccacattggccaggctggtctcgaatgcctgacctcaagtgatccccccgcctcggcctcccaaagtgctgggattacaggtgtgagccaccgtgcccggtcatttcttgcatggctttgccacactttgaaactgcacattttgatttcttatcatgggtgtttttttaaaaaaaattgaaattgcacatttatatgttcccatgttgggtccccctcattacgtattcagccagtaagggcaggatatttgtgtccgctttcccagggtccagcacatgacctagcttgatcagtacatattattgagcctcgacaaatatgagattgggctcaagaaatatttattgggctcagtgagtattattgaatgaatgaatatggcctttccggagcctttccccaaggtccaacacaattgccgaattaatgcagccgaggacacagcatccagttcctactcctgcagcccagttacccccatccaacaccacccccctacccaacccccgctgaaaagcggacctgtgttcagaacctgccttcatacttttcagccatgctctttggaataatgaaagatacgaagaagtcagtgggaagatagacatggggagggggacatagagggtgcctttgcgttttgctacccaggacccaggactcaagggcagggtggtcttggcctggggtcgccgtcctctttaaggggcgggtcaagggaccctggctgcccgggcctctgccaccgaccctctgctccctccgaccctcaccgcccagcacccagccctctgcccccaccggccaccctgtaacagcccagcgggttcaccttgcctgctgcctagacagagccgatttatcaagacaggggcattgcaatagagaaggagtaattcacacagatcaggctgcgcgggacactgggcagagtttttaaggacaacttggtgggtgggggaaggccagtgagtcgagagtgctgattggttgggtcggaggtgaaatcttagggaactgaagctgtcctcttgtgctgagttagttccggagtgggggcctaagatcagatgacctggtttatcgatctggtaggtgtcagttgatccatcaagtgcagggtctgcaaaatatcttgagcactgatcttattagcagtttagggagggtcagaatactgtagccttgctgcctgactcctaaaccatactttctaatcttttggttaatttgttagtcctacaaagacagtctattccccaggcaagaaggaggtttgttttcagaaagggctgttatcatctttgttttaaactataaagtataaactaagttcctcccaaagttagttcagccaacgcccaggaatgaacaaggacagcttggaggttagaagcaagatggagttggttaggtcagatctctttcattatctgttataattttgcaatggcggtttcaacctagtggccgaacccgtcccatccatctcccgcgcccctccgctccaccacagccctcggtgcctcggttccctgcacctgcactcccgcccgcccccgacgctccgcccccgacgctccgcccgccctccacgctccgccccgccctcccggcccccgcctgcgcccgcgccctgggctggtgcccgccaccccagcgatctcatactggcccctgggcgcacggtgaccctgcggctgcccggcccctgcctccgcccgcgcggccccctcgctcaggtcgcgggcgcccggggcctggcttcgcgtgggtcctggctcctcccgttccgcagttggtgccgtctgacagccccttccgcgcggcgcggcgcggcgcggcgggtgtcgggcggggcgcgggcctccggcctgaggcccggcgaggtgctggagggagcggggcgcggatccggcccagatgggcagctccgtccgcggggtcagggccgggcttcggcttcaccgcagcctcgcctgagcgggcgcctctgaagtggagggcgggccgcctgggccgcgggcctcgggaggatggtggcgccctggcgcgtctccgtcagggtttgcctgtcgcacctgaggtgcttcgagctcagacagggactcagcctcctgaggccctccgagtgccctcgcgatgccaggctctgctggcttctgctgggcactttgcccaaggtcgtctccctgtgcggggacgtgggtgagggggcccctgacgttctgrgtcggcgaagggtccgctgcagcggggcggctggcgcggggcccgcggagagcctcccccgagcgggacctctgggcggcgtcttcctgcatctccgcctctggcttcgcgccggcgctctgttggtgaaattcttccccctcctactcctctaccccctcacctacctggctcccagcgtctccaccctctggctccacctgcttctgaaagycaccgagacctcaggcccaacctacatcaaactgggccagtgggccagcacccggcgcgatctgttttcggaggctttctgtgcccaattttccaagctgcatgtccgagtgacgccccacccgtggactcacactgagcgcttccttcggcaggcttttggggatgactgggggagcatcctctcttttgagaaccgggaacctgtgggctcaggctgcgtggcccaggtgtacaaagcatacgccaacactgccttcctggagactgacagcgtccagagacttggcagggcctcctgtctgccgcccttctcacatactggggcagtcggtgggctgagagagctctttggataccttggaaatggccggaaacctccagaaaatctcgcagaccagtcgtttctagaaaggctgctcctccctaaagctgacctggttggatcaaatgcaggggtgtctcgggctcaggtccctggccaccaacctgaggccaccaacctcatcyccgtggcagtgaaagtaagtgttgtgagagctcacagctcacctacccactgagctatcccagatcagaaacaaccgccatgcaaatcgcccccacgtttatttctatttgcctgaccaatatctgagtgcttatttcatgcaagctgtttcatttattggcttgaagtggcggtgtgaatagtctgatagaggaaaatgaactgagtctggagtgaactaactgcttgggtgtcgggaccacatcctcttttctktgataagaagccacctggctcttgcttggatggtgggacccagccctggctgggtaaaatgtgtccagcaggtttctcctgtctcacggttcctctttctgacaggtgttgcaccctggcctgctcgctcaggtgcatatggacctgctgctgatgaagattggcagccgagtcctgggagttttgccaggcatcaagtggcttagcttgcctgagattgtggaggaatttgagaagctgatggtccaacaggtgagttctcctcccctcagctgtaaatagcacctaacatagttcttgccattagctgctacttagtaaatgttgaatgaataattttctggtatgtcataactcatgtgatgtgttagagctggtaacactagctgataaagaacatccaaatctcagtggcttaatgcaacaaattaattttttgcttatatcaaagttctggccgggcgtggtggctcatgtgtgtaatcctaggactttgggaggctcaggcaggtggatcacttgaggccaggagttcgagatcagcctggccaacatggtgtaaccctgtctctactgaaaatacaaaaattagctgggcgtggtgctgcatgcctgtaatcccagctactcaggaagctgaggcatgagaattgcttgaacccaagatggaggttgcagtgagatgacatcatgccactgcactccagcctggcgacagagtgagactccatctcaaaagaaaaataaaaacaaaaaacaaagttctatgcaggtgaactgaggcagagaaagggagctctttattttattattttaaaaacagagacagggtcttgccattgttgtccaggctgattttgaactcctgggctcaagccattctccctcctcggccttccaaagtgctgagatgacagaactaagccaccgtacggtcaagagagggagctctactccctagtttcaggggactcaatttcttcccaagtttggcactgcctccttcaacatgtgtcatctggggtcagtgtggattggaggcagaggccatgcagggtcatgtaataaattttgtggccaggcctggaagtggcaaacatcacttctttcctgttcactgatcagagctgtaactgcctgggcccagtgtaactgtgagcttgggaaatacagtcttcctttgtgacaaggaaatgattctggtggagaacatctagcattatttctgccataatcaatgactccagagtgagaaaataattagcaaagtcacatactgtgcctttgttctgctttgattccagggcaattgagtcaacaaggacctccttcatgctcagggcccttgggacctttgtataaggatacagacttagcaaacacactggggtggtcggggctccacttaggtacctgttggctccttgttgggtagtgcaggaattgggaggttttcrgaagcaacctgccgagtatttgtttggaggctctgatttaagattttaagtcctagggattcattccaatgtttagaaagtctcttagtctgttcggacagaatcccataaactaagtagcttacatacaacagaaatgtatttctcgaggttctggaggctgaaaattccagatcaaggcatcggcagattcgatgtctggtgaggccccactttctggttcataattggcaccttctgtgtcatcacatggtagaaggggtaaggggtctgtcttgggtctcttgtgtaaaggcgctgattcattcatgcaggctctgctctcatgacctaatcacctcctaaaggccccatctcctaataccatcaccttagggcttagcatttcaacaaaggaattttggggggacacaaacattcatagctacagagcaatgtaatttgataataaaagcaaattaaaacagagaaaatagcatcgattccaacaaccatctctgcattaattcctctcagtcctgccactcatmtgagtttcagttccccttgcggaagtctgacagacatcatgtggttccatcacttcaaactcacatctctgaatcacaccccatttgtcttaaaaatcagctcttcctactaagcctgtgtccgtctctcagtagtcccatcatgttcctaggctggaagccttagagttgtgggtctgggtatagtgtgtgagtgtctctccattcatttataagtttatgtaacagtgactaaaaactctgttagggctgggtgcggtggctcatgcctgtaatccmaggactttgggaggctgaagtgggtggattgcttgaggttaggagtttgagatcagtttgggcaacatggtgaaacctcatctctaccaaaaatacaaaaaattacctaggcgtggtggtgctcacctgtagtcccagctactcaggaggctgaggtgggagaatcgcttgaatctgggaggcagagtttacagtgaaccatgatcacaccaccgcactccagcctgggtgacagagtgagatcccatctcaaacaaacaaacaaacaaacaaacaaacaaacaaaaaactctgttagacgctagtaagcaaagaaaacaagtgagctttcctatccctaagaaagacagtcagggccaggtgccgtggctcacacctgtagtcctagcactttgggaggcggcgtcaggtggatcacttgaggtcaggagttcaagaccagcctggccaacatggcraaacactgtctctactaaaaatacaaaaattagccgggcatggtggcacacgcttgtaatcccagctactcgagaggctgaggcaggagaatcgcttgaacccaggaggcggaggttgcaatgagccaagatcatgcttttgcactccaggctgggcaacagagcaagactccatctaaaaaaaaaaaaaaagaaagacagtcagccctctgtccatgagtcctgtatccccggattcaataaaaaatgtagttaggtctgtgatagttgcatctgtattgaacatgtacagacttttttttcttgcattattcccttaacaatgcagtttaacaatgatttacagagcgtttagattgtattaggtattataactaatctagagctgatttaaagtatatgggaggatatgcataggttatatgcaaatactgtgcaattttatgtcagggactgagccatctggtatctgagggaggccctggaagcaatgaacctgagcctggctgaacctcagcatggttcatcagggctcagaggaggacttggttggtgtccttagcttgagctgagtattgaaaggtgactggtgtttgcagttggaccaagtgggggaataacattccaattcgaggcagtaaagaagccagaggagagccgggggtgttagccactctgggatgtcgagcactatatggagttgggtgaggccaggtcttgggtggtaaaaggcaggggaaggtgccatgagagatggacctggacagagaagtaggggccaaatcatgacccacctggatgccattctaaggagtgcagacttcaccatgcaggtaatggattggagaggaaggatgggtcaaggagcacactcgaggcacctctgtttgtgctcaggtgactggacctgagggcatgcgccttgggagtggcaytgggggacagggactgatctgagggcggtgaggctgcaaacttgatggcattgggccattgctgtgcacggaggggaagagagaaggcatgatctggggactcaaaggtgactgagtgcgtggggatggtgaagggaaattccatttaggcacagagcttcagggtctctgggctcccaccgggccacatccaggtgtcattggatatatcactctggagactggcattgaggtctgacctggggatcaaggtgctgtcagaggaggcgccggctgagggcttggtggctgtcaaggggacacacacgctcacttcggtcaggagaaaggacatcagctcctgggggcacaggagacccagccaagacaggacagcgagaggcagcaggggtgccaggagagtgaagggcaggtgccgggggaagagccatcacggagagacaggtcagcagcggcaccagccctggatgcccacagaggttgatgataaacctggaagtggtcctttgggtctggtgagtggtggttggggagagtagcagtggcagtgtcgatgyggtgggtggagagctgccgcgagatgraggggtagccctgtgtggaagcgcccacagcacgctggccctaatggaaagagagggctgggggctggcctggagaagccagaccccagggagacggggaagggactcatgggctggtgtgaggcaggcgggtggcaagggcgagagtagcagagaagcagtgcagcccaaagcccaccagggcacctgccgtctgcagcctccaggagttcacacagagatctgggattgctggggcaggctgtagcccacggatgtcgcctcctgagtttctgggcaagttctgcggggcaagctggtggggaaggtggggtggatctcatgacttgctagctccttggcattgcagatgtcactgtgcctgtacccagactagccctcatcctttctgtccatttctctgtagattgacctgcgttacgaagctcagaatctagaacacttccaggtcaacttccggaatgtgaaagccgtcaagttccccacccctctgcgcccctttgtcaccagagaagtcttggtggaaacgtatgaagtaagagtgatggctttgcctggccatacctttcacttgccactcgcagtgggcccgtctccagcccacagaaaggcttcagtctggagagaggatgggatttgtgtctgtaaaactgtgaggagctgggatgtgttggcctcggcgggaggcagtgttggagtgaggtagctgagarcactgggtgtggcccgatcccctagatttgaaaatctgctctgccattttattagttggtgacctgccttagaggattgtctcaggagtaaatgacacactgaatgcaaaacaaggagttgggcacagagaaagtgctgaacaaccttgtgtcatctcacttgccctagctatcctctactctagttcagccttctctctcttttttttttttttttttttttttttttgagatagagtctcactctgttgcccaggctggagtgcagtggcatgatctcagctcactgccacctccgccttccaggttcaagtgattctcgtgcctcagcctcccaagtagctgcgattacaggtgtgtgccaccacacctggctaatttttgtattttttagtagagatggagttttgccgtgttggccaggctggtctgraactcctgacctcaagtgatctgcctgccttggcctcccaaagtgctgggattacaggcatgagccactgcacccagcccagcctcctctttacagatggtgatatgagattcagggaatctcatgaatgtgacatgaaccacacagtgtttctagctgtgtgaacttgagcaagttgcttaacctctctgggctttggttcttttatttgttaattagggataacaagatctatctccatgggttgttttgacaatttttttttttttgagacaaggtcttgctctgttgcccaggctgtggtacagtggcatgatctcggctcactgcagcctccacctcctgggctcaagtgatcattccacctcagcctcccaagtagctgggaccataggcacgagccaccatccccatgtccgactaatttttgtatttttctgtagagcctgggtttctccctgttgcccaggctggtctcaaactcccaagttcaagtgatcctcctgctttggtttccaaaagtgctaggattatacgtgttagccaccacacctgggtaatttttttttttttttgtagagatgggggtctccttacgttgcccagacccctattggctgattcttgcccagaaaccagctctctggtgcccacccctatcttttcaggacatcacatctcttatcttcagtagcagagttgataggtttccttttcaataaacctatgtgacttgtcakccttctgatagctgttatagaagggaatgtaaataagttcaaatcaatgtgtggatgacagatttttgttttgttttgtttgagacagagtctctgtcactcaggctagagtgcagtggcgcaatctcagctcactgaagccttgactttccgagttgaggtggttctccctcatgttgtccaggctggtcttgaacccctgggctcaagcaatcctcccaaggtgctaggattacaggtgtgagccactgcacatggctgaatgacagatgggttctaggaaaggaaatactctttgggttacttcccaataagtgagaagacagcgctgtggtgccacgtgggaggaggagccagcatcacaggctggctgggattaagctgttctctccctggtctttctgaaggagagtgtgcctgtgtccagttaccagcaggcaggaattcccdtggacttgaaaaggaagattgcacggctggggatcaacatgctcctgaagatggtgagctcatggctggagcgggctcaggcccagcatgtggtcagcttgcagatggggagtgggctgggactctggctatctgggtgggaaggagagcgaagcagcaagccgccaggttgagaaagtctggtctagaaagagtggaggctaccataaatggccatggtgtctgtgaagctcttttatttttttttttttgagatggagtcttgctctgtcgcccaggctggagtgcggtggcgtgatctcggctcactgcaagctctgcctcctgggttcacgccattctcctgcctcagcctcccaagtagctgggactacaggcgcccgccaccacgcctggctaattttttgtatttttttaagtagagatggggtttcatcatgttagccaggatggtgtcgatctcctgacctcatgatccacccgccttggcctcccaaagtgctgggattacaggtgtgaaccaccacacccggccttttttttccttttttaagatagggtctcactctgttgccgaggttggagtgcagtggcaaaatctccatgaactacagcctcaacctcttgggctcaagtgatcctgcctcctcactcctcagcctcctgagtagctgggactacaaacatgagccaccaagcctggctaatttaaaaaattgttttgtagggacttactatgttgtccagggcagtcttgaactcctgggatcaagcgatcctcccaccttggcctcccaaagtgttgggattacaggcatgaaccaccatgcccggcctcttaagtgctttgtcagtggctcatgctctgtgtgctgtgagaagaagggtgaccatgacccagttctgccagcattgcctgtagtttagcaaacagctgagacaatatcttattttaaatgctgctttgctcatttgttcagcaaatgtttattgagcacctgctaggtgccaggcactgaattaagggctggggttacagcagtgagcaaaacagacacaattacaatgctcgtgacatactattccttgggaagataggtgacgactaagtaaatgatttatagggataggtacggggtaccaaaaggtcatttcggaggagactgtgctaacccagggattcactcaggaagtggctccatctcagctgcagtgtgaaggtctaggtgtcactacataaggacaggtggcagggagttgtctagagagaayagcctttgctgaggcctggggtgagctactgcatggtgctcttggagagacgaaagcacttagtatggcttggaagagagtttgaaggagggggcagtgattgctgaggctgaggaggtgagaggaggctgaggaggtgagaggggcctgaccacaaagggtctagtaaatctgtgaaagagtttggactttaatccaagggcagataagttcattttgaagatttttgcccttaactttaaaaaattgaattccaataatatttaaatataaagtgctcagatcttaaatgatgcttagtgaatttttaaaaagcatcccagtgcccagattaaaacataggagagttttggctgggtgcagtggctcacacctataatcccagcacttcaggaggctgaggcggggagattgcttgagcccaggggtttgagaccagcctgagcaagatgccaaaaccctgtcactacaaaaaaaaaaaaaaaaaaatacaaaaattggccacgtttggtggcagcatgcctttagtcccagctacctgggaggctgaggtgggatcacctgagcccaggagatggaggttgtagtgagctaaaatcatgccactgcactccaacctcagatacaatgagactctgtctcaaaaaaaaaaaaaaaaaaaaaagccaggcgcagtggctcatgcctgtaatcccagcactttgggaggccgaggcaggtggatcacgaggtcaggagatcgagaccatcctggccaacatggtgaaaccctgtctctactaaaatacaaaaaattagccagacgtggtggtgcatgcctgtagtcccagctactcggaattgcttgaacccaggaggcagagattgcagtgagccgagatcacagcactgcactccagcctggcgacagagcgagactccgtctmaacaaacaaacaaacaaacaaacataaagagacataggaggtttttatgctgaggaatgccctaatgtcacaacctcatgtccactgtgtggagttggagtgggagggtgagacgagaggcaggggagtcagaaggtggattttgattcttggacatttaaacatgttcaagttctccagctctcaccacatgcctgggtcctccctaccatgattcttttcctctgagacccggktattcttcctcctaagaacctgggtttccatctcctaagaattcttggttggttttgtctttcctgtgtctaccagcgaggattctgaaggccccccagctgaagaggggcctggccgcatcaggagggcattctttgtttcacaaaggccagagccgtggtttacaacagggtggttttgtctaccaggggacatctggcgatgtctggagacattcttggttgttatagttgggggttgggggtgctactggcagctgttgggaagaggccaggagcttaccaccccagagtgcagggacagccgtccccacccccagcaatagactgagaaaccctgggctggagggatggagaaacttacaggcacagggacaggatttgatggtgcttccatgggaaaccttctatttccttgtgaactaaggggccattgttctctgctgggagtaggatgcagagggccatgggagaggaggtttaaagagaacacagaggtttgaaattgctgccctgggactagaaagagctacttggaaaatgtggatggttgtcaggaggggcaagccatgttggtgttggagaggcagaggggtattttgcctatctgcagtgtagcctgggggttaggagcccagagcaggatttgttttgagttcaaatctcagcttccagtttactagctcagggcagagaggagtgtctggggcaagttacttaacctttgtcgtcaggcttcttatctttcaaaagaggataagaagtgccttcctcatagggtcaccatgatggttaaaggagtggaaattcctaaggagctgcagtgagtcctaagccacgctagttatggctgccttcgttggcagtaatcgtgacccagcattgttagcagcccccatgcaggagatcttagattgtcgggggtctggactttctggtggttgggacagaggacagtggttgaagggatggatgacaggaatgggcgatggggtcgaggcggatagggaagaagaatacccaggtctcagaggcgaagaatcatggtagggaggacccaggcatgtggtgagagccggagaatgaatcgaggagtcagagatcgagctgttggtggaggcacgtctggagtccccgcagcaggggcgctcagagcaggtggagtcctgcaggctgacagcacgcacgcacatgcggaaggctgagagccgttgtgggggtgggctcaggtgacaccactccaaccctaattccactccaccccagggcctgtgggatggggagtcagcagctcccacccctctggctcctggagaagcaggattgttgaggcacacctaggtttcaattcagtagttgcagtcagaacccggtggcaagaggactttgtccacaggaacagggctccaaggggcacaagagggatgtagccaggggagaagcaccatgaagcagcaccaggagtggagcgaggatgaggggcctccagttttggggtcaggatcggggcatgagaccctgggcagagctgagggcaaggttccagaagattcagaaacttaaaaaaaaaaamaactgaattatagcaacattcaataaagtgcatagatcttaaattatgctcagtgaatttttaaaagtatactaggccaggcatggtggctcactcctgtaatcccagcactttgggaggctgaggccggccgatcacttgaggtcaggagtctgagactagcctggccaacgtggtgaaaccccgtctctactaaaaacacaaaaaattagccgggtgtggtggtgcacacctgtagtcccagctacttgggaggctgaggcagaagaatcgcttgaacccaagaagtggaggttgcagtgagcccagatcgcaccattgtactctagcctgggcaacagagtgagactcagtctcagaaaaaaaaaaaaaaatgtataccagggccaagattagtgacctacttaggaggcaccagcttcgctggagggtcagcccagcctttggtgaccatgtcctgcaggtgtgcaggtcccagccccccaggtcccaggattttcacaccggtagcagcttcccttatccctaccaaagccacagtctggactaggacagtcccttcatggtctgccgccataagggatggggtctatggcctggatttacagggaagaggggatctacagtgcttggggccccatgtcagctggaagcagtccctgagagcccgtccaccagcagctgctctgctcctgccttggtctctcctctcatcccccgtggaaggattgctggggtttccctgacctccgagatgaccggttattggaagctgattcctgttccacaagccgtgccaaatccaacacaatccctgggggttgctgcccagcttagcaggttcaaagccgtgtccttcctgctcctctaattctgcataccagtatgtcctgagaactgtgtcctcctccacagaagggctctgtgtgcatgtggctgctagtggcacttgctctcacacctcactgatgtggacaggttgaagtaacggagggaaagtctgatttatgagctgtttttaaagaaatgcagttctatgagtttaaagaacatagaggtttggggaaaatctttaataaatagctaattattttagttagaatattaatgattcaaatcataaagtaaaaataaggcatttcaaatgcagtttggccttagactttttattttatttatttatttatttttgttattattttctttgagatggagtctcgctccgtcgcccagactggagtgcagtggcacgatctcggctcactccaacctctgcctcccaggttcaagccattctcctgcctcagcctcccgagtagctgggattacaggcatgtgccaccatgtccagctaatttttgtatttttggtagagacgaggtttcaccttgttggccaggctggtctttaactcctgacctcaagtgatccgcccacctcagcctcccaaagtgttggattataggcgtgagccaccacacccggccttatttatttatttttacaagacagggtcctgctgtgtcacccaggctggagggcagtggcatgatcatagctctgtgtaaccttgaactcctgggctcaagtgaccctccttcgttggcctcccaaagtgctgggattataggtgtaaagccactgagaccggcccctttataatcttttaaaaatgctttttactttgaaaataatttttctcttgaaaactttaacttagctcatccttgtacaaattctgagttgacatctaaacaagaagggtctataggacatgcacctctttgcggctgtgatagagtgctgggagcttattgtcacctggcaactttctttctctgtaggttggtggtgctctaggggcgactcactcatgagcattgtgatctccttccagatatttgtggataactttgtccatgcagaccttcaccctggaaacatcctggttcagggtgccaacggcctgtcctcgagtcaggaggcgcagctgcagcaggcggacatctgtgacactctggtggtggccgtgccatcttccctctgcccgctgcgactggtgctgctggatgctggcattgtggcggagctgcaggcccctgacctgaggaatttccgggcagttttcatggctgtggtgatggggcaggtgagacgcactgggaccacagaagttggggtgaattttttttaattaaaagagctggtgaagcatggtggctcagacctgtaatcccagcactttggaagcctgagcggggaggattgcttgagcccaggagttcaaggccagcctgagcaacatagtgagaccctgtctctataaaaaataagaaaataggccaggcacagtggttcacgcctgtaatctcagcactttgggaggccaaggcgggtggatcacctgaggtcaggggttcgagaccagcctggccaacacggtgaaatcctgtctctactaaaaatataaaattagccaggcatggtggtgtgtacctgtaatcccagttacttgggaggctgaggcaggagaattcattgaacctggggggcataggtcgcagtgagctgagattgtgccacttcactccagcctgggtgaaagagtgagactccatttcaaaaaaaaaaaagaaaaagccaggcttggtggtgtgcgcctgtggtcccagctacttgggaggctgaggtgggagaatcacttgagctcaggagtttggggctgtggtgagctaggattgcactgctctactgcagcctgggtgacagagtgagatcttagttttttttttttttttttaaagtttcaaaaaattaatggagatgggttttgctatattgcgcaggctgccttggcctcaagccatcctcccatctcagcctcctgagtagctaggactacaggctgggcagggggtgaatcttttatactctggggaatgcctctgtctctgtcttttttttttttttgagacagagtctcgctctgtcacccaggctggagtgccttggcgtgatctcagctcactgcaacattcacctcctggattcaagcaattctcctgccacgcctcctgagtagcagggattacaggcacatgccaccatgcccggccactttttgtatttttagtagagatggggtttcaccatgttggccaggctgatcttgaacttctgacctcaggtgatccacctgcctcagcctcccaargtgctgggattacaggtgtgagccactgcacccagccagaatgtctctgtcttgaaacaggacaggtctccttagcccrgtcattcttgtcaatgctcacacttgccagtgtgccagaaacgagtggagggaggcaggaggacaggaggcgaggctgcccttaaggggctttctgttagcaggtgctgggtgcaaatcaggccagttctgagtggcagatggtttgggactgtgggaagaaacaagtgctgtttcgtgttagtagtttctggtccttctccagcaaacatccagctggtcagcaggaatgctggcttcttgaccagataatggctgcccctggtgtgtgctacctgctgcaaggtggcaggctggtgagatgcgacagcatagagaacacagcctctaagtggggcacagcatgctggcacgtccgatgtggggacatgagtagtttttgcagcctcccctgtgattctgagggtctgcagtggttgagaatgattatttagagaaaaggcattcggcaaggcctctgcagagtcaattgaaagcactacgtcgtgggtgactctgaggaggccctctggccggctggcaaagaattctccagcaagaaaaacactgggaaaaagagaactgttttttttaaaaattaattaattaattttttttttttgagatggaatctcactctgttccctgggctggagtgcagtggtacgatctcagctcactgcaacctctacctcccgggttcaagtgattctcctgcctcagcctcccaggtagctgggattacaggtacccaccaccatgcccggctaatttttgtatttttagtagagatggggtttcatcatgttggtcaggctggtcttgaactcctgatctcaggtgatccacctgcctcggcctcctaaaatgctgggattacatgtgtgagccactgcatctggctctttttaaaaaaaaattttttttttttaaacagcaaaatgcagggcagtccctgcctctgagagggcaaacccaaagctggggcctgcagctggtttgaaagtgtcccctgggccaaggttaagcactgaggcgcagtgcagcgggggtgggggcattcctccctataggtatgggcaaagggaaaaggtcacagcccgaggaggaagagccaaaagcaagatgccagaaaagtcagggtggagctgctgagatgagaaagacgcttgggcaccgcatccaggtttatgctagctccactccaagtcccttttccgttgcattttccagggccagagagtggctgagctgatcctgcatcatgcccgggccagcgagtgcagggacgtggaggggttcaaaaccgagatggccatgctggtgacccaggccaggaagaacaccatcaccctggagaaggtgggcaggtcacttgcggaacaggggctggggagtccatacctggcctggggcagagcagatcctgggtctaagggagacctctttatgaggggtgtgagttttaaagcagaaaaagaaccaccccacatcttccaggcatgaggagccccagtgaagtccgttgtgctcaagggggcctccttgtgcggtgccacttaggaggctgcagctccttcctcatccaggggtcgctgttcatttggggacagccaagcatacagggagggaggactgtggtctccaagcagccaaatgatgtgcccaatgcgcatgtcccttatttaaacccaagccagagcctgctttgtattttatacacagttctagcaaatgtgactgttttatccccaagttcatggccacattagcaggaatgggtcagacaaggagtggccactggcacgctggccctgctgatagtctatccaggtgtgattttttaaaaatttttttgagatggagtcttgctgtatcacccaggttggagtgtagtgatgctgtctcggctcactgcaacttccacctcccggattcaagcgattctcctgcctcagcctcccgagtagctgggattacaggcacccgccaccacacccggctaatttttatatttctagtagaaatggggtttcaccatgttggccaggctggtctcgaactcctgacctcaagtgatccgcccgccttggcctcccaaagtgctaggattataggcaggtgtgatttttgtggttgcttcagggatggggtgggtggggctcaaaggcttgtcttccaaaggcctctgtgaccgagtcttgaggtggagttgggcttgtgctggaggagtcctttcagagtttgtcagatggtcccttttgtgctgactggtgtatgtgtgccctggcgggggagtggggtgggatgctggggctgagagtgtgggggtggtgggaaatgagcggttctggaaggctcggtggtctgcattagcctttattttgtttttccagcttcatgtgtccagccttctctctagtgtctttaagttgctgatgactcacaaggtgagggccattcagaggggaggtctctggggaaggtgggacggggcagggaggaatgggaggacacagggtggtgggaggcgcttctattatatggttcttgttttttgttgttgtttttcttttttttgagacagagtctcactctgtcgcccagggtggagtgcagtggcgcgatctcggctgactgcagcctctgcttcctggcttccagtgattctcttgcctcagtctcctgagtagctgggattacaggctcccaccaccacgcctggctaatttttgtatttttagtagagacgggatttcaccatgttggccaggctgatctcgaactcctgacctcaggtgatccacccttctcggcctcccaaagtgctgggattacaggcgtgagccactgtgcccggcctattatatattttgaaagcatttttagtaacaagccatttgcaacaagtgcttcgtagctgttagtctatctgtcaagtcagtgcagtctaagtatctgtgacatttaaatgtagaaaagtgtatttaaaaatgtagaaacagcctacctctggcttttcatgtctttccctccttggttcactttcatgatgcttgtgttaatgtaagtcatgcttagctctttcctggtggaatgaagtcctggggtccagaggccgctctagagggtcatgccttgtgtcctggtgctttcagaggccctagcgggactgctgtggcccctgcctggctgctgtagtccattagagggagctggcctcatggttcatcttagcctgtgccccggctctgtcgccttgtcatggagcctagtctccggcactctttaaactaaggctgctggccagggacaagcagtgttgaaggtggagaagggaggacctcgttggaagatggccttttccattgcattacttaactatatgacatctattagtaaccaatttatcccctcagtsttccaagaggcaggcaccaaagccgagaggccgagcagctcacctgtggccatgtgggccaagcccccgcctgctgctgggtcctcccgcctccgtggctcactctgagcatctgctccccacacagtttccagcacggtgggtgaggggccttgagtgtttgctgctgctgctgctgttcccaggatggaagaggagacagagggcctagggcagctactgcactccaagcacttcactaggcacttaagtttgaaaacatttacaaatttttcattgtgatgaaaaacacataaaatttaaccccccaaccctctccagatgcatagtgttagcattgtgcaacagatctctaggtctttctcatttggcagagctgaaactctacagccattgaccagctccccattcccctctccatccggccctgggaaccaccatgctgttttacgtttccatgattttggctactcttgatatttcatataagtgraattataaagtatactgtccttttgtgattggcttgttttactcaatataatgtccccaggtttcatccatgttgtaacatgtgacaggatttccttttgagacagggtctcactgtgtcaccgaggctggagtgcagtggtgcaagcttggctcattgcaacctctgcttcctgggttcaagcaattctcgtgcctcagcctcccaagtaactgggattacaggcaagtgccaccatgcccagctaatttttgtatttttagtaagagatagggtttcgtcatgttggccaggctggtctcgaactcctgacctcaagtgatccacctgccttggcctcccgaagtgctgcgatgacaggcgtgagccaccgcgcttggcctgttattctgttgatgctgttgatgttcacgtgggttgcttccacttcttggttatagtgaataatgctgcagtgaacatgaatgtgtaaatatcttttcaagatcctactttcaaattttagaaaagttttaaaaacatttaatgtagccagtaaggtctatacattgtgttcttgctttccagtttttaaacatatgccccaaagtaggttttctggatcatatggtatgtttttagtttttgaggaacttccataggagctgtaccattttatatgcccaccaacagtacacaaggggtcgtttctctcatcctcaccaacacttgtcattttctgttttgtttttagtggccatcctaatgggtgtgaggtgatgtctcattgtggttttgattgcatttctctactgattcatgatgttgaacatcttttcatatgccaattggccatttgtataatatatcttccttagaagaaatatctattcaggtagcacttaatttttttaaataaagtatttgacagtaacacagagataaaggaatctaatccacactaagaaccccccacccagcttcagaatgaaagcattcccagaggtgttagagccctgggttcccacccggaccagagcctgtgtggccaatctgccaggctggaactccacaagctgctcctgggagcatgctgctgcttctggatccacctgaccccracaaccttccagcccttaacggagacaaatactctttaatttctaacaaagaatatttcccatgattcaaccttccatttcttgaccttctgtccacttaaaaagcagattcctgttcttctaggtttacatctggctctattcctcctcactcagtggccttgagcaagtcattgaacctctctgagccacagcttctttctctatagaatggggataacgatgatacttttgaagaatagttgaagaatccatgtcaattgctattactactaatctggctctgaagggacagctgtaccctgtttgagcagtcaattgtgtgttgtctctgattttttttatttttttgagatggagtttcactctgttgcccaggctggagtgcagtggagccatcctggctcactgcaagctctgcctcccgagttcaggccattctcctgcctcagcctcccgagtagctgagaccacaggcgcctgccaccatgcccggctgattttttgtatttttagtagaggcagggtttcactgtgtcagccaggatggtctckatctcctgacctcatgatccgcccgcctcggtctcccaaagggctgggattacaggagtgagccaccacgcccggcctgtgtgttgtctcttaaaaaggctattgtagaccagctgacatggctcctgcctataatcccagcacttggggcagccaaggtgggaggattgcttggggccaggagttcgagatcagcctcgtcaacattgcaagaccctctgtttacaaaaaagagtcccagtctcaggaggctgaggcagaaggatccctgaagtccaggagctcaaggctgcagtgagctatgatcttgccattgcactccagcctaggtgacagagtgagaccctgtctctaaaataaataaataaatacatacatacataaaggttactrtaggtttcgaagaattacctgtatttaaatgtatagtttctgggatgtgtgtgaaagatttatttggtcattcattcatacacacatggacacaaacctagaaaagtatattccgcacccctagatttttccttagtgtgtccagtagatgggaggctgggcgagtaggtgagatggttggggagatgacgcggtagagaagagaatgtcaggtagatggtaaacatcccgtgggcaggtctgagggaggctgagagtggacagcaaggtgattatccagaacacacgtccctgtatcagcatgttctgagatgaactgttctgtttttctgttccaggtaaagcttgagagcaactttgcctccattgtgtttgccatcatggtgttggaggggcttggccgctcactggaccccaaactggacatcctggaggcagcgaggcccttcctcctcacgggccyagtgtgccccccgtgatggggcagtggcctctgtgggcccttgtcaagagctggaggccactcccaagagcctctcctatggcagctgggacgttttaaaattgggacaccaatttcaaatgtaaccctccagtggtggaaggcacaccatggcttcctctgcttggtttgagggtctgttcaaaagmtttgggccaattagggagtaaaaggagggaaggggcctatccattccattgtggaagctgggccaggtgccagggacactctccttcagggaaaatgttatgtggaggaggacgaataaatttattttgttttcctgtttttctcatttcttgacccgctatactccctggtcagatgggtactgctggtagttcccagactttgatattcaggttagaaaatgccatcaagtcctactgatctgtggcatgtgcacacacacacacacacacacacactctttatgtataaatatcatgcaggtgctacctgccagcataatatacacttagggcaaatttcattgtacttcaaattatcttcttggtaatttttaatagattttgctaactccttggtaacttttattacaaggtaaaacaaaactgatgaaagtggctgacataccggggacgtgagcagaacggcttggccacttccttaacatggccccgggttcacccgctagtccggaactacagtttctctgccacagtgtctgcgcctgtccacttgcaggcattaattttggtgaatatgaagagagttaatataaccagtgtgtcctcttctccatggcagcgcccagggacagacctgcagtgaccaccacctgcccctctctgccaggcccaaccacgggctttcttctcagagctgagctgatgtggccgtctggctgactaggaggggcccggggtcagcctggagggggggtatttgtaaagcttaatttctctttttttttttttttaggtaaaatcacagtttatccctgcaccttcatagattatgttgctcgtcttagagaccaccaggcagcgaatggagtcaagcccttgcgctctccgagagtcctgccctgactacaggactagtttctcccattctttccttctccaggataaagttcctcattcctgtcttttagtgagcagtatggtttaggtggacagagattcctttggtgcagtttttttcaaggaggtgatgttattttttccttcccaggtcttgaggggacattcaaagcaggcagagaggggttgggatggctccagatggctgggagggagaacaccagctggtcacgcagcccctcgtgccagtgcgcatcaggtacagtgtggaggcgggaaagggacaaaaagacggcagtctcttccctgagcctatgccaacccagccttaaagccagtggatcgaatcaagccatttgtggcattatctattgctgcgtacgaacttagcctggcacaatgcctgtaatcccagctactcgggaagttgaggcaggagaatcgcttgagcctgggaggcagaggttgcagtgagccgagatggtgtcactgcactccagcctgggtgacagagcaaggccttgtctcaaaaagaaaaaaaaaaaaaaaaaagaattatacaccactcagttttaggaggggcagaacacggggagagccctacaggatcagaggggcaaccaacaagctgtttcagaaggcatggggcagctcagcaaccataagttatgcgtgggctttgctctcgggagagaggtttcctgcagccgaaggactcacagctaatctgggtcaggagcggctgccggctcccccactcctggagatgagcgactctgtgacgtcacgggaggcgcggggcggagcgccggggaagcgaagtaggcaggggcgaggcggctggggaccgcggggcggacgggagcgagtatgtccgctctgactcggctggcgtctttcgctcgcgttggaggccgccttttcagaagcggctgcgcacggactgctggagatggtggagtccgtcagtgagtgtggggctggggatgggggcctcgccggcctgtagcggacagcgcgggtccctgggacgctctcaccttgactggggcgcctgaagaggccgcgtcccgaggcatgctgggacctgtagtccgcgtgtctcctgaagccgcgactcgaggagagggaccccgctggccggagggagagggagagacttcgctgggcagatgggacaccgtgtgcagggccgtcatggtagtaggggccgcctgccctcgggagacgcacgcgtgaatgcggagcgggctgagccagtcggcgccggcgcgggcggtccaggcggaggaagcagcgtgcgcggcgggtgtggacgctcctggagcgaggcggggggcggcggcggtgaggcctagggagggcgcggtccagggtcccggtgcctggctgcggaatttagggtagagtctgttcggcagcctttaatcggagacgtcacgtggccgctttttaatgctgaaaaatcactctggctgcagggagtggaggctgtcgcccagagagagcgccgtcgggtgagaggagcagaaagccggaagccaacgctggggcagccgtggcgtttaggagagtgacaggcagagccgcccgcgaggtggcccgagacgcagaccggagggcggagggctgggggtgcgaggtagggagcgggtgcgaggtagggagcagctgccgaagccgagttagtggtgtgcagagattccgtaagagcaggactggaaaagagtcatggatgattccaggtcccttagatcatcagctacactttaccaagaggcagtgtggggtcgtgattccaagcgggattctggccgcacagtggctgggttcaaatcccacctctgccacactccagctgtgggaccttggaaaagtttcttattctcttaatgcctcagtttcctcacccatttggcgtccatttgcaaggaactaaatgagttactgttatctaaagcgtgtttgtgtgttttaggagatggggtctaactctgtcaggcaggctggagtgcagtggcgcgatcctagctcactgcagcctctaactcctgggctcaagtgattctccagcctcggcctcccaaagtgttgggaatacaggcgagccactgcgcctggtctcactaaagtgtttaaaacaattgctggtgcctgctaaggaccgtacaagtattctttaactgttgttgttattaaggaactgaggcccaggaaatgaaaggagtgacttgcctgaagtcccacatggatgaagaatctggagctggggcaggtgtggggtgggcagaaggcaaagccctgtgtgacttgggcaaagacagtgatggagagccatgagcgacagcccttggtcctgcatgaggagatgggggaatgccgatcttccctgaggtgctggcttgttcgtaacacacacttgtttcagagtgtgtgataattaagtgcataaatgtttatggagcatcttctatatggctgctcctttctaggtgctgaggatatagcagaatacgagagagaatgaagtgtacattctggagaggagagaccagtagaaaagaaagaccttttttgagtactgttaagggttatgaagagaatacagctggggattaatatggagaatgcgtggtgtgggagtagaagggatattgtatttggggatggcgtgggaatgcctgggagtgtgatttgaagcgggacctgagggatgagaagtcagccatgcagagacctcaagggaagagcccggtggacataagagggcagaggaggcatcaggtggagaggccagagcccgcagggttggcaggaggccaggctggagtggagcgtaggggaagagtgggagagaccaggtcacagggacaagtgtgggggccggattagagggggctttggaggactcggaattttattctaagaatcacagggagccattggagttttaaagcaggaaagtaatgtggtctgatttattttttaaaaatgtaactttgtccaggcgcggtggctcacacctgtaatcccagcactttgagaggctgaggcgggcggatcacctgaggtcaggagttcgagaccagcctggccaacacggtgaaaccccatctctactaaaaacacaaaaattagctgggcatggtagtgtgcgcctgtaatcccagctactggggaggctgaggcaggagaattgcttgagcccaggaggcagaggttgcagtgagccgagatcgtgccactgcattccagcctgggtgacagagtgagaccccgtctcaaaaaaataaaaataaaaatgtaactaatagagttatggtgcatttttgtttttaaacttgactctcaaacatttgaagttggaacagccattatttccttggatgttgtttcttccccattctctttccttcttacaggacttgctgatagtgtcttacttccttatgttttttgatcttgagcttgttttccctggaatttctttgagatcgtgcttctcttagtctcttgagggtgccaccccaattcaggctcacattaaattctcggcttggggtttttggtccacacaggtccaacgcaggtaatgtgaatttgggtgcaaatctacctgaggactggcttctgataacaaattcttgttcccttgtccatggaaggtttatttcttgttcacccttttaccatatggggttgcagctttattcagtgacctcgtcattagccttcccaccttgggtgggccccaggctgcgtctctttccccacacctcatgtagctatcctggtggaggttcaagggctcccggtgaaggcagcttcagtgattgattgcttagcttccaggccttgtttttacttgaattttgctcttggtggattccttccttttgtgcctggtcagtgatgtttgtaaaaatcttaaaaatctcatctagcagcagagttgttaatttggagggttgttcagggtatctagtttgccacaatgcagttcacaacctggtttggaacataacattgtgaattaggtgttgagtctttgcattccttaatcatggcaatccttgtcattgttcctgtgatataattgcagactttcaaatctttgttccaaaaggtttccattttgcagtccctacttcaggttatgattaaaacaacatgtcactctagcaataacgaagcgtggggagctgctaagatgggtttgaactataatgctggcatcggcattactcagatcttttttgtttttttgatacagaatttcgctcttgttgcccaggctggagtgcaatggcacgatctcagctcaccacatcctctgtctcccaggttcaagtgattctcctgcttcagcctcctgagtagctgggattacatgcatgtaccaccatgcccagctaattttgtatttttagtagagacgaggtttttccacgttggtcagggtggtctcgaactcccgacctcaggtgatccgcctgcctcggcctcccaaaatgctgggattacaggcataagccaccgtgtccggccttcaaatcttgttttaatcagttttactgctgggcacttatacctagattgtatcaaaaagctatcaaagaagaaggctcttggccgggcacagtgtggctcacgcctataatcccagcactttgggaggtcagggcaggcggatcacctgaggtcaggagttcgagaccagcctggccaacataacgaatccctgtatctactaaaaatacaaaaattagccgggcatggtggcacatgcctgtaatcccagctactcgggaggctgaggcaggagaattgctcgaactgggaggcagaggttgcagtgagccaagattgtgtcactgcactccagcctgggtgacagagtgcgactccgtctcaaaaaaaaaaaaaagctcttgttatactatattgaatgatcctgcatggtttatttacataatgtaatatctatatgcacagctagatcctgaatgaataatataattggtatatgaggacattacggaaacagtatgctacgtcattcaagttgtaaagtggcgatatttggtaggaccttttaaacatgatacttaaaaaagtacatatatacacacatctgcaaaaactaaaaatcaccttattcataattagttattaataccttaaatagagcattccaaataaaagtgttaaattttggatgactatttagaaaaaaaaatggaattt

SEQ ID NO: 98155 - DNA, 21936 bp, Homo sapiens
  misc_feature (1)...(21936): n = A,T,C or G
caggacagcgagaaggcgctttcgcagcgccctctgctaagagtcgggacgggctctgcccgagtgtagccacaccgcccccagcctcaactcgccttttccttatttcatgggcatccgttctctctggctgtcccacatttgctctgcactagtcagtcctttctgacgctgtcaaaaccagtttccccagcactctgtctcgggaaaggcgtcccttcctacctgcagctcgtgtagcctcgacagcccccccttgcagaaaagttcggccagaaagctgggcgtagaggggcctgggatgtctgccaagctccggcgtgctgagtggtactctcggtagcctagggaggcgcccaactcgggcgcccagcggacgcgatggaacactctggaggcgtacttgagggtctgggtcatggtctggttcagggtgctcgcgaaagaaagcgcttctcctgagcatcatatctcaacccctatttaacctttgggtgaggtgatgacgccccctctccaagctcctcagccaatccctcctcctgagtggtctgtgctggggattagcacccaggaacagtaggcggggctggggctgacttcacaactcccttgggtctcatgttgcaatgaccctcatgggagggagggcctaagattttcctcctgggagagtgcctttgtctaggagcctcaaagtctcatcctaggaaaggctataaggctttttagtagggactaggtgaccaagctacactagtcagtctctgatattcccacttctaccagtgagcccagcccctttaggcccatcctcaggaattccccatctttcagctcctccaggaagggaagcaggggaggcacagctgtaactgtccccacattcttggcttagtgggttgtatcttctctgcattattttcctgcactagccacacctccccctcctcctgtacctaacatatactgggcagatggcaggtgggttaatgggctaaaatggctcctagaacctccatctttctttcttgaggataagggggtctcttgggtatacaagccccctccttccagacatgggaatttggggcttgagaagcagaaatgaaactttttgtacattagttaagttcagagattgtctgtggggtgttagaggagctaaatggatgtggatgttctaattccccagctgactcggtctcctctggggggctttctggttagcagctcctttctacttttagcctcagaatcctgtggtggctcatgcctataatcccagcactttgggaggctgaggcaggaggatggcatgaggccaggaggttgagacaagcttgagcaacatagcaagactgtctctacagaagaagtttaaaaattaggctgggcacggcagctcatgactgtaatcccaacactttgggaggctaaggtgggcagactgcttgagctcaggagtctgagaccagcctgggcaacatagtggaactgtctctacaaaaaatacaaaaattagccaggcatggtggcgtatgcctgtagtgccttgagaggctgaggtggattacatgagcccgggaggtcaaggctgcagtgagttatgattgtaccactgcactccagcctaggcaacagagagagggcctgtctctaaaaaaaattaaaataaaagaatctcccacagtttacctctctgctccttactccctcattccccactgcaactctatcaggctctgtgccagtcagctagctctgaagttctggaattgaaggtcaatgtgaaaaaggagagggtctccacccccacaccttcccaaggactctccagagacaacacttagggaacacagattccccaggtcaagtcttacgcagggagaggacaggaggatggtagaaggcatatgatacatactccaccctttcctgagaaatggcagaataggcatgtgtacacatatacatgttatcccaggatccacaaagcaaacagaagtggtaattgagcctagcaagcagtttagatggactacattcctcattccagctgaggagagatctcacaaggagaaaggagtgctaaggaagagcaagaccccacagccttccaaagatcccctatggtccaaagtcctttgaccatctcagtcagctgctttgttttctgttggcagtggagggacaaggtgagaggagccaggggtagtcatgaacaccagtgggttctgccctgggcagctccccaccttctttaagagagtactgtgtctcagctccagcagtctcaactgggaagacccaggactcctgctcttttctctaatccctgggagacgaggtccagctaaggtagagtaagcagtcagtgaccaggcaggctggtttgggaggtcactgcctggaggacgggatcttgtattcttcggaagatggctgggaaattcttccctccattacgtagaactttcttcccctcctcagttgaggtgcctagatgtcccacaacggggtcttcactctgggagaaggaagggtccaataagtccttgcccactgttcagactgcccctggcccttagacacctatcccatcctcctggcactgagttaagtccaaatacagaaccactctggaaagggcctccacctcctctaggtcccctactcaccaggtcctccagaggcacacgctcaaacagtgggtgctcttcgaaatgagtgcacatccagtcgtgtagctccagcacatcggttatggtatacaccagcccctgcataggcaaaatcaccctagacaggaggctgcatgcaacgtcagcagccagatgaaggaagtggtggtgtgagtccctaaatgcacccccactgaattcttagtgaagggcccctgagtaggccactcaccccatcatccctccgatcccaactcaccccaactcttagcacgtaggcatattctgctagcagggtgggactgatgattcgccacttgtgctttgtccgcttgaaatgtgggtcggggaagaggaagaacatctttgtcagctgtgagacagacacacaccaacagggttgtgagagcctggcctccatgcccccacctgcctaccagcctaacccaccagggcccctccccacctggcccttgtagaagaagttaggaaggtgcttcatggcattgctacggagacaggcgatgttctggaagccacctgcaggagctgcgcgtagggcccgaatccggtcttgtacatagtctgagaccttcacccggatctccagacccagaataagtgtgtctgggaacagcggtgacagttccactgcacacagaaatagcaatggaatcatcaaccatatacttgtaggaagtgcaaaggggtcaacacaggaaaggaagcctcaacctgcaactaccaaagtccagaacggcaagagaggacagagatacatatatggatagttttatgctcaagaggcggggggagaaatgaaaattgtcaccaggaccagaatgggagggctgaggatacatgtatatttgccattgctttagagttttccacagtgttttcacacattgtgttatttcatccttataacactctgtggtaaattgtgaagataaggaaactgagggtcagatatgccgaagatcatagagttaagaaggggcagaactggaacttatttatttgagatggagtcttgctctgtcacccaggctggagtgcagtggcacaatcttggctcactgcaatctctgcctcccaggttcaagtaattctcctgcctcagcctcctgagtagctggtcttgaactcctggcctcaagtggtccacctgcctcagcctcccaaagtgttgggattacaggtgtgagccactgtgcccaggcagaactggaccttaaaccaaggttttctgcctctatgtaccatgctcttcttctctatcaggctgttatctgtttgggaagatctaaaaatagggagtggcttggcatgcatgggtgggacaatacagacaatacaagaggaacccaaaaaacaggagagtggggcagaaggaatgagatctggcgagggaggggcaaaggggaggggagatggtagaatctctgagaaaagacagttcaggatcactggccacaacggctaatctctgatgcttgtgctgaccagctcactgacccggaacctggcagatgaaatggctcatgtagggattgacgccagaaaggacaacccaggttttaagaagcatttgaggcagccccctccactctccagggcaaaggtcacagacccagagtagagggtaggtggagcctctccatgctgatgtcaccagtgtctggacgaaaggggaaaggccaattatgaccccccacaaaagttgctgaggcagcagaagctactaggcctcttctcaccccaaaaagagggcctgagtgttacctaacaggccaccatagccacagcctatgtctgcaaactccacttgggcctgagctctcttttctttcttatcctttgggtcatcgtggctctgattttgagtgagtggagcgaagaactctgggtatagctcagaccagtccatctcctctggcttcacagggctattggaaagaagacataagaagcatgagaaggttggtcacaccattgcagaagtggtactgtgagagtgtgtgggtgggtgagggtgggaggtaaaagggaggagggtttctcaaaaattctgtaacactgggccctgtggcctctaagagggacaatggaaaccacccttaactcccagtgtgaatcataggaccatcatgaggcccataaacgctgacctgcccaactccacttctggcggttgatgtgaccctggccgggtaactgccctttctggggcacaagttccccttctcccgagactggctgcctaatgcactgggatcctactttgtgtttgtgctctgcggggagggaaggtaaggtaaggtgcgggcaggattgtgtatatgtttgcctttttattaaatccaacaaacaaaagcaaaagatggaaacgacattctgcctctatcacttcagtctcagtaacaatttatttctcttcccaaacttagcaccgctacccagacttaggcccgaacgccacgcccactctcaacccgccaactcctctctcggtcgaatctcccggtcccacccccaaaaactgacgtcacccatctgatcctcccgggtctaccccaaatcctcccagcagttgcagcacaactgctctcccggctgctttgagaatcccgccctcctctctctccctctgcccactcctcactagcgcagcgtgtggtccgccatggggttggagtgagcacgttgccggtagtagcgcttctggggcggtggggcctctgctccggccacgttccgagtctcggctgccatgatcccagtccggggtttctctaccaaatccacgtggaggcgcaggccagaggcgcaagttaatgacgcagccatgcgcgttggtggcagttcccgccccttaaagacccaagagcaaattcagctgggctgggctgggctgggctgggctaggtggggagggctgtaaggagcgagtgctggagggaacctccgcaccgttagcctccaactgggagggcgaggccaggcccagggacccaacgttttctcttagcttgcttctgcctggtctgggttaccatcctggttgcaggcacctgtgcaccccacaggtgagaggggtctagagacctcgccttctacagtggcatcagtcctcgctcctgtccccttactcctggtctcggaccagtccgcccggtctgactcttgtggtcccgtgtgggtttcgtcgagtgtgcgctcggggccggggcgggaggggcagctcctcattccacctccaggaaatcgaactggaggaaggagggcaaactcagggaggcggggctcgttccacagggacaccacgacggctcgcggcccccagcctctaccccgctccggatccgggatctgagcgccggccgcggtgcccaggcactcccttggcgggccggatggcggaccccggcccagatcccgaatctgagtcggaatcggtgttcccgcgggaggtcgggctctttgcagactcttactyggagaagagccagttctgtttctgtgggcatgtgctgaccatcacgcagaactttgggtcccgcctcggggtggcggcgcgcgtgtgggacgcggtgaggaatgggctgcgccgggtgagggtccgtgggaggtccagatcccggactccgcctctcccatatggagccatcctcacgactgtctttttctctgtcttttctcccgtaggccctgagcctgtgcaattatttcgagagtcaaaatgtggatttccgaggcaagaaggtgatcgaactgggtgcggggacaggcatcgtggggatcttggcagcgctgcagggtgcgtgagctggctttttacgggagagagtggggacccaggggcgcggagaaatggtcacttcgtggatctttgggggagaggggagaactttgggcccagtctaaccccttctttttaacaaatttttttttaaaatttgtttttgtttttattttggcgtctgcttctgcgtgccagacagcgcgaattgcctgtcaaagcacctagggtgggtgattggggagggcaggaaataaaactcaggcaggcctataagaaggagttgtttctatcgtgttgctttttttttgtttttaattttttttgtttttttgagacggagtctcactgtgtcgcccaggctggagtgcagtggctgctatccccactaactgcaaccgctgcctcccgggttcaagcaattctcatgcctcagcctccgaagtagctggaattacaggcttgcgctaccatacccggctactttttgtatttttagtagaagacgtttcaccatgttggccaggctggtctcgaactcctgacctcaggtgatccatctgcctcgcgaggcgcctgggattacaggcgtgagccacgacacccagccttgtgttactctttgtgattttatggagaatactgtcacttaaaagcgccttggctttggacatggtcttctgtcaagatgcacatatgggggtactctgtagggagacttgcagacattaaacttcgtgagtgctttataactttattatgaatatatttcagattccttaggtttttattgctaagagaaacaagcttatgagtttccaagggttaggatgtgttttgtaggaagcggggtaggaattagacactgcagacttggaaaaggaaaaggtaaggraaaatttgcttctcttttgtcaagaagcaaaaactacagaggaaacagtttcacaaattataatctaatgggcagaaaaaacctcaaactgaaagcactcgtttaaaaattcttacaatgtcatctccctaggaatgtaaattaacatgtctttgttcatagggacagaactaggtcatattaagggaagcctagccgggcgcrgtggctcacacctgtaatcccagccctttgggaggccaaggtgggtggatcacctgaggtcaggagtttgagaccagcctgaccaacatggtgaaaccccatctctactaaaaatacaaaattagccgagcatgatggcttatgcctgtaatctcagctacttgggaggctgagacaggagaatcgcttgaacccgggaggtgaaggttgcagtgaactgagatcgcaccattgcactccagcctgggcaacaagagtgaaactctgtctcaaaaataaaaaaagggaaatcttcccagaggcaggcattcattcttctattcattcaaccaaaatgtatttcaagtcccctatgtaccaagaatcatgctaggtattggggattcaacaataaataagacagattttctctccccaaggagcttatggtctagtgagggagacagaggacgatgtcatagaacaagaactctggcgaggtatgcgtggagcctgtggacatgctctatccatgtctaccatgactccctgggaatccatcaagggaagctctgtcaggtgaggaggaggtgaacagtgtgaacacagcaggctcagaaacactggagggtgccggccgggctcggtggctcatgcctataatcccggcactttgggaggccgaggcaggcggattacctgaggtcaggagtttgagaccagcctgaccaacatggagaaaccccatctctactaaaaatacaacattagccgggtgtggtggtgcatgcctgtaatcccagctacttggggggctgagaaaggagaattgcttgaacccgggaggcggaggttgcagtgagccaagattgcaccgttgcactccagcctgagcaacaagagtgaaacgccatctcaaaaaaaaaaaaaaaaaaaaaaaaaaagaaacagtggagggtgccaacagcagtttttgcatgaagcatgggtggatgcaggcagttatgctaaaaaggggagaaaaggcatgcggtatggatgggaacacctagcttcacttgctcccagactggcttctccttctttgcctcctatttagctgtcaagtcagaaagctggatgtcatcttgtccctcactttctcccctcacattccagcaatcacccagtcctatgagttaaatgttcttttttttttttttttcctttttgagacagagtctcactctgtcacccaagctgcaatgcagtggcatgatctcggctcaccgcaacatccgcctcctgggttcaaccgattctcctgcctcagcctcccgagtagctgggattacagatgtctgccactatgcctcactaatttttgtgtttttagtagagacagagtttygccatgttggccaggctggtcgtgaactcctggcctcaagtgatctggccacaacttccagttgtctggggaagtattatcttttcagcatctctagttcaggccactggcatctcttgcctggattttcgcaagggccttcaagcttcttctggggaagtgtgacatacccaactagatcttgtgaccttcctccaccaaacacatttctccctcagacttccctatctcagtgaatcaaatcactgtgcacccagtgggaaacctagacatcacctttgacacgaccctctttctcacctacatgtccattattcagtttatctcctaaaaatttcttaaatcttctcatgtttttccatctccattgacagctccccagtccaaaccaccacgatcacttgcctggactactacaacagccacacttgtcttcctgctttgactccttgtcctcacctagacctctgcccttccacctagtggtcagagtgatcttttcaaaataaaactgtaatcatgtattcccaccccaaatctwtcagtggcctcttgttgctttcaggatagaaccaacacctatggcatggcccccaaggtcctgcctccctctttctgtgcctctttctctcttgtttttcttgggctgcctattgcctgtccatcagttcctcaaacctactctgatgttcccttccttggggacttcactcaggcttactttctgtctgaaactttttaccatctgcttaatgcatatgcatccctccttcctcagctcaaacatcacttcgaagggaaggcctccytggcactcccactcctaggctaacttagaccctcccagtacatacacaactgtgctaactgggctaattttaactttgttaccattggccttaggtgggtcctaagtgcttcccagctagcctggtacattctctcgtccactttttctgccactctcctgaacaactgtttcttaccttcttattcctcaaacctccacatgcctcttctgccatcttcaccctcacctgatgactttgtttcctatctctttattttattttattttattttattttttgagatggagtctcactctgttgcccaggctggactgcagtagtgcgaccttggttcactgcaacctctgcttcccaggttcaagtgattctcctgtctcagccttccaagtagctgggattacaggcacgcaccaccatgcctggctaatttttgtatttttagtagagatggggtttcaccatgttggccaggctggtcacaaactcctgacctcaggtgatccacctgccttggcctcccaaggtgctgggattacaaatgtgagccaccgcacctgggctgtttcttatctctaatgattgcttctgttttctcagaaaatgtccatatatttttatcacaacatctacttatgtgactgcatctgcatctgtgtgcagtgccttctctcctgttaccatggatgaacacattgtgctagctaaggtcaagccccccacttgtcacaagaccccaaatctttctgcctactcaaagacattgttccagcaacacccacccccatctctcctgcattctcagtttttccttttctttggatcattccatatatagtaatatatggaatataaaatgcatataaatatgctatgatttctcttatttcagaaaaaaactcttgatcctacatctccctccagctatcactccatttctatgctccactttaaaacaaaactcaaaagagttaatattcagtgtctagttcctctcctcctattctttccttcaatccaattgttctagttaaggtcgtgagcttcatttccaactccaggttgttaaacgcaggagtcagttatcagcctacctttgataactttgcatttgatgctgacactccctcctccttggaacaattcctttggtttccaggggaccacacttctggtttctgcttaccggcaggaactccttttccatgctctcttgttggttctttttcatcttcacaactgaaaatgtgagtgccccagggctcaggggcagtcctttgatcccctccttttcttgtctacctcactcctgagcagcccatcacctcatgcctttaaatgtcctgttgaagccggacgcggtggcttacgcctgtaatccgagcactttgggaggctaaggtgggtggatcacctgaggtcaggagtttgagactagcctgaccaacatggtgaaaccccatctctactaaaaatacaaaattagccgggcgtggtggcaggcgcctgtaatcccagctacttgcgaggctgaggcaggagaattgcttaaacctgggaggcggaggttgcaatgagccgagatcatgccattgccctccagcctgggcaacaagtgcgagactccatctcaaaaaaaaaaaaaaaaaaatgccccgttggtgatcatgactctaagactatcccatttctatctccagacttgcttgcataacctagtgcctactcagtatcttcatgtggttgtctgatgtgatatagaagtccatgtcaaacttaacgtgctcagaaaatgaactcatgatcttcctgtccaaattgcgcctcctgcaacctttctcatctaaatgagtggcaatttggtcttctagttggtcaggccaaacacccagaaaccatcctgagctttttttttttttttttttttttttttttttgagacaggttctcactctgttgcccaggctggagtgaaagtagcacaatcatggctcactaaagccctgaactttcaacctcccgaggctcaagcaatcctctgacctcagcctcccgagtagctgggactacaggatgtgccaccacacccagctaatttttgtattttttatagagacgaggttttgctatgttgcccagactggtctcaaactcctggactcaagcagtcatcccgcattggcctcccaaagtgtaatccaaagggattacaggcgtgagccactgtgcctggcccatcccaagcttttctctctctctcatattttatatccaatctattggcaaatcctgttgactctaccttcaaaatatattcaggatctgaccatttcttagccattgctactgccctggtttaaaccatcatcatctctcacctgagtcattgccatcacctcctaactggtctcctagcttctgaccttgccctcctgtactcttctcatcatagcagccagcatgctcctcctaaagcatgccagcgtgtgccattcttttttttttgagacagagtcttgcacttgttgcccaggtcggagtgcaatggcacaatctcggctcattgcaaccttcgcctcccaggttcaagcgattctcctgcctcagcctccctagtagctggcattacaggcgcccgccaccacacccagctaatttttttgtatttttagtagatatggggtttcaccattttggtcaggctggtctgaccactcaatttaaaatttcattctccagccactcaatttaaaattacattcaggctgccaagactttgtcctctatgccctggggtctctggaccttccaggtaggagccgagaacccttggttggtccctctaacttgcatttctccccatccctcaagcaattcttatcccccttccctgcttggggcttcaccatggcatatattaccatctgatgtacagtgtattttattttatttattttgtttgttgttatcatctgtttcttgccactggaccataagctctgtgaggggggattcttatcttcttagttcatcattatgttctcagcacttggcatataggcacataataaatatgaatgaatgaatggattcctagtacttcttgcttctctttctatcatagtcatcatgattatgatgcagtacctagtgtgtctctacctctagaatgaaacaaagaaagctgtgtttttgtcttgctcaccttatatacccagcacttagaaggttctccaaattatatctactgcatgaatgaaggtttctgagatgctaatctgaccatcttcacccgtttctgcccttaaagcytactgccctcagtatcgaacctgaatcttcttagcatgtcataatcactttccctttgtctcatgtcttgacacttttctcccccttccacatcctctaagatgcagcctttcctgaatatgccatgctctttcactcccaggcctttgtactcactgttctcttcttggaaagctccacctgactaactcctacttgtcctttagggctcagctgaggtcacattttctgggaagctttccagacccttaaggcgagcttgtgtcagtgggggtgggtacagaacccatctccagcttagtcctgcccaggcttctgctgacatctgattgttgtgtgttggccagagaggttgaagattagctcagagagaatgttgatgttgtagaatgtagagtaatgagaatagcagtgggtgaaatggaggttgaggcaactaaaagccagtgtgggctctgggctgtcaagacattgtcctctatgctctgaggtctctggaccttccaggcaggagccaagaacccttggttggttcctctgacttgcatttttcctccttcctctctctcagggggggatgttaccatcactgacctgcccctggccctagaacagatccagggcaacgtccaggccaatgtgccagctggaggccaggcccaggtgcgtgccttgtcctgggggattgaccatcatgtcttccctgcaaactatgacctggtgctgggggctgatatcgtgtacctggaacccaccttccctctgctgctggggaccctccaacacctgtgcaggccccatggcaccatctatctggcctccaagatgagaaaggagcaygggacagagagcttctttcagcacctcctgccccagcatttccaactggagctggctcagcgggatgaggatgaaaatgtcaacatctatagggccaggcacagggaaccaagacctgcttgacatcacccttgctgttcttctcaatctcttgctctaatgaaggaactgtgtatctcaaaaaccatatttccagagccacaaacatgaggaccaaaaaggatggatttccctggcctctctcactttcctccttccctctttgttaccccagatactcttgggcaggtgcagtgaggtgcctgcttacaaggaatcccagagttctggcagcactagtgttagaacaccaaggaggttcctggctcctgttctcagagaaggaggatggtaaggtatccaggatttttagggggtaagggagatatatgggatgtgagagcagtgattgtagacagactgtcactgatcacttccattcctgttgctgtttacacagaatggactttaaaaaaattctgtgggatttttttttctttttttctttttttttgagacagggtctcactctgtcatccaggctggagtgcagtggtgtgatcacagctcactgcagcctcaacctctgaaggcccagatgatcttcctgcctcagctccccaagtagctgggactagaggcatgcgccaccacacccggctaatttttgtattttcagtagagacagggtttcgccatgttgcccagggtggtctcaaactcctgggctcaagtgatccacccgccttgcctcccaaagtgctgggattgcaggcatggcccactgtgctagcctaggatttttttttttttttaagaaagaattaagccttaaaaatctattgtgcaagaaccyaacttttactcaggagctgagaaggaagaagcctcaaaccacccatttcctgctttttagagatagagtctagtggaaccatggctctaactgggtcaagtcctcctagctctgaagctaaggctgcagagctgtcctttggactgtatttcttcatgctttccagagttagagccttgatcacggaacatcattgtgtgcagaagaatactgtacctagtactaagttcttttcatctttgatttttctttagcttcatcagtccttccttcctaatctctaatcccctgaagcctaacacagttcctaatgtgttttgccttaacctcttttctcttcccacattggtacttctggttggggctctctttacttactgcttaggcacatagtcaccttctctggactccctgcttccatgctttctccttcagtccattccgcaaactcttgtgatcttccaaaattagctctgattagctttcacttcctgtagaagcaagaacaagctcctctgcttggtacttagtctgtgtccatgtgatccaaaattaccttcctattgcatttcctactcctttgctacgtgtattggacctctggccaaattacaaaagatgtactctttgttctctaaaaccacactaaagttttctgacttctttcacactctttatgataatcctctgcctgaaaggctattgccacctgtcaaaatcttcattattctttgcctctttcctgagcctcttgcttgaatgtgatttctttctccctgagacccataaggttcatcttatgggaccttaatttgtcttgcatggacatttgtgattctcattttctcaccattaaattaccttggagggtagggctgtggtttactcctgtctaaacccctgaagcctaacacagttcctggcacacaacaggtgttcaacagatattgtgctcattcaataaatatttactcgctttgtttaatggattccacccctgccttcctaggtgaccttggacaaattctcgaacccattcaccaaccacacaagtttgttgtgagtcataaatggataatgaatataaatgcgcattgaaaataaacataaaatgttacccacatttcttgtgttgttgttttgtgacgactttatttcttggtttctgttattttacctggggtgggaggtggggggtaattcccgtatgaaatgtgtcgtctcaagaaatcaagtagaggcgaggactgtgttcctccggccagcaggtggcaccatactcgtttggtgcgttccgctggagaattctggcccttccgccgcgccgtaggtttgttgcctcaccagtgcgcccgccggagggtgtttatcgcggctagagagatgtcgctgctgcggtcgctgcgcgtgtttctggtcgcgcggaccgggagctacccggtgagaagtcctggtgctggtaccgacctgctgtccctgcagctctcctgtgcgcctgtacctttcccttcctcccaacctcgtttgactccatctcaccttccccgacagcattgcctctgcccagtccagccccggtgcacccccctttgcacactgtccgctccctaaggtcgcttccctgcccgtgtacccttcaccctctggagtttgctgcttcctgctcctcatccctttcttatctcatctaggctgggtctcttctgcgtcagtcgccccagccaaggcacacattttatgctgggccccgtctgtctgcctcggcctccagcaaggagctcctcatgaagctgcggcggaaaacaggctactcctttgtaaattgcaagaaagctctggagacttgtggcggggacctcaaacaggtgtgtgtgtggaggggtgcagggcggagtactagagctcgacctcagactcttggggcggtcacgctggggagcataaagttagactgctcttcagtgaccataatggcacagtcctaagtggaaatctggcttaaatgacaaccttggccttgactttgtcttatttgaaagcagttgagtatcccaggattaacaaaccagactgttacggtgtttcttgttgcctggagctgaaagggtttgtgtgagctttggagtcagattgttcaggagtcaaattgtggggcccccacactgtctgactttagactttttttttttttttcagacggagtcttgctctgtggcccaggccggcgtgcaatggcacgatgttggctcactgcaacctccgcctcccgggttcaagcgattctcctgcctcagcctcctgagtagttgggattacaggcgtgcgccacgacacccggctattttattttttattttttatttttttttgtatttttagtagagatggggtttcgccgtgtcggccaggctggtctcgaactcctggcctcaggtgatccgcccgcctcggcttcccagagtggtgggattacaggagtgagccaccgcgcccggctgactttagacatcttaatctttcagagttgtgtagtttttgcctgtacggtcatgcgtctcttaataggaagatacattctgagaaatggcgtcgttaggagattttggcttatgcacatcatagagtacctacacaaacctagatggtatattgtactacaacctgggctatatggaattgccagctgctcctaggctacaaaccgttacaaaatgttactggactgaatactgtaggcagttgtaacacagtggtaagtattgtgtatctaaacatagaaaaagtacagtaaataggcataaaagataaaaaacgatacatctccatagggaacttatcatgtatggagcttgcaggactggaagttgctctgggtgagtcagtgagtggtgagtgaatatgaaggcctgccttaggacactatggtgcactatagtagacgttaaagcacagtacacataagctacattacatttataagaaatttttttctgtgataataagttaaccttagtttaatgtaacatttttattttataaacttttaacatgttttaaatttttggactcttttgtaataacagcataaaacacatattgtacagctgtaccaaaatatttttctttatgcactttttctgtgagcttttttctgtttttaaaattttaaactttttttggctgggcgtggtggctcatgcctgtaatctcagaactttgggaggctgaggcaagcggatcacctgaggttgcgagttcgagactagcctgacccacacggagaaacctcgtctctactaaaaaaaaataaaattagcctggtgtggtggcaagggcctgtaatcccagctactcgggaggctgaggtaggataatctcttgaacccaaaaggcggaggttgtggtgagccgagatcgtgccattgcactccagcctgggcaataagagtgaaactccatctcaaaaaaaaaaaaaactcactgaaagccctgcttacacctagcagaaatctcataaacttctatgcagatggaggctggataagtcaatcttcccatgtgaatttggtggactctaacagacaggcactaatacagaacaaaaacacaaaatatgatgtcaattcatattgcaatagtggattaaaatgcactaaggccgggcgcggtggctcacgcctgtaatcccagcactttgggaggctgaggcaggcagatcacctgaggtcaggagtttgagaccagcccggcnnnnnnnnnnnnnnnnnnnnctcaaaaaaaaaacaacaactttttttattgaaatatctttttttttttttttttttttttttttggaaacagagtcttactctgtcccccaggctggactgcaggggcacaatcttggctcactgcaagctccacctcccaggttcacaccattctcctgcctcagcctcctgagtagctgggactacaggcgcccgccaccacgcccggctaattttttgtatttttagtagagacagggtttcaccgtgttagccaggatggtctcgatctcctgaccttgtgatccgcccacctcagcctcccaaagtgtcgggattacaggcgtgagccacagcgcctggccaaaactttttttaagttaaaaaattgttttgttaaaaacggagacacaaacacatacattagcctaggcctacacaggagtggcatcatcattaacactgtgttccactttcacatcttgtcctgctggaaggtcttcaggggcagtaacgggcatggacctgtcatctcctatgataacaatgtttttttctggaatacctcttgaaggacctgcctgaagctgttttactgttaaatttttttattttttatttttttgagacggagtctcactttgtcacccaggctggagtgcagtggcgcgatagatcttggttcactgcaacctccgcctcccgggttcaagaaattcagccacccgagtagtttataagttggagtacactctaaaataacaataaagcatatgtattatagtaaatacataagccagtaacatagttgttcattattgtttcaagtatcatgtactatatgtaattgtatgtgctatactttaataggactggcagcacagacgttttctttacactagcattgccacaaacatgtaggtaatatgttgccctacaatgttaggaggactaccgtgtcactagacaataggaatttttcagctccattataatcttagggaccgtcatcatatatgcagtccgtcattgtccaaaatatcgttatgtggtgcgtaactgtataaagaaaatacaactgtgtgccccatagggttgttgtgaagattagattcatccaaggcaccagttataataatacctggtatttggcatttagtggtagactgccagtaaatgatagattactttagtttctgttagagaatttagagaatcaggaaacctgagtatatcttagaactacatttagtgctaaattctgtgactttgttgtctgctctttttcctctcaatttacaggcagagatctggctccacaaggaggcccagaaggagggctggagcaaagctgccaagctccaagggaggaagaccaaagaaggcctgattgggctgttgcaggaaggaaacacaactgtattagtagaggtgagttgttggaaattccagataccaagaacagctgtcccttgggtgtaaagcttgtagtaggccctaaaggggcctgttcttgaagaagagatctgtttaagaaccataaagcgtagttgaagttaaactcatgaaaccctgggtattagttacgaattcgtttaagtatagaaatgtactggtgtgttgatgagaaatggcctgacagtctagaatattactcctgaatgtgagtctggcacaggcttacaccttgtcactgattgtttcctggaacagttagattacaagttaattatattaattgttgctgaatagagagtaggtattttagaggaggtttgggggccataattggtgaagagtcagatgtggattagtttagagtgagagatggggataaacaagataatagcataagtggtttggagttgggatggctggagaatgaggtgatgatggtgtgcagacataggtaagtggtgaacttgtggtgagtccttcaggacattattgaaccatcttctgaatatacaggctattgctaactcactggcccaacataaatcacttcattctgttccaggctaggagaggaagcgtagctttaaaattttggagtcattttttttccgttgagtctgtagcttgttctatcagtatcttgatttattctccagccttaaggcacttttggaaattatcattaaacagcttatacagctatatcaatttgttcccacaggtaaactgtgagacagattttgtttctagaaatttaaaatttcaactgttggtccagcaagtagcccttggaaccatgatgcattgtcagaccctaaaggatcaaccctctgcatacagtaaagtaagtttgggatttgtctccagtgtgctgaatttgctgtcctcattgggtcttttgctgttcctattgtagacattctcatgtctcattctgttacttcacatctctgcttaaatgctatctctttgcatagaattacccttcccccgttgctatatccccgtgtcatgctgcatttaaaattttttattatggtgcttatatattacattttaatttatctgtgtgttgtctatcttccccagcagaatgtaagctttatgaggcagggaatttgtcttttcactgttgtatctctggtgaaagagaattgggcccactacttagttggagctcagtaaatctttgtcagatgaatgaatgaatgattgaatgcatgcatgccagtgaaatggagttagccagatcaagtgaagccatttgaggctttgtgttcagaaatttggaatggtcttaggaaagaatttctaaataaagagattggagccaggtgtggtggctcacccctgtaatcccagcactttgggaggccgaggcaggcagatcacctgaagtcgagagttcaagaccagcctgaccaacatggagaaacccgtctctactaaaaatacaaaattagctgggcgtggtggcgcttgcctgtaatcccagctacttgggaagttgaagcaggagaatcgcttgaacccgggaggtagaggctgcagtgagccgttgtactccccccgggcaataagagcaaaactccgtctcagaaaaaaaaaaagagagagagattggaaaagacatggtttaggaaaataagcatattcttatccatagagggatcaaggaaaggaattatgtcattctgcctttgactcagccttattgccaaggcaaagatgaaccaaccactcacagtaatttttttgagtttattaccaactttttttatcttctttatccttctcttgagatgtcttggtaaatgttaattattattggcattacatagtcatatggaaaacaatgttgagattattttttttaattgtattgagtaggtaagtcacttgaactagaaatt

SEQ ID NO: 98156 - DNA, 17318 bp, Homo sapiens
ccacagtggccagggccctgcatactgctctatttctttccccagtctctatttctttccctgtgcccacagccatctccagtaccagcagcagctgtgctcccgactcctccatctcaggtaccaccgactgcactgggcggggccctctggggggaaaggctccacggggcagggatacatctcgaggccagtcatcctctggaggcagcccaatcaggctgtgggggacaggagaactctggtcaggagggtcctccagttcccatccccatgggcagagccagttgccatcctgggttcagcagaaagaggactcagaatagaaaatctttttctcccatgttggtcacttactcaaagattttgcccaactggtcggcttcagagtttccacagaagagaggcctaaggtgagaagggatataaggtagcagtcattttcaaagatatcttagttgaatggttactgcttagtggctcaaaataggaagtatagggaataaaggccaacaattccagcactttgggatgctgaggtgagaggactgcttgagcccaggagttctagatcagcctgggcaagcaagaccttgtctctttttttaaaaaaaaagaaatgccaggtgcagcggctcacgcctgtaatcctagcactttgggagtctgatgtgggtggatcatgaggtcaagagatcgagaccatcctggccaacatggtgaaaccctgtcattactaaaagtacaaaaattagctgagcatggtggcgtgcacctgtggtcccagctacttgggaggctgagtcaagagaattgcttgaatctgggaggtggaggttgcagtgagcagagatcgcactactgcactccagcctggcgacagagcaagactccatctaaaaaaaaaaaaagccagtcatggtggcgtgcacctgtagtctcagctactcaagaggctgagatgggaggattgctttagcccaggaggtagaggctacagtgagctgtaattgggccactgcactccagcctgggtgacagagtgaaaccttatctcaataaataaataaataaataaataaataaataaataaataaataaaaaataaagagaataaagggatatgaagttcctaattccagaacatttcagagctttctgctatgggcaagttagtagtacgcaagtaaaagaatggggccagatgcagtagcttatgctactttgggaggtaggggtgggaggattgcttgagtgcaagagttcaagaccagcctgggcaatatactgagaccccatctctataaaaatattaacaaactagccaagcatggaggtgcgtgcctgtagtgtcagctagttgggaagctgagatgggaggatcacttgagcccaggaggttgaagctgcagtgagctgtgatcatgccattgcaatccagcctgggcaacacagcaagccctggtctcaaaaaaaaagaatgggcaaggtatggatgtggtttatgaacaagcgatttggggaattcaaggtagtccagggtatgtgggtcccatactttcgacgaaacatctctgcaaagatacagccaacactccacatgtccacaggtgttgcatatgtggactgcagaagaacttcgggagctcggtaccagagtgtaacaacctaaagggaataggaagaatggatggggaccccatgggttaccatgaaacacaacttgcttgactgaacacatgaagcacatgacttctcaattgctacgggcaatcactctcctactcccaaccagaacccattttggtaccatctttctactgaccacgggtgtaagtgccatctggtagctgtagattctggccaggccaaagtcagccagcttgactgttccaccacttgtcaccagaatgttctctggcttcagatctcggtgaacgatgcaattggcatgaaggaaatctaggcctcttagaaactggcgcatcagatcctagtttcaaaggggaggtacagatgcactggaaactaggcaccatacctgaaatcccagaaggttctactacaaaggtcccaatccacctctcaatgcctaccaaccccactcaccttgatcgtttcggctggcaagcctggtgggggtgccttgtccagatatgtccttaggtcctggtctacatgctcaaacaccagggttaccttgatctcccggtcagttcgggatgtggcacagacgtccatcagcctgaccagagtaaatgctcacttttcaatcccctttaacccaacatggcctctcattatttcctcagggtccccacttctctacagatcatcacaccccacctataggctgtcttttccctttactccccacgcccaaccctccaccaccttctcaccggacaacattgggatgctcaaaagcctccagtcgcctcagtaaagccacctcacgaactgtgctgatgggaaggcctcctccacctcctcctccattggggactctcacactcttgagggccacaaagtggccactgtggggatcacgggccttgtacactgtcccataggcaccgacaccaatttcagccactggctcatatcgagaggtagccattctcagatcaagggagaccctacaatcacagactcctatcaccaaaagtcgcttacagagttaggatggtatgagcctgcagcaacaaagggactcccaaaaaaaaagcgcaaagaacaccaccagcatcccatcccccgctcccagtcttccttggggccggccccagagataacacaatgactcaataccaacccctccagccacgtgaggccctgcaatagaaaacgctttttcctttgggacaatcgcgccccgcacaaagatcacacatgacacatgccttgcatcgaagatcctacacctcagtccctaaaattatactttcccatgaccacaaaggccccacttcccgcccttgagcgacccttccataaccagctcgcgaaacgaacgcgtggaaagctgtgaggggggcgggcactggttctcattcctgggaagggactgcacttacctcacgccagcccggggtgctgtgggggcggcccgttatcggggccccggagccggttcctacggccccatacacccgagctcggtccggagcagctggacgcagagggcccgaccatagacacaggccgcaagctagagaggccccctcacccccaccctcaccatgtgaccagctgccaaagaggcgcgcggaaactgggagggcggggcgaacgccggacgttctgggcacgtgaccgccacccatgcgctgaggggcggacaggaggtgcttcgactgggaggagggcgaagagtgtaagggggcggaggggcgatggcagccacgtgatctgttgctatcacacgtgaccgcttgacattgctctgaggagcagaggtgtggctacgcggcgggcacgtgactggctgccacaacccccgctgcagggggggagcggtgagggggacaagagagggtggagcccgaggcggtgccatggcaacctaggccacccagagcccaactcccggctgaaggattgtctcactaccggtctgaaggctgaactccagtctcactaccggtctttcagcctgtctgcattggggagggggtgggagttggggtaccagaggtgatgctgtcaccttttcgctccaccatgagaaaacatactctcatttgtgtcattgtttcattcattaattctacaacattttactgagtgcttgcttccagtgtgtatgtgggtttttattttgtttttggtgtctgtcactggccctttaaagtagtggtacgactatctataaagatgtagccaacaatggggtcttctacaatagggagtaaacaatgcccatttgagggcaaaactacgattaaaggatgacggaaggcagattaatacagtaatccaacaggctcagtgacaaggtaatcctctcacttttccaacttccaaacctccctgggagtgttaatgcaaagacctgaggccatctggcagagaagttattgatgagcaggagacaggaatacttgaccttttaagttttttttttttttccagtaggaaggttctatgattatgtgatatttgtatgtgtgcatatatgcttctatgtatatatgtatgtatatgatattatttatcacatcatatataagacggatacaggattgcacatgtgcaagaaagttaccaccacaccccctgcaccctccagaccaccacaatgaatgaaaatgacatgcccccttctgcaaaccttgtgactactcatttggagttattgtgcttccctctttttccctagtgccgctttcttagcacttagcactgtccagaacacacttgttcccaaatggcctctgcccagacacctaggtagacacaagtagatttctcctactttgttttattggctccaaggtctttatctcccagccctttgggggtatgggagtaaaggaggaaagcggttagtgtctcatttgtgagaatttgtctaaaatctaaagccattttattaccctatttgccactccttccactctaacttctgttttccttaaccatctggctgagaatataagagttcaaactagaagatgaatataaaccatgacttagagcaaaatagaatacatattaatacagatgcctcctctttccatcctgatacttgtagccctgggcccctcctggcaagggcagctggaacactagtaagaaaaacctcaaggactgaactgactaaggggctcaagaggtgaatgttttattggctaccttgctaggggtgggtgctttgtaagccttctggaaggctaagataattgtctgtgagtttttcaaactcccttcccacaccagcattccccacttcagcctcaccttccacataagaccttcacagcttactgtctttgcaacagaagacgtcctctctgtctgcttgggtcccagcccctttttctgattcattcattagtccatccaaaacatttgaatacttcatgggaacattactgtctctccatcactttctattgaggaaccttaatttggcagtctgtcccaggctctgtcccctcccttcttctgttaattactctttcactaattaaattttttcccagtatgtttgacccaatgagctcccctggaatcccttttccctcagctttgcaaaggggaggagagggagaatgtaagtgtaagaaagaaaaaaatgtgatgggggtagaacttggcctcagagggaagtctccataaaaggaaaggggtaagtgtgtgtattgttcacttcagtgtagtggaggtgagggcaggagagtaccaggaaagacactcccatccctttagcacgcctacctcccctgctccctccctcacctccttcacacattacaatcacaggcttctgtttctcagacaatccgattccattccttacacacctctctttcccagtccccatcgatcacacttttcagccctttgggtaaagtgtatattgcttgagtcccacccctgcccatgtacctccctcacacctccgacacttgcacagctctttctttgcacattcccattttgcacaagcctcaccctccctggtacacctgcgtcatttaaccactcaccttccatgctcacccgctcatcccccactcccagacacacacctagtcaacttgtgtgcacactccccttccttggccactccccttcctccaccctcctcgggatcccacacttgcccccgcccctggggacacctgctcgtgcggggcagggcggggatgcgcagccgcggccccttctcctctccccctccccgccccgcccctccctccatccttcacccgctccccggcgcccgccccgcccgcccgccactccgggggggtctccgccgccgccgccgccggaaggagccgccatttgccaccgccgagcgcacgggccgagccaagcctgatcccggagccggagggggactgggaccgagagaacggcgatggggggcggccccgccgcaggaggacccgggcgcgtaaccccgggggcccggcccgctccagacccagacccgcggggtgcggcaccctgagcccccctccccgccccctgccctggccatggccgcccaccccgccgcccccgggycgccagcccgctcggccccgcaagcaccggagccccggcggtggcagcagtgaacggctgtcgcaggccccgaagaccccggcccggctcggmtctctagcgcgcgcccccttcccggscttgtcctctcccctccccccgccgctagcgagccccccttgcacgctgccccccgcccccggtgtccggacgatgctcaagtctcggctccgcatgtttctgracgagctgaagctgctggtgctgacagscggggggcggccccgggccgagccgcaaccccgggggggccggggagrcggctgcggctgggcgcccttcgctggytgctccacccgggacggcgacggcgacgaggaggagtactacgggtcggasccgcggscccggggcctggccggcgacaaggagccgcgggccggacccctgccgccgcccgcgccgccgctgccgcccccgggcgcgctggacgccctgtcgctcagcagtagcctggacagcggactccgaacccctcagtgccggatctgcttccagggcccggagcaggtcaggcctgggcacctggccgggcgcggagggtggaggcgcgcacctggggtgtcagcggagaccgcgagcaggcgcggcgcctaaggaggctgggcgggccccaggacacggagtgggaatggggtgaggccgaggggctggcaggggactcctggagcgcttgtttgtgtcggagggtcaagggtccccaggaaggggtggggctytctccccggagagcgcaaaatccctctcacccattaacagggactgctgttctctcctatttccctcgccccagggtctccgtaagctaaggggacctgttctcttgcaggtgggcagaaaggagagtgcttctgtgccccccttgaagggaggggcccagccagcgcccttgcttagctcagtatttctccccgtggggcactttttttcacttcccattctgcaactttctatctcattctaaagagtattctttgttaaaattttatgggcaaagttgtcccagaatagtgccagggggtgtctctgtgtagtgagaattgattccatgattaaagggaaacacccttcactcccacctccgcgatttctcccctttttagtacgtggaaaccgaggaccataacccatcccagtttgcgccagatctgtgaagtaactttacaatgatggggtgggggaaggaaagcatggctcagaagctctaacactcccctccctccagatcctaagaggaagcctttcttttgagaagtcttaaagactacccatcccaaattctaggaaaagagaagacccagcccttctcccctctaatccccccatccctttccatctttcatctctttggtatgggragtttcccttgatctccaagggaagcttcttttctgttgcagccttacttagcctcttgccctgtcttgggtgaaaggcctgagttatttaaggtgggaaagtgacctgaagaggaggtttccctgtcggggagcgcggctgagtggggtcggggtggtgatggctgacagggcccctcctcactcttcctccagggggagctcttaagcccctgccgctgcgacggctcagtgcgctgcacgcatcagccctgcctcatccgctggatcagcgagaggggctcctggagctgtgagctctgctacttcaagtaccaggtcctggcgatcagcaccaagaacccactgcaggtgaggtgcaaggagaggactcggagattgggcgaggaccttttagctattggactcagggaccctccaggaagcctatttcatttactcttttcccaaagccacccttccccgccagttaccacagtctcccgtgtgtctgtatatccttcctaagcccttaatttattcacagagatatttattgggtgccacttatattccaggcactgttctaggcactgggacaatcaccactccccacccgccacaaaaaaaaagaaaaaagaaagaaaagaaaaaaaaaatgctgggcgcggtggctcacgcctgtaatcccagcactttgggaggccgaggcgggcggatcacgaggtcaagagtttgagaccagcctggccaacatggtgaaaccccgtctctactaagaatacaaaaattagccaggcgtggtggctcgtgcctgtaagctactcgcgaagctgaggcgggagaatccttgaacccgggaggcagaggttgcagtgagccgagatcacagccactgcactccagcctgggcaacagagcaagactccgtctcgaaggaaaaaaaaaaaaaagaaaagaaaaaatgatgttgatgatgatagcaaatatgtagtgttttctgtgtcaagttttggtgtgtattaactcttaatcttcacaataatcttattagatactattattatccccttttacaaacgaggacactgatgcacaaagatttgaaaacttacccaaggttacttagccagtaagtgatggagtcaagatttaggattcaaatctagatgttttggtttcagagcacttgcccaatcctgcctttctaaagtaagacaaatggtgtcagacaagtgccacattctagatttaatcaaggcacagagaagacagatgttgatcctgcctgaaggttttagggaaggttcctggagcaccctgctcttcagggccacccatcacctggccctccatccctttctgggactctttggagccctttctcccacacagtggcaggccatctccctgacggtcatcgagaaggtccagattgctgccatagttctgggctcgctcttcctggttgccagcatctcctggctcatctggtcctcactcagcccttcagccaagtggcaacgacaggatctgctctttcagatctgctacggcatgtatggcttcatggatgtcgtctgcataggtgagggcacctctctctcctttacctgctctgtatcttcctcttacacacctaactcccctgcccatcccctcagtttcctggctttattttctgccactgtagcctttagtgctatcctggtgccccctcaacccacttccctgcttctccagggccctttgcaactgtatcttctcactctgaagaaatgcttgcttaagtacctctggcctagatctaggccacagttaaccctggatttcttattcctattgctcaggcctcatcatccatgaaggctcctctgtctaccgcatcttcaagcgctggcaggcagtgaaccagcagtggaaggtcctaaattatgacaagaccaaggacataggaggagatgcagggggagggacggcagggaagtcaggccccaggaactcacggacgggccccacctctggggccacgagccgccccccagctgcccagcgcatgcggacgctcttgcctcagcgctgcggttatacaatcttgcacctccttgggcagctgcggccaccagatgcccgttccagctcccattctggccgagaggttgtcatgagggtcactacagtctgaactggactccaggagcagggatcttgagtcaatgcatcagtcagagaagaactctcatggctgctggaggtaccagctggacaaggtgtttggggcatgctgcccccgtcaccgaggatctgtgtgggtagcctcaagctggagacattgtctggcctcactgcccactgggtagagacacctggatgacatttcagtacccgctggcagctcctcccactcatccagagacggccggtgggcaggcggggagagcagctttccttcyctggagagaaccgtctttacctcagctcctagggcctccagccccccagctccaccacggtgacttggtgaagggggaccaatgccagaagaaaggggctgtagacccctrttccccaccccatggccacagggcatctggcaataagactagtatacattgacctcccgttccctgcatgagggcggggagttccccctgctccatcccccattgcatgggggaagggcataaagaatcatttatatgcacgtggagactcctttctcatctggggcttttctggagggttgggagatgtggggaggtttctctgcacaggttgcaaatcccaaatgcagcagtgggttctgagttgtaggtgtgactcccacttgctggtgaataattcatgttggctgctaggtggcagcactccgaggtatctaaagggtagacctggacctgccacctatgagttgtgtgatatagaaaaaaatctcttagctctggttttcctgtctacttcatagggttggaataaggataaatgagggacaggttggatgccgttgcagagaaaatcagcaatgacataaagagatttctagaatagttgatggtccatttatttcaaatagtagctggtgtaacaaattctaaaatgtgtttttcatctggagttgcacagaatcatggaattttgtgttgagtgacataataggtatggaaatatgaggggaaatagacattgcaaatgtgaagcatggtggttatttgttaagaatgagaactcctctgactctaaatatttgggcctgtgggctggggaaggctggagccatctgccttgttctggagatcatctgggttctatcagtccttctcaagtactgtgctcacccagaaaagcagtgtgaagtgaatttggactcatttggagtgagatggagggaatccccccactcagtgttatgagtctccaaccccagtttaagctatttccatggcagtttagggtcacaggtttgatcccggtgtgcccagccagtggtattaatggatggcattatgtttggaggcagcagcatagaggactgttgtttatagagaaaagatttgggaaggactgtttacaatgtgggtcagcctgaagcctgggcactttcttctgtgaccttggggttgtgtattatatgaatgatgctgtttttaagtaaaccattcaacagcaattaaataattccttcattcacggctaaagtcagatctggaggcctttcttattattgatccttctatcagggaaggttctgctttgcctccttcctccctggggatgttttggagaaaatgcttcccttgcaaaggcccacacacatccttgcccaggaaaccttgtcccctcccctctcccaaagggggtcttggttgctgtccatggtgctggcatccagaccagccttgggatgtaggaacaaaagctggactgcggttcaagtaatttcaaagtgtggaagtatataacttccaatttttgagggagtagagtggatagggaactgagactgaaccctccgtctgctcagtaggaaactgtttccccagagagagaaccctctatatcccccatcttgggagacagaaaggccagactttactgatttgccattctcagaagagctggtggggaccaaatgggggattgcaaatcagagtgactactaatatctataccagcagatagggctcaggtagataggacacatgtggagcttcctgtgccaagcctgagctgtcctctgtgatggctctgcagggaaggttagacataccaaagaaaatagacatactcacacacaaacacactgtatccatttacactctgggtcctaaaatgaggccaagtgggacactttcccctctccttcagcactaatggaagtcttggtatgggagttggggccagcaatcagtatggtctcctcttcttcctttttccaacttaaaaagatcattgtccaggaaagggtcatgggaactgctgccctcttcaagtgggcattcctacttgcccagtggaaaatagggagtacggatgggcagaattctcatcactgattccagggtaaagggtctgacaagctgggctttattctccctcaaagatcaaatctgctgaaaatttggtcatttaggttcaaattgagttcagtgatagaggaataggggtggagactgagtatacagtagggaaggagttgagaagggcagaaaatgcacagaaaccttgatctttgtacgaggctttgggtctgccctgcccctctgtagatcttgcataattagatgcccctgcaaaaggcctggtggctactggagtttctgcggtcagggagccatgtctaggccaggaggccaaggtgtggaggaggaagaagtgtgaagtgaaatctccatctacacccagctaattggaatagggtgagcggtaggggaaggggggcaagtcctgacatgggaagggtaatctgggatgcagaaggaactgtgcagtgtgctgagagatttatttggatggaagatgagttaatctgtatacatcacaagaggagagctgtgcccagcctctggggggccagagaatgctgacttagggaaacagtctccctctgcccaccgcccttatcctgcctcagtgccccagggcttctggccacccccacactcagctttcattctgtctgtctgattccacttctctgcttgtatcccttcctctgaaggaaattatcttggaacaacttttccagagagggcaaagtgaccaatctaggacttccttcaatcctggcagtccaaaagcactttccttaccagagtcagcaacctctgcccatgtctgcaaatccctagctccgggcccattttacagcttagcccctgccgttacttttcaccccccacccccttaatctcttacaggaagccagactagacttggatgttcccactacagacagaaacatgtctgggtttgtgttacaaactactcttccaggcgtccagacctcccattgttatgggggtcacccccaggacctgagaaaccaaggtgggagatgggagggttagagtcttgcctccaggtcttgtaggaagtgggaatatgagagaaataagtcaaaatcaagaatggaatatttgatttattctaaaatttgtgaatatttaaaaattttcaatataaaaagccagaggcctgggcagggacaggcccaaagatgtctctgcctgagaactaagtgatggggcaaacccacttaatagtggccagagagcaaaggagagttataagaaaccgtaaaccaggctagggcagattcaccttcctaggggcaagacaaagaaggaagggggtagacagagcctactaagtaagctgcttatcccttctgccacatggttcagattcaatctaagaatgtgtatggtgacacctagtcagagacaggccctggcaggggacataaaaaacaaataaggcttcacccttcctctcaaagagcttacatgcaaagacgaaggaccaaccaggtacagaccagatgcacagttactgagcttatgctttgataaatgcttagccagcagcatcaatgaacactatgaaagcccaaaaagagaggcagttgaatctttcctcaggccatccagcattattagttaaaatctgatttcatccttgggggatgcatacatgatcagaagggccaagcaagcagagagaccatggttttctcacctggcttcctgagtcaggccaagtgcatacttcacacattggtcagggccgcctcacacttcactatggtggttctatccagtttggtcagataggcattaggggaagatgtataccttggtcttgtgcctacaaaaaatcttatccctatgatgaatgaaagggtgatgatgacagtctctttccatgggactatctgtccaaaaactgtaggttgatgctcctttcaggtaccaggacagtccgggtcttgggtctaactggggccgcacctggctcaggctgcacctcaaaatgtgttaggatctggaaagggaagaaggtgagcattactatgaaagatatctataatggggggattcattggtaatccaattggtaaagggcatgcattattagtgttagaatggtcaatgattgggtggcacctgtggccagtaggggacttcttggttaataagggtgagggattatggtagggaaaaaatagtttgaataccctcacttacactccaggcctataatgggcttatcatatttcagaagattcattctaccaggtcttatatgatttcctatgcttgtcaggggaaagagctcacaactttagagggttagggtctctccagtctggggaaggtataaaatctagagcactcacctgggccaaagccatttgcaattcaagctctgccaggcgtctccccatacagctgcgcttgccaaagccaaagggaagagatgcaaatgggtggggggtgggaccctcccccagccagcgagctggacgaaaagaatttggctctgggaactgggcagggtcccttgaagtggcatagtgacacagagtgaccagcgtctggtgcaaaggaaaacaaacttgtcagtttgggctcagaatagggcaggcatgaagaagaggatattcagacagggacaaaggcaggtcctggtgggtgatggggaagttttctggggctacttttggaaggatctccccactgttccattacatcctagaaaggcatatcctagagaggggtcaaggggagtgtttgaagggcttttaggagagtgtttgagaacagggttggggcccaagatagtgaggaatggctcagtagaaagggtgcataggctttactcacatttttggggataatatagtcacccacatgaatgtctttgtctgggacacgagaatttccaggtaccacagggtacagtctaggttgcaaagcacaaaatggagacaacaagatgaggctaggggctgcagcccccttctcattgtttccaacttccaaaccctttttggccaggagtagagggccatttttctctgctatctccctgcttccatccactagttgcttccccagcccttccttggcatttcctcttgttcctcctctccttccccctcaccttagcacttccttgaccaccgccttcagcaggggcagctgggacagaacagtggctgaggggtaggcactggagccagggctcagggcagctgtgatctctgagtggagtgctgtctggacttcggggtgccgggagagctcatacagagcccaagagagcgtgttggacacctgaaaaacatgtgaaagcaagagaggtgttgggtgtgagaacccagcagagggtgcagattatggaagagtctggggctacagggtgctaagccaagctggtctacgtggccataatggatcccctgcaacagaaaaatggagccggagtctgcggaggctaagccctggaaccggctcacagcacggagggagaacctcaccgtgtccactcccgccaatagcaactctgtcacatttcccaggatggactgggcaggcaactcttcccggaacaggaagtgggtcaggtgcgccccagactccaggtccttctcgggctgtcctccgttcctcatggctgcctctgcctctcgccgctccacgtgcctctgagctgcgtgggtagaaggcacgtgaatacctcgctacccctggacagctttacattcccccatttccacctcgacctgtgccttaccaaatgcaaacatctggtcccagtctcggcagaggcggccccagggcccaggcacaaggtggcgcagccagtggggcatcgccatggtcaacagcgtggacacaaacaccgagcccacagcgcggatgaaggtctccgtgtcgggtggcacttgagcctccaggcagcccaagcgcgagccgagcagaaccgcggcgatgccttgtcgggagggggcgccgtcagggttccgggaggctctggtagggcgcccccgacgcctgcccagctctgtcctgggactcaccttccagtccgaacttgtaaaattcccccgccacgtcccgaaccagggcgggcggccccgtgccacgtccccgctggcgcctcagacgccgcacaaggtcgcagactacgttgttcagggttccggcgtagcgggcggccgcttgaggccggaggaggagcggggccaggagactgcggagcctttgccattcttcgccttccctgcagggttgaggagagagtgcgcatcgggaaggtggggacggctcgacgggactggctgcagtgaaggagcgcgttcggctgcggtggccaggagagggattgcgtctgcccccttggggtacggaaacctgcaccggcctgcgcctgtcttccagcccccttcctctttactcatttcctgccctcaggggccggggttcccgggtaacttgagtcacagaaccttacattcattccatccagatccttgtaccctagcccaattcctccggttcccccagttcccaggattcgggcctcaaaggataaggaggtaggcggggagtgaggttggggctcaacctgagtgtgggtgaagcagactgggatgggaaccccaagatgcccaatggtagagtgggacagccgacctcccaccatgcccccagattgatagtttcgggacccgcagcaggagagggccgctgcagggcgtctgggcttctgggggcagagaagactcacgcagtgagcagtccgcaagcccgctggcggcagcggcggtgctccgtccagggcgagaagctgcagcgctcgggccggggtccctcctgtcgcagcagctcctcgacgagtgcaggggcagccacgtacacggtgcgcactgtcccaaagctggctagccacaccggcccgaagtgcgcggcgccctgcacctgggggagcggacacagcggacacttggatacctgggcggggactttcagcttgacctgtgcccacgccaagggcgttgactgggcttgggaatagggagcttctgctctttctcgggtgcccaactagtgtatgcctttgatactgcaaactcctcctctctcatttcccatccctagaaagtttgagtgtgatgggcaaaaccggaactttgt

SEQ ID NO: 98157 - DNA, 46899 bp, Homo sapiens
ctgtgcctgtacttccagtctcaccttttttgggcacttgctgccaccgatagtcccagttttgctgtgtggcagcctggcgtgaagcttccatgccttcccggctggaaaagcgtcggatatcccagagtttgatggtctggtctttagagttggagatcagataccgggcatcaccctatgaatccaaaggtggatagtgaagcatcagagcttgcaaatgtcggcgcctgtcagtctagttcccgttctctagttgagcagaagaactctggcctctggctttacttgcctctcttcatccaggtgaactcatttccagcgttctgcctcagatcctaccacctggctaggttttcctttccttgcccaggctactggccggctttcctattctagccttaatcagattgtcttccatttttctttttttaatttttaattaactaatttttttttgagatggagtcttgctctgtcacccaggctggagtgtagtggggtgatctcggctcactgcaagctccgcctcccgggttcacgccattctcctgcctcagcctcttgagtagatgggactacaggcgactgccaccacacccagctaatttttttgtatgtttagtagagacggggtttcaccatgttagccaggatggtctcgatctcctgacctcgtgatctgcccgcctcggcctcccaaagtgctgggattacaggcatgagccacggcatctggccttagttttttttttttgtttttttttttaaataaatagagatgaggtctcgctaggtttcacaggctggtctggaacgcctgagctcaagtgatcctcccacctcagcctcccaaagtgctaggattacaggtgtgagccgctgtacctgaccggtcttccatttttcttgtacggaaagccctgccctgctccttgaggactggtgagtacagatggaattcatgttccctggcttgagccccttccctaaactccaactcttacaaaccttggttaataaggagcttgtcaaattcccacaccagtccgctttcatgccctcctgggcaactagaaccttagcggcctggctgtacagtcctgacttctggcccaccttgctgtcaatgaaggtgatgccatcctggtgtccagccagtgcacccacaggcttggggtcatcctcccgcatggtgcgtcgatcccacactttgcagatggcatcatctcccccagagaacaggatttgggagcttatatcagcaaaggccactgcattcacatcatcctcatgggactcaatctaggcgaaaaggaggccaggatataagacctctttctaggtcttataaaaagccaaaaaccaggaggcagaggctctatctcaggagccatacctgaagggtgcgccggttctgttctcggtcaaagacatacaggcagccatcattggccctgaaagggaagggataaaggagggtcctggagccatgatcgagaggaccaacgtggtatatgctctagagagttccactgagaaatcctgctctgggtcaagccctttgctctttttatacaggaagtgggggaagagttagctgtgtttcaaggaggcttgacacctccaatctcgtgctggggaaatggagagcaaggggtgaagcaacttgtaaatcctgaccttgggagaaggtctggttgttctctgcagctgccagtgccatctgtgtaacagcagaactcatctctggcagaacccccatcttgttattgagggaaacataccccacaagcacttaccctcctagtacttctcgtccatctgaggagacagcaatggagaagacagcaaagcgacgctcatctggcctaaaagcaagaaggagctgggttaagtggacttccttcagcttttgttaatctacataaaatctgacaacggttgtaaggcacatccccaggggaaaaaagaagtctggctaacatgcaccataatgcagatgctcagtgagaacccagaaatcatcctgcaaccatctattttacccagtcctctggctgacaagatggtgcttccctcccaggaatgcacacagacccaccagtatactttttcccctaaacagaacttccaactcaagaggtttgctcccaaagagcttcccttgagaagtttctgatgagtctgaccagaaagggaagccagtacctgagatccagggcagtgtgtgtatctccctcaccatagatattgcagatatgaactaagagaagcaagaaaaacaagaatctttcagggatgggggaagaagagtggaagtgaagctagggaagagatcaaacaggggacaagggtactggagcactttgggagtgattttcccaggacaaagtgagggatcctggctcagaggggacaggcacatggaaacctcaggtcccaggctggagagtcagtggaagcctggtgcatactcactgtaatcagaccagctagagtagaggaagtggttcccatcaggggtgaaggccacatccaagacgctccagcctacgtcgcgggccttgatgctcttgaatttacggaaacggccatatcggcagtcatagagtcggattgtctggtctgtgtaagtaaagatcaggcagaattatgggacagtttccttgtaacttttctagattagacatctcccactcagtgtacctgtggagtcttccctttatcatgggaaacatggtctggctaagcatccttaagccaggtctgagctccccgtctgtggctttctagcctcagtcagggggaatgtcccatgttccaggaaaagatagtttataggaccagggtctggtaccttggcaagcagacatgaatatttgaccatctttgctgtagatgccacagaaagccttctgagagtagctatcagtgaagcccagatcattgggcaagaagctagggaaggagagagaaagtgagggtgaggggtgctcaggataaggagtgtcccaatcagcagaatcctaacagagctggaatatcagaacagtcattcttcccttttggctgtgagtgcaatcccgtctttcaaccattccaccatcctctaaatttctacaattttctacacttttctactttgtttactctcaaagtttcaaccccatttaacctaacctttaatatctctgaggctcctttaacacctaccccttcaaagtttaggagataagacctatctggcccttagagtctcttcaccaagccccatactcactgagatatcactcgagactgttctccaagggagaagcttccccgatggcagaggccccgttctctctaaatggaagggattggggaatattgctagcagaaatagagggccacttcagccatatcaagccccctcctccaaagatattgctcttgttatagaaatggacacacacatcatagtctgtcccacagaactccgatggaggctggttaactctccagccccagcgcttgaggcttctactttggaaagttgacttcctttttctctggggctggcagagcttctggctgctttggcaggcctgctgccaggctgggaggtggagaggcctacctggtgcaacattcgaggaaagctgtgcttctgggcggcccgcctaagccccagctgccctgtggccagttccacttgtgtcttgatctcattgaattccagctcccgggtgtcaggggtagcatccactgtgagtaccaaggagaagtttcatcctaggtctgccagcctcagaggacagttagcagaactgtacccaagcccacccctgtggctgaatatactggggctgtaaggactccttattccttaaattatcgtaccttctttcaatgtaacctatcattcaaaatatcactaaaaggttttctagtaaaagtcttccaacattaggggcttttcctcttaccaggtgggttgtatcgatccccaagacgaccatcccaagctctgtcattctcttcctctgagtccaagagggcctgaatgaattgtaaatttgctgcacctcctccctgcaccaacctcacttggcctctgtggagagacccccattataaaggaggggacttcttcccccaaaccaaccaaattcagagtcaatggctatctagctcttagaccacttggtactcattttgaggtttgaggctgactagaccttggctgttatttttggtctcctataaaacacagtaggaaagagagttttactcttacagcaagagcaagaccaacatgctgtggacgtgacctactaagttgacctcccagcgagctaaacattctaacatcatttccttagaacaagagcaagaccaatacgctgtggacatgacctactaagttgacctcccaacaagctaaacatcctcacagcatttccttctgagcctctgcctgagaagtccaccacagaagacaatattctaagctgggtgcggtggtgtgtgcaactgtagtcttagctacctgggaggcaaggattgcttgagcccaggagttgcaggctgtggtgtgcacttgatcacacctgtgaatagcccgttctccagactggggaacacagtgagccctgtctatgtctactaaaaacaacacaaaacacaaacaaaaaagaatacaatattctgaagggacccccaaacccatcttctcctcaaagagccataagcaaagaaagaaagccagctgcacccttttccagtcaattccaggtggtctctcccttcaaggcattctttcctcaagaacaggttagagtcagggcaaattaaacttgtttttcaagtaaatcgaagtggcctcatatcatgtgtcaactgccttactaaaaagttcaacactcccttcccatctcttcaccccttacatcactcctttcccactaggaccccccccttttttttttcaagcttacttggaaaatagactatatttgtgtagtcacagagacaggctcccttgaatagcccctcaaacacatgagcaggtcctcttggtgaccctccctaggtaagaaccactcttactgggtatggagctgagtgccatgggtgcccagcagggaaaggctgttcagctcaaacagaacagctgtcctgagcgaatcccatttcctaacctctgtaattttcctgcctggagttgggatcaaggcactgtggtagcacctgctgggggtcacaccagagggtaagttacctgcggaggagataggccagtacctgggccagatccacatcttcatcctcttcttcctcttcctcactccgacgcaggccagcccctcttcggggcaagccctcggaggggtctccggacccggatcctgcactgctgctgttccgcgatcccatcttctggtcacagcattcttaggtcctgtgcgggggctcctcctgtcacctccttgggtttggtgaaagcaaagcgtgctctagaaataccagggtctcctgagacggggtagtagctatctctaggagggtgacccttcctcggggctgagatcccttttctttagcctatgccaactaccaaggcgtcgggaacacaaaccttctccaatcctgtgaagcaaagaaagcaagagtgaaccgtagtgcgctaccctagctcaccaactgaagaaagatttgttttctacaccaaactcacctatcgaagtccccggactggggagcgggaggggtgttgggcggtgttggatttccaggtaacctctctgaccgaccaatcgaaatccctctcggaagaaagcgcttcactagcttatctcatctaaccaattagaagccttaggactcaaagaccctcgacgcccccaccttatcgaccaatcagagcgcccccttacaaaggccggcagcagtgacagccaatgaaaatagaatttggcctaacacccctccttcctcgcctcacgcccacgtggtgcgccgggggtgtgtacgccatgagggggaggaagccgagaagcacctcccactgaagccggcggtaaccgccccacgcgagaccacccaccagccaggagcggtcgcaggacccgcagcggcgcgaggccttgtttacaccgactgccgccactgcgttggccaaccgctcctccgtcacgcgcttcgctcgtcacgcatctcgcggcttcctggccggcgggctgcaaacgtcacacgacggccccgcccccttggccagccaactggacagcggagcacgatgattgataggtaggcgggagaatgcgcgaggtgcctgaggggaggagaaagtgcacacccaaggagggctgttagctcttgctggggaggagtwagtgggaactgccagcttcctgaatcagagacagccgaactaggcgtaacggctgagaggcggggcttaaaaaagaaacgtttggtggttcgctaccgagaggtattttagcaagggatataatttactgtctgtccctaaagatcatttggcatcgcacttttcagacagtgcccaagggcctcctttctccccactgcttcccctgtccagctggagccgttcttctgtcgctggccgcagctccagtcggttctgccctaaggggtgcccagcgtcccagtagacctccataccgtccttccgggcttagcttttggaagccttgctcttgggacggtccccttttagacctccctttatccggtctgacaattttttwagacaatccctggctttccgccgcggtctttgcagacgttccctaatacacgcgtctttctgtcaaagcttttccggttccgctgtcccctttgacgctcccttggccctccgggatttgcagaccttcgctagtccctctgtcctcgcggtgcctctccgcccccggccgcgggtccagggtgcgcgctcgccgcctcctgccccctcctgccccctcctgcgggtttatgagtaacaagcctgagtccaaggccgggagttgccacatctctgatcctcgccctggctgggtggggacgtgtgggttgaatgaccttgctgtctcgggctcagaggctcagggtccgagctgaacttcattccctgcagcctgcacttccttgggaaagctgcgagcttccctccgcccgctcctgagggcagggatgggagcgagggctcgtggccttcttgggccctcctggggcctctcccagtgagggcgagggtttggccagctttcgggcgacgtctcctagtctctagatccggagacctgagcttgtcaccagggctagctttgatggcctctgcgcttagaagggtcctgaatgtttggtttaatgttctagtgttaacggtcttgaaattattagtaattttaaagcaagtgcctggtattttcatcttgcactcggctccactgattatgtaggcggtctgctgggcgcccatcctctattgccagattacttactatctgtgctttaacgtttattgagactttaggattccgtggtttctgggttatccagcctggaaaatcgggatctttatttattgattgattttacctgcgttctcccagaatgtgacggaatcattttttttttttattatactctaagttttagggtacatgtgcacattgtgcaggttagttacatatgtatacatgtgccatgctggtgcgctgcaccactaacgtgtcatctagcattaggtatatctcccaatgctatccctcccccctcccccgaccccaccacagtccccagagtgtgatattccccttcctgtgtccatgtgatctcattgttcaattcccacctatgagtgagaatatgcggtgtttggttttttgttcttgcgatagtttactgagaatgatggtttccaatttcatccatgtccctacaaaggacatgaactcatcattttttatggctgcatagtattccatggtgtatatgtgccacattttcttaatccagtctatcattgttggacatttgggttggttccaagtctttgctattgtgaatagtgccgcaataaacatacgtgtgcatgtgtctttatagcagcatgatttatagtcctttgggtatatacccagtaatgggatggctgggtcaaatggtatttctagttctagatccctgaggaatcgccacactgacttccacaatggttgaactagtttacagtcccaccaacagtgtaaaagtgttcctatttctccacatcctctccagcacctgttgtttcctgactttttaatgattgccattctaactggtgtgagatgatatctcatagtggttttgatttgcatttctctgatggccagtgatgatgagcatttcttcatgtgttttttggctgcataaatgtctgcttttgagaagtgtctgttcatgtccttcgcccactttttgatggggttgtttgtttttttcttgtaaatttgtttgagttcattgtagattctggatattagccctttgtcagatgagtaggttgcgaaaattttctcccatgttgtaggttgcctgttcactctgatggtagtttcttttgctgtgcagaagctctttagtttaattagatcccatttgtcatcctccctaactcattttatgaggccagcatcattctgataccaaagccgggcagagacacaaccaaaaaagagaattttagaccaatatccttgatgaacattgatgcaaaaatcctcaataaaatactggcaaaccgaatccagcagcacatcaaaaagcttatcgaccatgatcaagtgggcttcatccctgggatgcaaggctggttcaatatacgcaaatcaataaatgtaatccagcatataaacagagccaaagacaaaaaccacatgattatctcaatagatgcagaaaaagcctttgacaaaattcaacaacccttcatgctaaaaactctcaataaattaggtattgatgggacgtatttcaaaataataagagctatctatgacaaacccacagccaatatcatactgaatgggcaaaaactggaagcattccctttgaaaactggcacaagacagggatgccctctctcaccgctcctattcaacatagtgttggaagttctggccagggcaatcaggcaggagaaggaaataaagggtattcaattaggaaaagaggaagtcaaattgtccctgtttgcagacgacatgattgtttatctagaaaaccccatcgtctcagcccaaaatctccttaagctgataagcaacttcagcaaagtctcaggacggaatcattttttaaaaaaattggccgggcgcggtggctcacgcctgtaatcccagcactttgggaggccaaggcgggtggatcacctgaggtcaggagttcgagaccagcctggccaacatggtgaaaccccgtcactaaaaaaaaaaaagccgagtgtggtggcatgcgcttgtaatcccagccactcgagaggctgaggcaagagaatcgcttgaacccgggaggtggaggttgcattgagccgagatcacgccactgcactccagcctgggctacaaaagcgaaactccgtcacacacacacaaaaaacaatcaaccaaccaaacaaaaaacacctatgcctcttccggtagttgatctgctgaagaatcctcctctaacagcatttagtgcttaacgcacaagtgagctgggcacggtggcttacgactgtaattccagcactgtgggaggccgaggaggaggatcatttgtggccaggagttcaaggccagcctgggcaacatagtgagacccagtctacaaaaagaaaaaaaaaatagccggccatcgtggcgcgtgcctatggtcccaacttacttgggaaggatgaaggagggaatcttgagcctatgaggtggaggctgcagtgagccatgattgctccactgtactccagcctggggatagagctaaagactgtctctaaaagaaaatcaacaaatggctcactattgttcattgtttcaaatacaaacttccaaacctggatgtctatttttagtaacctcattttttgatatttctgctaagcaaatatgccaataaatagcttgtttatttttacctctgcaccttcccaggagaatttcttattagagggaagctgtctacaaaactcccttcctcacagccttgcactttgacccagtaatactgcttccagaaatctaggcyggacatgcataaaaatktatgttctacatagcaattattgataaaagtggaacactggaaacaaagatctaaatatcttgcaatatgggattgttaaataaattatggtccatgtagtatagacacagaaataccaggtagctattaaaatggtgttgtagtcttcaatttttttttaaggtacctattcctggtataggtttgttgtagccttctatktttataccataggaaattgtgcaaactacattgtcaagttaaaaaaataaagataatcatttcttctggtgacatgtaatagatgcaaaaacgatgtggtttcattttttcattagaaagtataataggcgtggtagctcacacctgtaatcccagtactttgagaggctgaggcgggcagctcgcttgaccacaggaatttgagatcagccygggcaatgtgacgaaaccccatctctacgaaaaatacaaaaacaaaattgagctgggcctgtagtcttggctacccaggatgctgaggtggaaggatcacctgagtctggtcaaggctgcagtgagccatgattgcgccactgcacttcatccagcctgggcgagaatgagaccccgtctcaaagaaaaaaaaaaaaagtataataatacccagctcattacatcattaaacaaagtggggagggcttgcatgaactggtgacaaaggtgtagcttctacaaaggattatgatgaatacagctatagcacctgaggtccagaaaaacgaacaaaaaacttctgttaaacttatctccttaacaattcattttttgattctcttttctcttcttcttacaaattagtttaaacctgaataaaatcttttaattcaagcttttgtaatatggaacttgtacattattgagtaaaacatttaaaagtcatggtaaatgttaaaataactgaggttttatgacaaaattgagtccttcacatcacatgggaaagaatataagattaatcactggattcattgattaatttttttgcgtataaaagattttttttttttttttttgagatggagtcttgctctgtcacccaggctggagtgcagtggaccgatctcggctcactgcaagctccgcctcccgggttcatgctattctcctgcctcagcctcccgagtacctgggactacaggcgcccgccaccatgcccggctaattttttgtatttttcttagtagagacggggtttcaccatgttagccaggatggtctcgatctcctgacctcatgatctgaccacctaggcctcccaaagtgctgggattacaggtgtgagccaccacgcctggcagcatataaaagatttttaagcctatgaacttgattatctcactatgacctgtaatgtttttcaaaatgtgtaagagcatttatatcttagggtatacagtgtgtctattgaaataaataaaatggcatatctttaaaaataattatggtgaagtcattttgatagactaaattttgcctatgctgtcttgattttgaaatttggtacgttgcgtggttacagtttgtgaagcacttttcatttgggtaacctctactctctccagttgcacttaaagtcacttaaagccacagagaggtttttctaccttcagcacccattttaggacaatttctggtaattgctaagtaaatgtcagctagttgacttcctgcctgacctgtcttggcctgtttcctgctcattagcatctccactagagggcaggctgggctgctgaggagagaaggaaaggagtgttttcattctctagctaaccctgtcctcctctcctctactgcagctcccagcttggtgaccacacagagctcctgggacagttccgtgtttggagtgactgatgctcatacatgtgtttgaacattgccttatagtattctctgtgtcratggaaatggagagtgtgctaataatttacctagggacttaaaatgtgttgactagaaagccactaagtaactatgggatgttctaatactctcatgtcttgtgtctgtaagaatcagatttttctgtgtgtagggtaggagctatagatgtaatataagtaaataccctttagtggcccggggtagtggctcacacctgtaatcccagcactttgagaggctgaggcaggtggattgcttgaaaccaggagttcaagaccagcctgggcaacatagtgagaccccatctctaaaaaaaaaaaaaaaattagccaggtgtggtggcttacacctgtagctactcgggaggctgaggcaagaggatcatttgagcccaggaattcaaggctgcagtgagctgtgatcaygctactgcattacagcctgggcaacaaagcaagaccatgtttccagaaaaccctttagccctgattttgaatagaacatgtcagtatgagttcatgaggttttatcttctgtcgctatccaccaaaaagatmtagaaacaatgaccaatccagtatcaatgaacactcctagcatccagattgtggtcttaaaacgccatttccccctgaaagaagccagagcttcttagagaaaaagctgattccaggtttggggaaggaaatgaacacaatgagcatggagcaacttataccagatagccgggaagcaaggagtatgtatcatgtcaaaaggactcagctstttttggcctagcttccatagccaaatgtgggacaatttgaacatttaataaggtcaatttaataaacactaagtatgtytaaatccatgagttcataatgtttgtgtgtaactaactggttaccttttcraaggataataggaaatcaaatcatttttttgaagatgataaataaagataaagaattaagcagttatcctgctgtttctatataaacaataccatagggtaatgaaatagaagtgtccattttataaaattattgcaatgttatgacaactcaaatatggctgttttgcaatccctagtgagttaatgcatttagacactgaacatctgagtctggattcgtcaatgggtaaattgaaggaaaagaaaggaatggagggggaatctgtagactgatagagacttgaaagacatatgaaaaaaattttaaatgggagcaaagctaaactatagtgtctaaggatctacatttaggtgatcaaactataaaaaaatgcaaagaagtaattattactcaccatagtatccactatggcaggaaggggtggctatgatagagatgggcaacagggtcggggcggggcggggctgggttggtgtctgcaaagttctgtttctttccctgggtagtgttccaaaggtgttcactttatgatagtttattcagccataactttgttttagatggtcttctgtatctgtgttttattttaaaataaaaagattataatgtgttaactatattttatcagttatctggagctgaagggcatgcagccccattttattctaattaataaaaataatttttaaggctaacactttcttgtccctgtgcatttagaagataccagaaaggtgcctggaaccccagttccctgcctcttagctggagggatttatttttaaatctattttctttctctcctagattttatttacattgctcatgttccttttaaactgtagagtcagcaatatgtaatatacgcttacagggcctactctaatcattataaagtggaaaggtgatgatagctaacatgtattaaatggttattcggtgccaggcatagttctgagtgctttattccactgactcttttaatcttcccaacaagactgtaaagtgtaggcatttccattttacagatgaagcaactgagaggcacctctggctcaagtctactatgtgtttaatacctgtgctatgttgcttttgacggtattcagttatcatatgctatttatgaagctaaggatttggctgtgttttattattatttttaaatttttaaatttatttatttatttattttttttttgagacagagtctcactctgtcgcctaggctggagtgcagtggtgtgatctcagctcactgcaacctcagcctcccagtttcaagtgattctcccgcctcagcttcctgagtagctggaattacaggcatgggccaccatgcctggctaatttttgtatttttagtagagatggggtttcaccatgttggtctagctggtctcaaactgctgacctcaggtgatctgcccacctcggcctcccaaagtgtgagccaccgcgcctggctggctgtgttttaaagtacaatatactccactgctaactttgttctaacctctgttccactctgacctttagatttttacacattctggctggtcactggcatttcctatgagaacacttggtgtttcctcttctagttttttcctttgagggagttcccaataattccattttatttgttgaagtttgttccctttttctgggtaaagactaccacactacccaccttaggttatacattctctcagcctgatccagattgcacagaagttatcctaagctgatgcccctgactcatgtgagatcattgcactgttttcctgattactctccaaagtttatttcagatgaatttaggctactctaaactgtagttcgcagaccggcagcatcagcattacccaggagcttgtaaggaaaacaaaatcttgaggctactacagacttgctgagtgacaatctgcattttaacaagatctccaggtgattcaaaggcacttttaagtttgagaaacacggaataggtgactttttatttttttatttttttgagacagagtcttgctctgtcccccaggctggagtgcaatggcatgatctaggcttactgcaacctctgcctcctgagttcaagtgattgtcctaaatagctgggattacaggcacctgccatcatgcccagctaatttttgtatttttgtagagaaggggtttcaccgtgttggccacgctggtcttgaactcccaacctcaggtgatccgccctccttggcctcccaaagtgctgggattataggcatgagccactgcgcccggtggaataggtgacttctaaggtccttgcagttgtagatgtctatactactatgaaagacatgtctttgcagttttatcactttaacccttagctctattgtttactaactgtgaagctttggacaaattacttgacctctctgtgcctttgttacttcatctgtaaaatggtaattcccccaaagggttgttaggtatgtgcttagaacactgccttgttgggaataggcccccaaaatctggccataaactggccccaaaactggccataagcaaaatctctgcagcactgtgacatgtttgtgatggccatgacacccacactggaaggttgtgggttcaccggaatgagggcaaggaacacatggcccaccctgggcagaaaaccgcttaaaggtattcttaaaccataaacaatagcatgagcgatctgtgccttaaggacatgctcctgctgcagataaccagccagagcccatctcttcattttggcccatccctttgtttcccgtaaggaatacttttagttaatctataaaaacaatgcttatcactgacttgctgtcaataaacacgtgggtaaatctctgttcgaggctgtcagctctgaaggctgtgagacccctgatttcccactccacacctctatatttctgtgtgcgtgtttttaattcctctagcactgctgggttagggtctccttgacagagctggtctcagcagtgcctggcataaagaaggtgccacagaagtgttgttagctgtcctaatattgaatatgcttccatgaatactatgcagctcccagtgccaggtcaggcagggggaagaacaaattcgagaactgacaatgaagccacttcactggagaatggagttgtagaggcttctgcaatctaagtgggagatcaggaattttaggcttgggggctgtactgagcagcttgctgaggccctcagttttttttttgttttgttttgttttgttttttttttttgtgacggagtttcgctctgttgcccagactggagtgtgcagtggcacgaccttggtttactgcaacctctgcctcctgggttcacaccattctcctgcctcagcttcccaaatagctaggactacaggcgcccgccaccactcccggttaattttttttttttttttgtatttttagtagcgatagggtttcaccgtgttagcccggatggtctcaatcccctgacctcgtgatctgtgcgcctcagcctcccaaagtgctgggattacaggcgtgaaccaccacacccagcctcaccatttttttttttttaagaactcaggacatagagtggatagtgccttctcccagcaattcctatgtctgtgacccagtgctagagctacctgtaaaacagatctttgattgtgccaggctgtgcttcttctaggggctggaagaagatgattgtgagacaggtgttagagggaagcctgtgaagataggtgggaaatgaaaacagcacaaatcttgtgtaaaatagataagcatctcttattattggacagtctttgtgggaaggtctatggcacattgaagatgttagttaatatcaaattgctcatattttctgcaaggtgccttccctattcccagatgagggtgctatgtcctcttgctagactagggcctcaggtcacattttgtgcacacgtctctccagggcctcaagctcagccaacacctctttgggcagatcctggttgacctgctctgtcaggtagctccgaatgtcacgaacctcctgttcccagaagtccttggggagggagaacagctgagtggtgtctatagctctgaggcygctgagatccaaggctccttcctttggcaccagcccaatgggtgtctctcgggcactgtcctccccctctaaccgccggcagatccagtctagcacccgagcattctccccaaagcctggccacaggaagtgccctgcctcgtcacgccggaaccagttgacatggaagatacggggcagctgggcccccttgygcccttccatgctcagccagtgttccaggtagtgcccgaagttgtagccaaaaaagggccgcatggcaaatgggtcgtgcatgatgatcttccctgggggggaagcaagatgggtaaggaatcttccttctcactggggtagggaagggcaccctgcatccagttggaggaagctgtgaaaggcttatggttctgaatatcttcagggatggggaaaagatagaagtgggaagaggtggggccatatcagactccaggggtggacaaaaggaaggtctggctcaggaagggagagaggacgtgctgtgtgcacacasaggagagggaggaatggtgagggtgctcacctttgtgttctgctgcagcagtggactcagagcgcatggskstgcccacaaacaccccatgacgccagttgaaggcctcgtataccaggggtacccctagatcaccaatgaacagagtcacaggcagcccttttctttggaccctaactccagcccttctggtgagcttgactggtactctctctcctaagacctcggctatcccattttcagaccctttgcctcctcccaagtttgcattcaccaggggagaactctggagaaaggtgagatccaggctgaggctctggatcagagggagggaggtaggccctaatacagagatagcccttttgccaagaacatggagctcatatgttgtttacctttgggtctgcggccaccaaagatgatggcgtcaatggggacaccctctggggcctcccaggctgggtccatgatggggcactggcgagccggggcacaaaatcgagagttgggatgtgcacagggctccttgtcacctggcagaggaaatacaaacactattatttccaaggtcatgtcgacccccracacacacatacatgggcacacattcttgcagggttctttttttttttttgcctcatcagctgcctagaaccttgtgtgataaggagcagagagaggggagccagggcatctccaagagctcaggttgtttagccatgaaggtgcggccagctgagctatgtgagawaagagtgggagaggaattggggtttggcagggcactaatgtttgtgccaagctactggcacttggcactgaccagggctcaagggaatggggttagatatgggcataaggttataataatttttcccccagaaactatttcattatttgtgagattattatttaaatgaatacccaaacctaaagcaaaaactgagaatgtcagcttagtacttcagacaattgactttccgtcagcaaaccggggaagacaggttctcctaagttatccaaatgcaaataggaatttattttatctttttatttttgaggcagagtcttgctctgttgcccaggctgtagtgcagtggtgcaatcttggcttactgcaacctccgcctcccaggttcaaacaattctcctacctcagcctccccagtagctgggattacaggcacccaccaccatgcctggctgatttttttgtatttttaatagagatggggtttcaccatgttggccaggctggtttcaaactcctgaccttaactgatctgcccaccttggcctcccaaagtagtaggattacaggcatgagccactgcgcctggcctgattttatttacttaattaatttagttatgagacggagtctcactctgtcaccaggctggagtgcagtggcatgatcttgtctcactgcaacctctgcctcctgggatcaagcaattttcctgcctcctgagtagctgggattacaggcatgagccaccatgcctggctaatttttgtattttattggagacggggttttgccatgttgccaggctggtctcgaactcctgacctcaggtgatccaactgcctcggcctcccaaagtgctgggattacagatgtgagtcactgtgccctgcaaggaattgattttaaagctaacaacatgttggtgatttccctgccctgcttagaccctgatgaagtgatagggctggaaaaatagagatagggatatcacatgggtagggataacctcaggagcccaggtcacacttggcaccttcaggtgtcctggaggggggttgggactaagtcagtggcacatgtatgaagcaccactgtgtgscccctgagtggacatggtgccttctctgctggaggttgctggtcagacctggggagtggggaagccacggggccaaaatccccaccctctcccatccgccagcttctgcccgccattgcagataagagccatccttcttcagcacccagtgcagaatcctaacacagggtattattctgggaattgaagctggggacaagatgccctagttatgcccccaaatctggagatgatgaaagggttggggaactagcctgtggggaaagatgaaagtttcttggatttctcagttgggtgggaaggctgaggggggcttaatgatggtgttagtaaaaataaagggtgattagatgaagcaaggagggtgactgctaggccagcctggcaaacctgaatataggcttcagtgactacaaggccagcctcccctcccatgctcttctttgcccctgcctcttggtgtctggactgcctgactgcagaaggccatggaaagaatactgaaggtccagagtgcagggctgagggagaggtgggactcccaggcgcccagggtaatgacaggattcagaaactagcttctgggaaagactcaagcactgacctgattttgtttgtaggaaggattggggtgaatgctttggagggacaggggaagggtgacggtaacaatactgacctttagacagtggttrttatacaggggacagtgggagccaagtggcaggaggagagttggagcagaggaggcagctttcctcttttcctaatgggccaaactttatggatagtgcttggagcccaataccttctgtaagaatgttcaaaagtccttccttttcctttcattaaaaaaaaatccagcctgtatttattattgagaatttactgtgtatttgtcagtgtgmtaaaccctttttatgcactatttaatcctccaacaatctcatgagataggtactatcacaactaccctcattcaactgatgtggaaactaaagcttagggaagttgagcaacttagccagatcacaaaaccagtgactggtggagttgggacatgaactgagattttgcctgggactggaaactgcaaacgttcatgacttctgtgcctcctggcagtcctagaagatggttggaggttgtggagaaagcttttccaccattaaggtgctgaggcctggaggctgtgccacaccttccccaccgcacataccaggyttccagggtttgcccagccaggaggtcacagtaacaccaggtggaagaggctggtcaatgccctcccagtacacgccaccatcactggtctcagccacattggtaaaaatagtgttactctggattgtagccatggcgttgggattggtggtggcagaggtaccaggggcaaccccaaagaagccgttctcagggttgatggcccggagtcgacctgttaggagaagtgaaagaaaggaargaccaaacaaggaaaacttgagatgtaagaccaaagaaggtcctgcwccacccacccctgtcctgagatggacccaagatctgatgaggaaaggctgtctctcgggtggctgggctgccagaggaatggagcagggttgggtgttcaggaaactttctcactgacaaagtcattgtgaacactagagaggagaccccgaggctctgacaagagccagaaccaagagtatgatctgagagtccctcaccttcactgtcaaacctcatccaagcaatatcatcccccacacactccactttccagcctggcagtgcaggccgcatcatagccaggttggtcttgccacaggcactagggaaggcggctgccacatagcgcttcttccctgcagggctggtgatgcccaggatctgtgcattggggagagagggaataagaaagaggtcaccaaaagtcagggcatggtctgcatggggaagggcagctagggtctaatagggaggaccaatgtttattaactatataagtgattgccctgccatcaggcctgggttagtggcaggggaaacctcaacattcagcagcctgaggccaaagctttgggccttcaagtagagtccccgcccaccagcctggcacctggcaggagggaggtgaggctgaggcagactggccaggccccacccctgccckgtccccggcagctgccctgcttctcaccaggccctcaccagcatgtgctctgccagccagccctcatcccgggccagccgagaggcgatgcgtagggcaaagcacttcttgcccagcagggagttgccaccatagccgctgccgaaggagatgatctcccgctggtcgggcacgtggccaatcagggttttctctgggttgcacggccactggctcactggctcccctggggacaatggggtcatggggctgctggcagcagcatcaggaactggggtgtcggggccagagggatcagggattggcaggagagacacttgggagcagtagcagcaccaagaggtggctgaagccccccacctcataataaccatcagcttccatgcccctattcttggacacggatttttctcaacctagtgcaaagtgctctgcaaacacagccttatccctctgctgggactgctgctctggatcttgggaattaggttgccagagaggacaggttcttagggtctgtggagaggtaggatttgggatttcctctgagtacaagaaggcctctgtgttccccttggggcagagcaggtgcttaccttgtcctgtcaggggctggcccacggagtgcagacacttgacaaagtcaccatctcccagggcctgaagcacaggtgtccccagtcgggtcataatacgcatgcttgccaccacataggcygagtcagtgagctgcaccccgatgcgggacagcggggagcccacaggacccatgctgaatggaagcacatacatggtgcggcctgtggaggaaggcatcccctggatgaagggttccaaacctgttcacatcttccgtgcccttgccactgtgcccctgccctggttaccctgcatgcagcctggaaacctctcatccacagctcgctggaaatcagctggggacatccagttgcccagctgcccacgggccccaccrggcgggagtkgtaccgtgtcccgctgagaaggagttacaatcaccgtcttgctctctactcgtgccacatccttggggtctgtgcgggccagccagctgggggagaggggattgtcaggaagatggtggccagcaggtttcccttgtccctagacccactttttcaagtccaactttgactccaggtcttctgttggccttatktttccccacccaatcacatctcagtcccttcctccaggctttgtcccatctaaggggtgttccccaaggtcccagccctctgggggtctctgcccctggcaaaagctccctgaactggtgaggaaaaaaaaaaaaagcaaaggatcttatttatatcagcttcttcatttaacattaaaataaaatacaaactacaaactaggctgggcgcagtggctcatgcctgtaatcccagcactttgggaggctgaggtgggtggatcacttgaggttaggagtttgagaccaacctggccaacatggtgaaaccctgtctctactaaaaatacaaaaatcagctgggtgtggtggcgcatgcttgtaatcccagctactccggaggctgaggcaggagaattgcttgagacaattccccggaggcagaggttgttgtgagctgaaatcatgccactgcactccagcctgggtgatacagtgagactccatctcaaaaaaaaaaaaatcccagtttctttctttttttttttgaggcagagtttcgctcttattgcccaggctggagtgcaatgacgcgatcttggctcactgcaacctccgcctcttgggtttaagtgattctcctgcctcaccctcccaagtagctgggattacaggcatgcgctgccatgctgggctaatttttgtatttttttttttttttttcagtagagacggggtttctccatgttggtcaggctggtcccaaactcccgacacctggtgatccacccgccttggcctctcaaagtgctgggattataggcgtaagcaaatcccagtttctgggtctgtttaccccaaagctctcattcttgttcattccattgggatgttctagttaagttgattttgccttggtgaacccaaagtggcctcagtgcacctatcctgcaggttgtggagcccaaggcttaccagttattgtacttggggagctttcggatgaggccctgctgctccagcagggtcagtgtggcagtattctcagcctcagttccatcacagatgtggatgccctctggttggcacaggcgggcactgtgctctacaaaatctcgaatgccagtgggaagctggcccagatctccactaagcactcgcagggtctggatgctacggcatgatggccagcccaaggggctcagcccatgccagttaagcctataggagaaacagaggcaatgagctagttgctgtcatcragagtggacaaggcaggtggtggagagrcagaaagcttgggctgcagcctgctaaaacatgtctgcatgcagggaccatgaagagcaggttgcagttggtgtgtgggatgtgttcaggacacatgtatcttgtagcctttatgaggcttgaggagggtgtctcctgctcagcgagggacagatatggccaaatgagcaaaaaaggcacatgcctggctgtgtggaagtatacatgtaggcatgctgatgttactgcctgtgtagcccatgcccatgtttaactgtttaatcaacgtttagaaataagtagggagatggctgggcacggtggctcatgcctgtaatcccagcactttgggaggctgaggcaggtggatcatgaggtcaggagatcaagaccatactgggcaacatggtgaaaccccatctactaaaaatataaaaattagccggatgtggtggcgtgtgcctctagtcccagctactcaggaggctgaggcaggagaatcgcttgaacccgggaggtggaggttgcagtgagccgagatcgggacactgcactccaacctgggcgacagagcaagactctgtctcaaaaaaaaaaaaaaaaaaaaaaaaaagaaatgagtaggggcctttggcccaagtgtcaagacaagaagttgggcccaggtgacaatttcatatgtctggtatttgaagcctcatccattttatttccattttcaagtatagttttttataaattaaaatggcagctgtgtttattctttccttctggtgtgtatgctgtaagactatgaaagccccaagcaaaggtcacagtctttccagtgccaggtttctagatgagggctcttgcacagagaataggtgactggatgctgggcttccaggccctgatctgctgctgcccacttggaccaacaatggttgcataaaatgttgccctcgggtaagtatttctgaactctgcggaaggttgaccactggggaatgagtgtcactggctggggttcatgggcttaattctcaggaggtcagcgtcctgttgtctgtcctctcatggccctgggagmcagagaagcaacgtctgctctgattggcctggactcaaggtggagtaaacccgagagagcaaagaccatgaaggggatgttactctcctcctctatcaaggcctcgcccatcagaaactgcccccacacccaggaccacgtgaccccgtgcttcccctggctcttcttcctagaggccacatgcctagagagctttggtgttggtgggagggtggaacagcagcttgctggcagctcagactcagagggtgttagcctggggaaggaagaaagctcagagcatggatasgggagmttgagtctgtctggggtagaagctggggtggtttccgctaaagcaggatagatgatcagtgtggccccaggggcaggggaggagggctactgggacctgggtctgttcctgcctcagagggaagttctccgtgagcatcagttttcaagcacacagtcttgaggacagcctctctctccctggagcctggctcacgttatctcttgtgaagcccccacaccctcttgcagccctctaagtgggacgtttccttcagagaccacccacaagggctgcccaagtggaacgggctgtgcgacagatgtgggtcacttccgactctgggacaaaagctgagaagagaggcctcagagaataaataggagactaagaggacaggcagacaaacaggacgagcctgggggctccaggcctggacggaggaagaagccagctatgtaagaaacgaaggcaacttggcgccctcctcccaccttgcttgcctccctcccctgggcccaggtccctcgggctgctctggacttcccgccaggttccagtccttccagtccgggagaggccgggaatggatatttaaccttccaccttctttagggggctctgagcttagtctcccggggctcacgtacccttgtccccagggccctgctgcctctcgaagtaccctggggcgctggctgagagcccgttagaggtccgagggaggtatytgggaaggaaaggaggatatgcggagacctggctcagcagagaggagcgaggagagagaggaagttctgagagtggcagatagagatcgcgcggtcagaggcgagcgaggcagagaaggggaggtgcaggcggaaacgaggagcaccggccggctgccctcccaagagacgcgcggcgcgggaggctggacccacagcagtcgcccctgcccgcctccgcctaggatgggaaacctggcggaggctgagagcaggagagcgccactggcagccccgagggggcgagcgcagcggaaggtgcgggtgggccccgggccgggggtcactcaccgcaggccagggcggtacaatgcggccatggcacctgggcaggggctgcggggtggccaggaaccgagcggagccggggaggtatggaaggcggggaaggagggagcgcggcgaagcgagccacagcagaggctggcgggaggcgcttaaaaaggaggggggcaggcgcgggggcggaacctggtagggctggcactagctttcctccgccccgctggcaggccagctccctcggccccggggctccaggctccaggtcagcccagccgccgccccaacccctgcctccaaaccgccaaacccayctctcccattggaggactgggtccactcttcggcccccgacttcgaggccccgccccccatccgccaccgccctcccagccgcacatgatgtaactttgaggactcttgctcccgggagagacactrggtggcaaacaagctaggaacgaggggcgaggccaggggcgggagactacaggggccagacgtctagaagttagggggttgggcattgcctttccagttcctcctcctggggacgcgacaccctgagtcctgggcctttctgtagtccaagtgcccaatgctaaggtccacttagtccccaactcctaaatccccgtttctcctcctgatcaaggctcctttctgccttgccatgaaatggtggagtctctctacccctgggtctcttccttggtcctctgatctggtcattctcctcccccggcacatcccctcttcccctgacggagtcttactctgtcacccaggctggagtgcgtgcagtggcgcgatctcggctcactgcacactccgcctcccgggttcaagcaattctcctgtctcaacctgcagagtagctggaattacaggcgcctgccaccacactcggctgattttttgtattttttgtaaagacggggtttctccatgctggccaagctggtctccaactcctgacctcgtgatccgcctgccttggcctcccaaagtgctggaatttacaggcgtgagccaccacgcccggcctggtcattctttctctccacaatccaatgaggaaactcatctgcccacccaactaccatcataaagtcctcaggtgatttctcaagctatacctccattgggacatctctctccaacctgagaccactggatatcacccacaatgctatatagcacctcaaactcagcatatctatgatgggtgtctgctcagcatccactcgccttttctggtaatagcaccctgattttcttttggggaaccatctcctcagtctgtattgtcatgtgggtctgatgtcacccctcttgggggtaggcttgcagcttagccaacttttgtgttcctcactctggccacagcaatcaaggatgttcaaggatgggcatgagatccctctctgggactttttctaaaactttggaagttagctctctttctgctgagttgctgagctggtagaatataagcctggagctgctgagtgttagcttggcactgcaaagcaggaacctggctgagacagaagccagcctagaggaagcagagcagggagatggcgagcaatggattcctgatttcagttacaggaattgatgcatttcttctcttgctcaagctaattttaattggagttctgccacttgcaacagaaacagtcttgattctcagatttcttggagttctatgctggaacatagtgggataaggagagctggtctccagccacgggcttgctactggtccccgtctcttccccctcaggctctagcctacactcaacctcaggtatatgtatttggatctctttccccccagttcatagatccaaactctgtccacacttacccagctgcaaacacatacctcttggccaacctttgggcctaaaggtgtgcacactggtggcagcatggttgacctgaaggtcatcatcttctccataatcctgcacctgctctcatggtttcctacctcagcaaatggcaccatcatctggccagttgccccaaagggaatcagtctagactattcttatcctgcatagctaatcagatgccaggacctttggaattgtacttctcaattagccctcaagtctgcaactatccccatggccagggccttagttcagggcttatctctcacctggcttcaggtgatagcttctaaggcacttcttggactcctgcctctccaaacaccaacccctctccctaccaagccactccccacactgtgcatgcaaatccacttggaaagttaagagagaagaataatgtttatgctatggacagtaggtgccaggctctgtgtcagcaactctgcatgcataatctcattctgtttcacaactatattttacatatgtggacacrggcttaaagagtcatttgctcggtcaccctaagggaagaatcaaggaaaaagggaggcaggaccccagaagtatgccaacatataacaccctaaatcaaaggtcaaatgccgcacttgacctccaagatgcctgcttgggcctcttccaagtgtactttcctttctttcattcctgctctaaagctttttaataaacttccattcctgttctgaaaaaaaattattcatgaatattttatacttttatcctattatgaatgaaatgttctaattgtttaccacaagtacatacaaataaaattgctttgtgtatattgaaaaaaaaaagagtcatttgctcaaagtcacacaaatggttagcaggagaaatggaatctgaatccatatctttctgactctaattaccaagtccccctctccctataaatcctatactgtccccttgatttaccattaaaaattagatcatatcactcttaagcttaaaatctcttccaggctctttccatcacatgatatcttatgtccttcataatctgactcctatttatctaatgttgtcacccccacatccccacttgcctccttttctcctacgtactgaactctgaagtttccagagcacttctgtgaactttttctgggcatctgcactcaaattaaacacacaccatcctggccaacatggtgaaaccccgtctctactaaaaatacaaaaattagcttggtgtggtggcgcacgccggtagtcccagctactcaggaggctgaggcaggagaatcgcttgaacccgggaggcggaggttgcagtgagccgagatcgcaccactgcactccagcctgggcaacacagtgagactctgtctctaacacacacacacacacacacacacacacacacacacacacacacaggccttttctgttcgtcccttagaatgaacatctatttcatctgtgttgcttctatcccatgtatatgcctatatttttgtactttactatactgtagttacttttatatctctgtaatcctcactagagtgatgatttcagtcttgtttttctcctagttcccagcagtacctggcctataacaggcacttaataaaagttggttgaataaaagaatgaatgagtgccacgtttctgaattcttcttccccaccattactttcttctctagctttaggcagatggagcaaggggctcacgtgcagatttccttgcactgctcatttccccttatctgccacacacttttctttagttccctgccgggagagcctggcccaccagctggccctatgtccaaggagtaccaccagggggcagagtgtgatctgcattgtcctctctggggcctctgggttcatccctgaagtctcacagcccgagtagtgatgctgtggtgtgtagcccagattcccgcttcaggatcatgatgctcattgttccagctgctgagtgttggctgctgatagctcacagctgagtacttccttgagcactatctgtggccaaagggagctgtctcaccaaatgcaatgcccgcttcctgggggcagtatgtatccaatgaatggttgttataaagtacagaggcctagccctttgtctcagtttgggacaactctgaaggtccatcccagccccagagctctttaggctcagctgattacaactgcagtgccattcaactgttccctctcttgggtcctgctactctttctttgaaagtccccccccgtgccccccccccccccccgagtaaaccacctgcacacaagtttctgtctcagagtgtgcttccagttgcaaatattcctcaggctcaacttggttacggcattagtcctctaatctgactcttatttcattgttgccttcctccacaaacacaaagtgctgacatacgtgatccttccgaacacaaatctgatcacatcatgtctctactgaaaacccttcagtagcttctccctgctcttagaataaagcccaaacccttaatgtgacctcccaggctctgcatgatctggcccctgctgacttctccagcctcagctatcactgttcttcccaccttccaggctttctactctctggctacgtggatcttttctcagttttgtgaacatgtctacatctttcctgcctcacaacctttgcatatgttgtttctgccgcctggaattcccaccctgtccacacctccaggcagggtcacttcttattcacctgaccagtcttggtttagcatgactttcttaggcaacctgtccctgtgatgcatcccctctggctttgtattagagtatgtcttcgtggaagaaaatttcatagcaccctgcccttcttcttcttagcacattcatctctgtttaaatggtttgtttttatgtagacacatctctaacatatgtaggacctgcggcaggagtacaaatagaggccctcaaaccttgtgtttaaatatttaaaatgggctgggtgtggtggctcatgccttgtaatcccagcactttgggaggcagaggctggaggatcacttgagcccaggagtttaagaccagcctgaacaacatagtgagacttcttctctacaaaaaataaaaaagtagccaggcatggtggtgtgcacctgtagtcccaactgcttgggagactaaagtgggagatagcttgagcccaggagttcaaggctgcagtgagctatgattgcaccactgcactccagcctgggtaacagagcgagaccctgtctcaaaaaaaaaagattaaaatgtataactcagggtcggcgcagtggctcatgcctataaccccagcgctttgggaggctgaggcgggtggatcatttgaggtcaggagttcaagaccagcctggccaacatgaaaccctgtctctactaaaaatacaaaaattaggccaggcgcagtggctcacgcctgtaatcccagcactttgggaggccgaggcgggcggatcaagaggtcaggagatcaagaccatcttggctaacccagtgaaaccccatctctactaaaaatacaaaaaaaaaattagccaggcatggtggcgggtgcctgtagttccagccggagtctgaggcaggagaatggcatgaacctgggaggcggagcttgccgtcagccaagatcgcgccactgccctccagcctgggggacagagcaagactctgtgaaaaaaaaaaaaaaaaaaaaaattagccaggcatggtggtgcatgtctgctacttgataggctgagccaggagaatcacttgaacccaggagacagaggttgcagtaagccgagatcacaccactgcactccagccagggcgacagagctatctcaaaaaaaaaaaaaaaaaagtataattcaggctaacaaactgttacacaaaatatattctgttcttctaccttgacaaatatattgacaaatacatacttcacaatggcctggaaggccaggttcagatttgtattttatttggaatcctcagggttctgcaccagaatgtgatggtgtagggggaygtagttttggccactggccctcagctgggcccactttgcctcctacccctgmcaccatcttggactgcaaggggccttgtgtggaaccatgtggacctcccatcaggccatcccaagtctgtccacagtctcctgcaagcagctaccccttgtctaccctttgacctcagaatgtgtgaaccagtcatgtggcccagccgtgggagggcaaacccagggaagaggttcacgtgggccctaggagtgggcttgggccttttggacagggaatgcttagctatctggagtgtggtcctgagaggattaaggtatgggcagaggatagttggactcctcacccatgtggtgggacatagccagaggaggccagagtggagccttctaaagcacagggcccagggcaggggccactcctgcctgggcctaaggacaataatttatttattattttttttttgagacagggtttctttctgtctccaaagctagagtgcagtggcaccatcatggcccactgcaccctcatcctccccaggctcctgatcctcccacctcagtttttgtatttttagtagagacagggttttgccatgttgcccaggctggtgtcgaacttctgggctcaagcgatccacccatcttggccttccaaagtgctaggattacaggcatgagcctctgcacccagccaaagggcaataatttgatgtttctctgtttcatcagtctgtaagtttcttgaagtcagggctggtattagtgtaagttactgaggggtcgctaatgccttactcaggatgtggtgcagaataggtgtttaatatgcatttttcaaaagaatgtaggaggtacaccaagaagaggttgaggatttggatctattactgaagatctagataccatgagccagaagtaggaatgagaaccagtctttcagggttccaaaaatgagagtgcaggacagaggagaggaggtagcatcctggaatgctgactgtctcattttctctccttcctcttcattttctaccccactcctgcaggccctttgcctgcctgcccctctttccccatggtccaatatcactccatccatatcttgctacctttctgtcctttggccactgctcttcctctgtggcctatgtgtctatttctttgtattggtgtctaggtcttggtccccaatcttatgtcctgtcccttccttctaccactcttactgttctagtccttgttgtcccctactcccttcttggtcctctcctggaagacttcctttctttatccatctcgtccatgtgcctacatctttctgtctcctttaatccaaatccccatggagaccctgacttgtcctgtcctctatctcacatctacacctactgcctccttagtctccttcctctgttctattattcctggagtcacactggcttcatctttttcatccctagatgtccttgagcccattagtctcagtattcatttctcagtctccagtggatatgggagatgggctctgctttctgggtccccactgactgccacagactctcctctctgtgcccttggtcctttcctctggcccagactgggcccaaccctcactcccccagctcctttccctggtttagtggtgcctggtctgagccccaagcagctcaactcgcctgagcttgtttagtctgactcccttagcccgttagcagcttagccctcccacctctcctttgagccctccagtaaacaagaggatcagtgcagacctgacagctgctggttgggggcaagtgtctggccaggccagagcaggcatgaaaaaggggctgcactcaacacttcccattccttcttcaaccagggaaattgtagagtctctttcctgggtgtccactttggagagctacattccatgggcatgtgtgtggggtcctgcctctccatgatcctcattcccattttgtggttggttcctaggccttaggcttttttattcttttgagaaaacagcagtagatccaggcagtcacacagagaagcttgaatggtgacgatggtttctgctccttaaaacagaaacccaggtgtgggaagagagtgatgtcatctgatctaggttttccaatatgtgtatggaaagcatggtaggagagaccacatacacatgcacagacagacatatatacatgcctccccagggaagctgggtagactgcaggcattctgtgcagttctcaaactttctttcttttctcttcttttttttttgagatggagtctctctctgttgcccaagctggagtgcaggggcacgatctcggctcactgcaacctccgcctcccaggttcaagtgattctcctgcctcagtaggagtagctggcattacaggtgcctgccactatgcccagctaatttttgtatttttagtagagatggggtttcaccatgttggccaggctggtcttgaactcctgacctcaagtgatccrcccaccttggcctcccaaaatgctgggattacaggcgtgcctggcctttaaactttcaagcatgtcagacttgctggaagggccttaaaacacagatttctgggccccacccccggagtttctgactcagtagatttaaggtgagatcaggtaacatgtatttctagcaagttcccaggtgatatggatgctgctgctctggggaccacacttcagaaaccaccttcttagataatctgtatctgccagcttttccccaacatataaggctgggaccaggttaagttttataagtgatgacctttggggtctgatggacacccaggcctctgtgttgagaaagaggaactattaaccccatgggagtatttgggtggcctcagaaggtaggaagtggcctttaactccatagaccctatttaaacagcttcggacaggtttaaacatctccttggataattcctagtatccctgttcccactcctactcagggatgatagctctaagaggtgttaggggattaggctgaaaatgtaggtcacccctcagccatctgggaactagaatgagtgagagaggagagaggggcagagacacacacagggaaaaggtgagagaaagcagagggcatatgaggccagttacaaaagtgtctccgacggactggtggtgattagatttcaatgtcccttgaggcccagaaggaaggaacagagttccctgttctcttttttcctactctttctcccaagctggattagcaagaatgggagagacaaaatatggtggtcaagtcctggagatcccctgtgggaaaagttgctttcctttctgatgcgacggctatgaggggcataagaccagtcagcatgaagatggggcagaggtagaaatgtgaggattcttgaaaataggaaacagatccaaaaggcccggtgagagtgggcgtgggagagcttatagtctccaaagacagatgaggggctgcagggccttggaaggtgggggtgctgggagtttgtctggtcctctttttccaatcccaggctatgcatggctagggctgagggttgtgttcacatagaggggtggtggttcagacccatgtttctgtccgaactgggaaactgagcacttgggagtcggatcatcagtgaggagctttgttggggaagatgctccctttccttctttgagaataagcacacttgtactctcctctctctccatttcccccaaccccaggccaataagatatgcaaatgatctccttaccttattggttggaggcctcaggaccacagatgacctcagagagctggccctttaagaatgccctttgggctctgtgcccacagccccctggagctgagcagaggcaccaggccctgctccatggagccttcagtctcctgggaagctgtgcctgtctggctctggcactgaccacatcctctcggccatttctgaagtgagtatatccagggcctacctgggtgtcaggccgctcacctagaaccccctctttaacacctgctctctgttgtctgttttcaagaatcctaacaccttggtaccctactccactcccaccctgactggcctgtgtccctcactgctatcacgtcagaaagataaacaaccttccccactactccttctgtacatccagttctttctggatacctctctcagtgtctcaccatctcctttctgccaagacccagttcctttaatctgtgtctgtttccatcccctctgtcctctcaagggtgacaggttccatagagagggcagcaaccctgccctggaacaggaagagagaggcctgggtcttcctctttgcctctctgggtagagcctgggggtctgacatgtggttggaaagaaggctacctaggcttggggcatctagaaggagccgaagtctaagccctggggatgaacactccatgccgcgcaccttctgggggtggggtgggagttactggaattgggagctggactagagcttggacttcaaggctgggaagggtatctgaggtcacccagccagaagttcctcaggtgaacatgtgccccatgattgataacagacaggagagttccttggtgacataagtttaggacactttttgttgaacttgaacagacggtttactaaaggattgctcaggttaatatgctcttgtgctatgtgcatctgtaagaggtagggataggaggcaacatttctcaaagttatctgagcacagacctcttcataggtattgttcagaatcagtgttctagagaacactctttggtatatgttacaaagtctaactgccctcattgaacagaagggaaaacgggtcagaagggtgaaggtgatctgccaagttcacacaacgtaacaagttctgaatagaaggaaaatcaatcttggtctgttccccttggagagactggccttgaggaaagatggtggccagttgattctgatctttctagaactaattctaggacctttcttttttccatataaagcctcttgcccctacaaaagggattcattgattgattaatccatagaacaaatgtacactgagggtcttctataggcaaggcacttccctgagtgctttgagagacagagagctataagaacacattatccttggctcttaaaattcacagcatacatgccttcccactgtcctaaaatatacactcactttgtcacagttaattaagcaatttaaaaaaatggcttggaaatggaatgatgcctcttgagatgacagacctctcggcatgtctcagcactagggttgggagcactgccatactgctcttgcttttcatagatcctgaggcatcagtggggygagaggctgtgctgtcctcttcctccttcaggaattcagckgcttgtcccctgtcaggagcccctgccctctgaaaggttactcttcagcctggtggggactctgcagtgaacagagctgcaccatccctctggctttcccaaactcttgctccagggcacttgggctttgagggaagagggacttggtgaagaggggatggcaggtggcctccatgtgctccagacctctcctcctctttgcaggtgcactcctcccagcccagctccagaatggccctgccccccagccccctggccatggaatatgtcaatgactttgacttgatgaagtttgaggtaaagcgggaaccctctgagggccgacctggcccccctacagcctcactgggctccacaccttacagctcagtgcctccthyamycaccttcagtgaaccaggcatggtgggggcaaccgagggcacccggccaggcctggaggagctgtactggctggctaccctgcagcagcagctgggggctggggaggcattggggctgagtcctgaagaggccatggagctgctgcagggtcagggcccagtccctgttgatgggccccatggctactacccagggagcccagaggagacagragcccagcacgtccaggtgagtggtcagcaagctggcctgaggggaggcagggcaaggaaggaggactgcccaagagaggaaggggagctcccagagggsgttatggactgggacaggggacagarggcaggagaaggggagaaggtcccttgaaagcaatcagatcgagaaaactacattctgcttctcccccttttcttaaaatggagagaaatgagtaggctgaaccaggaggagcagggagaagataagattagcagagaatccaaagggaagaattgagctggggagtgggcgactccggggggtaaacagatacatggtgtgtggaaaccagggaaagggttatgtgtggagtggagctgggttaagactggtttagattggccttttcaagacttcgtgcttcccagcccccaaccttctcaggaaggattgggactcatcctattaattacagacacagatgggggtgttgcgggcattaggatgtaatccaaatcctgtgagggtcaccgggttgcaggcttcaggacagggaaacgcagcgcgttggagggttgggggctgtctgggtgcgggtccactggacacacccgggcctggagctggatgccggggatcccagagacgagcccggggtttaggtgcgcgacgggctcgcctgaccgtggccggccctgcaccgtggggcgcccgcctgactggagcaacggtcagctggggggcccggggagcgtcggggcctggggcgggctctggaccgaaacagactgcgtggaagggcgagccttccggtgaaggtgggagccggggcggggctgtcccggggcggagccaggtagcgtcgggccctcagggcagagccgggtgcgacctggcgctgacccggtttctgcattctccctccgcagctggcagagcggttttccgacgcggcgctggtctcgatgtctgtgcgggagctaaaccggcagctgcggggctgcgggcgcgacgaggcgctgcggctgaagcagaggcgccgcacgctgaagaaccgcggctacgcgcaggcctgtcgmtccaagcggctgcagcagcggcgcgggctggaggccgagcgcgcccgcctggccgcccagctggacgcgctgcgggccgaggtggcccgcctggcccgggagcgcgatctctacaaggctcgctgtgaccggctaacctcgagcggccccgggtccggggacccctcccacctcttcctctgagccgttcagagcaccttgtggtgtagtgggggctgggtggggtggctccgcccaggaggcggctgcacggttctctgcatcgttaccagagcgccttctggtcctagccacgmcctgtatgaccgcgcaaatatccccaaagcttttgggtcctcaagtcatgcccgaatttagatgctggtcattttctggagaggggtcccctccccttacgaacacaraaacccagcccacatgactagcacgctgagctctgcagggaccagtgccaggcactggggggtggaagtgtggtgacacagtgaatgggaggtggaggagggttgcagctcccacctcagtttagtttttaattcagggttttcaacctgtaacacattaaagctgtaattagcaatgaggctgtattttcattctgaagcttgtaacctccccattttagcactacagaattttcaagatttcaatatccaacaactagatagattaggacctctatccgagatgctttttccctgcccaaccctgtggccttcagggctcagagcagcaaaggcctgaagagtgagctctgggggttgttggtgtgggttgggagagagctgtgtgcagaagtctggaaacctgggtcctagtcccagctcttccatgggatccccctgtcaccctgagcaaatcagttgcttcctggacttgtgttacttcatctaattctcatgtggattggacgacttctgctccctttccagttctggcatctccccagtatggaagtcccggtggtctccccaagaagtccccaagacaatctcgccaaaggcacctcctatcctsctgcagtttcccagctgcagcctaggcaggggatgcacagcccaggcgaggaagcctggcttctctgtgagcacatacgtgggtcctcggcagctccctccaggctgtctgggcctccagacctgcacagggtgctcctgccacctcccacctctctgagggctgaggtgagacttctcctgggatgacaatttgctgagagagtgcagcttttgtgaattaaacttgaagtccaggcagaattctaatgcaataagctaaatgttcttgcaatttaagaagtgttcattctttatccctgcttcaggctactgtttgtgtgtctgtgtgtgggagagggagagagagggagagagagagagagcaagaaaaagggaagtccccacctggagctgggtggcacatctgttatggagagccaatggaaatggggtggaggggcaggcattggaacagatggatcctccccctctcaccaccaccaccaccaaactcagaagcctcagtggcccagctcggcctgtcagtggctatccaggtctcacagtttccatggtaacccagtcctccagttcagcaggctaacgggagggcagatggggcctctgggcagagcacaggcgttgtgctgggagcagccgcctcacgagttactgtcatctgtcctctaccggacataataaatgggagaagctttcgggcatgggggaagaggctcccatatgtccctcttcctttctaccccctctctccaccccctccccagctgtctcttctcttcccatcacagttcttgctccctctttcccctcctctatcccagctcatccctcctccgcttaggagcctgcaatgggagtcctctcctccatcgctctcagaatttctctcgtctcctctcccttccccaccattggccactggccatcctctctggctctggattctctctctgaggggctcacagaacctttagcttctctttcttcatccccttccacactcattgttgaagggagaggatggggcagggagggtccttctgggagcccagctctttttctctcactctaaatttcacctgtgtctatccttgcctgccctggagctgtaattcagacccactacttttcttgttcacttttctcacctgcatggcacacaaagacagacagaaccatccatagacacctgagcacacaactaggccacatatacagtaccatacctgggtctcaaaatgatactcctgggttacctgagtatacttaaaaaaacaaagttgcacactgtggtgattaagagtagtgctttaggtggggcgcagtggttcctgcctgtaatcccaacactttgggaggccaaggaggaagtttgagaccagcctgggcaacatagcgagaaccctgtcactacaaaaaaataaaataaaataaattcagatgtaatggcatgcacctggagtcccacctacccaggaggctaaggtggaaggataacttgagcccaggagttcggggatgcagtgagccataatcgtgccactgcattccagcctgggtggcagagtgagaccctgtttcaagttgcagttctaccagttttttgaccatgggtgggttaaaatcaagcctcacttgattgtcagaaaaatggtgaaaataatggtaaccacctactgagaataaatgcatttaaataagcacttagcataaagttgacacatgctacgtaatgatatttgctgttgttgctgatgtgattgttaagtgtgtgaatctgtgtgttcatgcactgcacatccctgagtccatgagtgtgacccattaaggccatgaacagacacacacattgacacacccgggaaaccagactgtataggccttagatgctccactatgttcccaattcactagcagacctgctgccctccttcagtatcccccagcacctgctcttggcccgccccacagctgtgtgggggctggggttcagctcctgggggactcagcagggcctctctggagacagctataagaaagcttcagcctgccctcctgacagcccgtaattatcctcctatctcctgtaattattctccatggtgcctagaccccctggggttgggaggtgagggagggggctcctcagatcccactggcacatagctggggtaagactgcagagacagcagcctgcctggggagctctgtctcagattttgaaaggtgctggtcctcatttcttatggtgtgtgtgggggtgctgcaggctgcccagtgggcatctgaggcatgatggttagaggctgaggtgctaggagcagttctctttattaatggctagaaagtcaggatcacccaaggaagtcactgaggggccacagcattgaagggtatggggtttggagagataggagcaggacccaccactcacgtccagaacccagggggcacacctggtccaagaggtggaggcattggtcactggagtcacgagggtcaggacaggcacctgggagggggtgggagagtcataagcactctcttctacactacacccagcctagttgggctctaccaagccccactttgcaccccctgtgtccactcctttggaagccccaggactcactgagaggctgagggagtgtcggtccggagggaggcagtcacgggctagggctgggagtcgtagccagtgtgcagggcctgggagccccagggctgatgccctggctggcgtagtactccaccacctgccgtggcacctcagccaggacacacttggcgagtgcagagggggcagcctagggtggggacagtgatgtggttaggggtgagaggaagagtaggggaggcagggtcatctgagggagaagtggggcttcagggtggccagctgggctcccgcgtccttagcaggacatcaaatggtggaagacgaaggtcagatttggggggatgagaagctgaggagtccttcagccggaaggggcccgggggactcacatccttgaagtctcggaagggcacgaactggacaatgtctcgggctgcaggcacccctcgggggcagcgcaaggggccgtcgtcgccatccagcagccgcatgtcagagaagtcagcattgcccacgcctacgatgatgatggacatgggcaggcgggaggcacgcacgatagcagtgcgagtctcagccatgtcgctcaccacaccgtcagtgagcaccagcagcaccgagtacttctgagggcaagcagagagggtggaagggttggctttgtgtgcaagggcgttgacaccgtttccaccaaggtgcagaccctggccctggcaccacttaaagacacatgggacagctcctgtttgcccgccatgtcttcctaccgtggcttggccggtgctctgctcccgctgggccggctcagccacacggttgatgatgggggccacattggtggggccgtagagctggatctggggcaggcaacgacggtaggaggcgatgacccctgagatctctgtgagtgaagagaagttgtgaagctggcagaaatgagcagggccccctcctgacactccttaaagcaaggaaatgcttccaggtctgaggactgccctcccctcgagttccttcattaagcagtgggagagttggatggtcccttggcagggagagttgggtgcagatgctgggcctcggccctggaagcctcacctgataaagacaggcctgggatgggtggaagggacaggaagctgggccctggggagtggagtctgtgctcctgtgtggagtgtgtctgcggggaggcggggcaggtgaaaatctccccttttaccttcacattcaggattttccgggtcaaagttgatagcaaagtcatgggacacctgtgagggcaaggcgggagcagtgagggcctgccttttctgcctgactgacacgccccccatctccttctttccctcgcatctagcctacctcgaagttgggggggattcgagccccaaagccaaaagctgggaaccgcttatcactggggagaagaaaaagctgtggaatccgttgggcaaggcctccctgcctgttccctcccgccccactctctcctacctgtcatagtcctggcagatgcctcccactgcacgcagggcctgcaggtagtggttgggctgtcggggactgaggcagtgcagggactggctgctcctcgggtccccattggaggcagtgaagtcaatggccacctgggtgggggtgggaagaaggtcatgctgcaaccatgagagccaccagattgcctaggccagagctgggatctgtagggaggactaagatgagtggtggggaggctacaggtagccacataatgatgtgggggtgcataagctgacaatgcgaaggctcatgagcagcccaagttggggcagtggagattctgggctccttcctttcactatggactcagcccctccctcttgcctgtgtgccctccctctgagtctttaccgtgaagctgatctggcagccacccatgatgtaatccaggaaggtgtgcaccttctccacctggaggtagggagaggggtaaggcgaggggatggggtggtcctttgaggagggagcttgggtagggcttctgtggggaacatgggggagccagagttttttgggttgcagttgggggtggtttccagttcccagaagcagagaaactggtctttgaaacaagggaagggttgaacctgagagtgtggtaggggcaggggctggggcaaggcttgaagcaggaagtgaaatttaccgtgcactgggccagcactaccgtccctgagctcttgtaattcttcttcttgtcccgatacttggggttgatacagtcccactgcatctagaccccaccccacaagctcagggtcacaagtccatcaggtgacccctctttctcccttccagcagagcctcccagagcaagacccccatggttccgtccttcagctgagcccaggtgctttccaccctctccacttcctatcacctatggtggtctcttcagcatcaccctcaggattctcccagggatctgggtgggattctgggggtggggtatttgtggcacctcctgcccagggtttgccgtcccttcctgcatctcctggaaagtgctggtgaactcgccgatgaagtcatgcttcccactggagtcatagtcatacaccaggaactgagaaggcagggggaggggtggggtcaggttggagatgctctgcggtattcacggtgagtagggggactcggggacttggagtagggggacttgggccttagagtctccatgcccaaacagacatcctcaacctgcccggagaggccacctgctgaactttgttctttggctcagtctgctagggactttggccactgataaaatgcacacatgtgggaagtttaacattgagctgtgacctattatttatcccacagtgggatgtgattatcacttgggggagaggagggaggcttgccacatgcaggggaaaggtcttagatagcagattggttgctctaagtaggctgtgctggcttggctgggacttcaccttgagaggtcggtgaacatcacagctgcatagggaatgcagggacaggcggaacggctcccagctggggttcaggttgttcttcaccaccttggagaggcaccaggtggctggtcagctcctgtctgtgttttcttactttactctccctcccttcatccccatagccccaggcaccaacctcagttctccagaccagctgatcactttggtcctcgttggtcttatagatttccatgaaagggtcagacttgctgaacagatcctgaagatacaggagaaagggcccttgaggttggtgagagctgcaaggagggtgggggatgggctcccactgggaagagagcaggcctgggctcctgggatctgtcttgagtgggaggcctaggagtgacaggggagttgggggcctggactctggggttccaaccttgttgtccagcttgtaggctctgaaggtgagttgcacatagtcgtttgtgcctgatacctcctcggccacgatctgcaagggggatacaagtggcaggactcccctaaccttaccacaagggccaccccatcccctttcccttaggtgggggtggtcctgggcatgatgtcaccataggtgtccatgcaggggcattgaatacctggaccaagggtgagtacaggtgatcttgcctaccgtgatggtggacttg

SEQ ID NO: 98158 - DNA, 18267 bp, Homo sapiens
tgatatgcaaaattctaagggataagatctaatgacttagtcctcaagtctggcctctttgtgaaatggagggaaggaaggcatcccctagaacatctcctatggagaggacaaagattattggcaggaagttggagtcattctaacaaggagacttatcacaggcttcaaggaagatatttcacagcagtgctgttttctcagaaggtcccgggtcacagaacctggagtgataagcccacatgggtggtcttcctagacaagctgctttaggagtctgtagactgcgttttgctaagtattatctgcagactatgtactcggaatcatctgggatgggggcagtctatgtttctttgtgtcccttccaaaattgtaaatcatggggaactaaaggacgtgactctcaactaccgagaggggccccaccagggcgcccacgagcaccccgatacccacagcacatgtaccccactcacaaggttgaccaaatttcagacttcagttttaatggttaaagctgcctgtgggagccaggctggagcacgctctcactcggccctcactttgctccacctctccctcttcttccactccactcccgcctcccacgctcccacgccctccacgccctccacgcccctgctcctcctccaggtactgaactggctcagagctagcattctgccaggaggaaagtgcgcctccttccaccaggcctagttcagttcgtttaacttgagagggctggaggcagtgaggctctcggaagggccgggctccagagcggcggggccgctcctagcggtctggcccaggctgcccccgcggcgcgtgctggacgcctcggagcccgtgccctccagcagcttggcgacgaagcccacgcccgccgagcgcagcaggccgccgccggcgcacgcgtacagcacggggttcacgctgctgctcaggaaggcgagtgcgatgagcacgttgcgggccaggctcagccgcttccccacgagccctaacccggcggcctggccggccagcgcgcggcccgcctcagccaggttcaccacgtggtagggcagccagaaggcggcgaaggtcaggatgatgagcaccaccaggcggccggtgcggcggctgcggcggaagcgccgggcctgtagccgacgccctatgtccgagtagctggccaccacagccaggaagggcagcaggaagcccgtgacagcctcgaagattagatggaaggcccggtgcccttcgctggggtaccgcgggaagcacaggctcatgttcgttttccagggcactactgtgcggtacgcgaggacgggtgtggccagcagaaaggacaacacccagatgcctgccagcacccgccgggccatcgccttggtgcgtagcttctgggacacaaaggggcgggccaccgccagtgagcggtctagactcatggccgtgataagcaggacgctggcgtacatgctgactccgcagacatagtgacacaggcggcaaccagccagtccaaaactccaggtgccttgggccaggaagtgaaggaaaaagggagcagtgagcaatacggccaggtcggccagggccaggttcagcaccatcagggcagtgacagagcgcttctgcatccttttcaggatactccacaccacaaagctgttgccgggaagccccacagccagcgccactgacagcaggatgatagccagcagagagatgaactctacacctagtgaggggggtgctgcagaagatgtagtgttcatggccgtcgggaggacctggagagtgagggcggacacacgcatgagagtagaggaccaagggtttcctgacgccatggacacacctaggctgagaactctagtctatctccagggtcagcagcatcagaggtccccctgaaatatactgcccccatcgctgcagactgacaacttaaagggatctggttgagtacaaagactagtttcctaactgggtcatgcggccccttcctgtccacagacccaattgcaaaatatacagtgaccacagcagcagcagcatttccagaccttttcagtctcctccccttaggagaccctaaagcccagaaccaaacagagttcctaccaatgctgcaccccttgaaaggccagtctttttgccccctgccaggccctcagcccctcaatcccattaactttcccaatcacctgcctactgtccccagagatgcccagggtcaaccaggaataacagggaggggaggagtttagtggacaagtgacaaggacaaagcctcccaactttttacgctggtcaggctttctttggagattcctttgcaccttctttcatggctgcacactgtcccaccaccaccacaaccacggccgctcccaggaaacttacttacaagctttggcaggaactggttggaagctgatgccaatcccagggtcagggcagggtggtgtagcctatccctggatctgtcccactgccaaaggcctggccccaggtctaggtgctgtttgctaaatcagccagagaggaagtaccacagagcagaggacagggaagacgcatcttcctgagggtggggctgaaacccctacccactcccttcactaggaggggggatagtctgttttccagggcaacccagaaggcaggaggactccttagaggtggggccagatgagaagagaccaggaaggagcagtgagagaggaaagaggggtgtggggagtgagaaggctgggtgtggcctcaagatgcaggtctagactggataattgaacaaagtagtgaatggtatcatataggagaaggaggtatggtagccagagaagggaaatgggctcagattggaggctacaatgctgatatctttttgttttgttttgctttgttttaagattaataggaagtgtaggttggagctgtgactaggtcctgggtctgggtttgggttagataacatcatgatttaaagagggcacatcagtaaatgccgaagggggcagcactctgtccttggcttcagttcaagctatgatctaggtggtgggaagagggccatcttccagcaccccctttcctccccttacttaaagggactggttccatttaggtcaaccaattctccattctctttggtagaagccaaaatccaaatggtctccttggtatcacacagaatgccaattacttcccctttccccaagcacctaccttgtgcttgcccatgtggttaccctgctgagtctggatttatgatctgggcaaggagattggcactacctctttcctatcttctcacagcctactattcagttccactttagacacacaaagttgaggccgagctggcaggctgagcatgaggagcaggagtgagggagcaggaacagtgatgcctcatgcccaccctgccaagaggggaaaccagcaatgcagaaatggtccccttacccgtttcctggacagaggaatgtctcctttccttgaagtctcctgcaaaagctaaaaactaaaaattcctggcaggttgtggtggttcataccggtaatcccagcactttgggaggctgaggggagcagatcacttgatgttagcagtttgagaccagcctggccaacatggtgaaaccccgtctctactaaaaatacaaaagatagctgggtgtagtggcatgtgcctgtagtctcagctacttgggaggctgaggcaggagaatcatgtgaacccaggaagtggaggctgcagtgagctgagatcgcaccactgcactccagcctgaatgacagagcgagactccatctcaaaaaaaaaaaaaagaaactaaaaagtccttccttcaatctgaccatgggccttcctgcttccctttcaactctcacttctcaggaaagatgcaaagtataatggtggccactgaggtcccttaacctttccagagcccccacttgttctgcttggagaaaagccagagcagagatgacctcgcagctgtcagaggatatgaaaaaaatgggcagaaaccgcagcaagaactgaagtcagagttcaggaagggcttcctgaccgcacgggatgtgagagaatggcaatgtgcaacaaaggaagttaaggaacctctgcccagtgcatgaggacagaaagaatcccgtgaggcctgtgtttggggacagaaactccagggtcaaccagaggccccttcagacagaaactgggttgtccttgcctcctctctcaagctgttccccacccgcatctaccttgatggcctttcttccccacacccaggaccaggcactctaagcatactccctgctgttctagttcacaggtgctagttcatcccagttttggtagccctagcatgaccctggggactgggtttcttttgctgttttgacttctgtctgggaagcagggaggtgtgagcagtcgctaaagtagagcctggggtgatggtcagggtagccacttgagcggccaaccatctcagtttgttgggaaaccggcagggctgggacaaggagttttcagtgcttaaactgggaaagttccaggccaactgggatgagctggtcaccttagtgaccacagatgtgtacttgtggatgtcccctgaaaagaatcccattctacatcccccaatcaaaggggtcaggatctagaaccgtttttagacctagataaggattccaaaaggtgggggcagagaagtattggggaacgggctaggaatagctagcagcatcttagaaggagcccagacttggcaaagagaaaaagaatatgtggcacttctctgaaaaattattcctgtcctctaaatattcctgccattcctcataccccaatggccaacctccaaacttccctgactgagtgcttgctcctggctccttttcacgtcaggtggcctttgcagggaggatcagatggtcagggggcaaggtaagtctcagactcccagggcccctacaccactgtccactccttgtgtgcctgtctcatactcactggaccaaatacaagacaggcaggaaaacttccttttcaaaccccacagattcattttccccttcagagccatttcctcctcagaggcttttataagcctcagagaatggatcccattcctacccctcatccaagctcccatacctctccttccattttctcctttatttccagagtggttctatgggttggcctgtggaaccagggcacctgggctgaggagggcaggtcaagatgccactgaaggctggcactgcccagcctggcttgacccagcagggaactaggtggcttcagtacaactcaggcatgaagaaccaccaggggaagcacacttaagtcatcatctaatggcttcccagtgtatttcacaataacagctattggcaacaagtaagcaatgctggcacatgggtacatgccaacttgcaagcacacaatagtccttaacagggaccatcaccaccctcataatccctcagtttggaggagcctgggcctgccccaagtgtatagtaatcctacccagccagatccaaactctagtcaaagaagggtccccaaatgtcccagaacactgacctctggagggtgggtggggggtggaaagggacagggaagggcagcaggttgtagggtctgctgtcaaaggtcccattccggaccgtccttctccatcccaccccccgggtctccattgccgcggccctgccccaccactttcagctgaggggtagttcggagctccatggtcccttccctagagcggccgccccctcgggcctccccagagccttcgaagagccgcgtgaggaaacggggacctgcccggggcagcagatctccagcggtgaagacgtagagcaccgggttgacgctagaactgaagaaggccaaggccgtagttcccgctcgcgccgcctggccggctccgcccagcttcgccaaggccccttccggtggagccagcgctgcgaccgcctgcagaaggttgactgcgtggtagggggcccagagcaagccgaaggcaagcacgatggcgctcaccagccggcccacccgcgccccgtgccgcccggagccccagcgggcgccccgcagccgtgccagcgtcacgctgtagcagccgagcatcagcccgaaaggaagcacgaaagcrgtcagagtctccaggctcaggtgggcggcggcgtgsaccggcgacgggtggcacagctggcatacgcggyccctccacaggtggcggtagacggcggccgggacggcgagcaacagggcggccagccagaccgccagcagcaggcggcgggccagggccgggctgcgcagccgaggcgccaggaaggggcgggtgactgcgaggcagcgctgcaggctgagcaggccggtgagcagcacgctggcgtacatgctgagcgcgcacacgtagtacaccgccttgcagcccgcctggcccagcggccaggcctgccgggtcaggaaggccacaaagagcggcgtgagcagcagcaccgcgccgtcggccagcgccaggtgcagcacaagcgtggccgccagcggtcgcccccgtgcaggccgccagcccgccaagctccacaccacgaagccgttgccaggcagccccagcagcgccgccagcagcaggaaggctgtgcctgtggcccgcgaagtcttccagctcagcagtgtctcgttccctgggggacggtagcagaccgacatccttctgggcctacaggtgggtggaaggcgccacagagggcgttcaggggtggggcaaaaccccacctgtgatgcccgatgagaaggtgccatgcctcctccttacttccctgcagcctgcctcttttctgcctgggagtcctgacttccacgaggacccagaccccacctcaaacacaactccttcttggaacccagatcccctgctcccagtcagttgacctgccccactcctggcctccttcccagagctcagtggtaaacaggcataaagtcmtcaccccaggctgtcactatctctaccaccactcctctagtctggcccctccttctttgtccagccccattctagcacatctgggcaaaactggatggtggggtgtaaagggacgtgcacagatctacttaccaagctgggagcaagcaggattgggggcctggagaagctgaaaggttaagcagcagtaggcraggtgcctactcctgtcctgtgcctatcacatttgcagagggtaagacaagaatggggagggacaagatgaggctcatcctgggcctctcctggggcccctccctcaccctgctccttcccatcaccaacgcacccaggcgtccaggcatgtgagagcctgccttgccaggaaacagcacaagctgaagtggggcagtaagattccctggtggtggaaggaaataggaggactctgctgaatcctggtcctgcttctgttctcatccctcccccagctctggccccaatcctcccagcccaccttctgcagtgtgtatgttgcctggtctctctggcctgcagaggtgacccaaacaactcagtcccccacctgccttatccttgcctgtttccagtctcctggtccggctgagcccctggcctcctacctcctcccacytcttgcctcaggccctgccccagtcackccaccctcagggctctcaccgggctgtcaatgacagcttttccatgtaaggcatggtgctaggttccaggaggaacaggggatgcatggaggcataatggttagggagtcatgacacacaaccatgaagaggccccattaccaggctgcaccaggatacaagacaagaaaggaaaggatgagtagggacatactaagaagcagccctctcctcttggaaaagtcaagcaaaacttggaaatgaagagatttgaggggkgcctggcagatggatagagctgggggaaggraaaagaaaggcctctgctcaagtaacagccagaacttgaggttgcttggggagggcaccaggagcactgtcttagtttgggttcttccaaagcagagcttgagctaagggcttgggtacaggtgatcctgtattcttgagctaagggcttgggtacaggtgatcctgtatttgggaggttaactcaggaagtgagggcataaggtaaaacaagagagaggaaagccattaagagtatgttaagtcccttcagtaggccttgggaacctctgagaaaagtatagattgcccaagacaaaagactggcagggtgatcagtccaaagcatttattaggagaatgtacttaatgagtgggctacagcgtatcctcacaacagacagtgagagagagttgttctacctgggtatatccaaaacaagggggtcagggtatggagtttacgagggttcaaggtatttggttcagggccagggccagtttttttcagtgttttgggcaacaacctgaataccttttcaaggctctggcttgggctcaagcctgcaggggaaatgcaactggccaggtcacagggcaatcaagttactctgtgtttctttgtcaggacacagaaaaaaagtggggaagctgggggaccctacaaggatccttggcaggaaagcagggattgtgttcatttgagggtttcactgtcagtgagagtctcagcttccatgcaactgtccatcacggctgcaactgaaatcagagctgggacacagcgcaccagaagctaaagtcttgatgccatcaaaggacatccctgccccattcacatctctgtcacgtccactaatcggcaaaaggagaaaagtgagagaagatgacctaagtgtgactgcagcaggcagctctggaaaatgaagccagagcagtgagccagcccctcctccgaccaaggaggaaggaaagagcaggtaagcaggaaggccagtgtcccagacaggaccctaatgatcctgaatccatgtatcaggatccatcctctccttacacccttcctggacacastctcacctctcattttccaaagccctgccatgctgccatcccacttccccacactctgccccgggttcccttttcctaaagctgcagcttatggcttctccagtaggtggcagcacacacagagccactcataaactgcagcttctcagagcctgagagccagaaaccgtccccagaaaktccctccatagaaataaaaaaacaccagaagtcacatttcatccttttacatggttcccatctaccctcacaacacatgtcatcaccaaagacacacatacaagctccaatggcttttgccaggcaattcttcctccaggaccccatctggcccctccctcatccctccccttggactttgcccttcttactggccaggcaggggggccagagtccaggcttgactcattcccaccttgtcctgggctgagatcccaggtttgtaacasaaaacaccactaaagccccagcacaggagagaaccacccagcccagaagttccagggaaggaactctccggtccaccatggagtacctctcagctctgaaccccagtgacttactcaggtgactgctaaccctccgctctaccctccacctttaggggatataggcagggcaacaatactccactcagcccctaggagactaaccagtaccccttcctctcctgctccccactccacagtgggcttgtcaagctcctgagccacccgcccccacctgcactccatggtctctccctcatccctaatcgataaacctagatctctccctccctagccctctagccactctaccctcatcatgccctttacactmaccaagcccctcctcgccccttcttgacttttcttctcaactaccagrtcagtatctaatataagctcggagtttggacggagggtctggacctcagctccaccaccccagcgacctttccgtgtctgtgatcacaagcggaccatccggaaaggcctgacagctgccacccgccaggagctgctagccaaagtaagtaggccaagttcctcggttcctatagcaggggtagccaaggggctccacaacagtggcaacttgtgatgatggagcagagggctgaagtcacacagctgcccctccctctgaggsctaaaagcagcggagtgggcctaatgagctctggtcaatttgttcattttccacckagtgagcttttctatgggagcaggggttagcaggagatagggagagttcgagggacrgaattcagaagctagtatggaaaggtgatttgtgtgacaaatcaagttcaaattctgattctgccacttcctgcctgtcaaaccttgggaagttgttcaacctaccaaaacctcagtttcttcarctataaaaaggcaataataatacatcacctcctagggttgttgaaaggagtaagaggataatgtaggtaaagtcctcatacctggcacagagtaaggactcaaaaaggttaaacactattactgaaaacacttctggagaactcttgagggtgtgggaagtgaggtgcagcattgtagataagacagaagggtggacttcgtgagaacctggcttgctttccaattccaaaccagaagtgacttggaggggagcaaggggagatgccaatgacatggtaggagcaaagaggaaaaaggtcagcctctagctaggatcccccaaaaactgaagaacacggagagctgcaacctttaggaggtatcaaagtgccrgaaagtcaaagtgggacatcgaccaatgtctagagccaactgatggatgttgggcagctaaagagggaaggggcatgggataagacctgcccttcttgcttcttgccattgggcaggcattggagaccctactgctgaatggagtgctaaccctggtgctagaggaggatggaactgcagtggacagtgaggacttcttccagctgctggaggatgacacgtgcctgatggtgttgcagtctggtcagagctggagccctacaagggtaagaggcctatactggggctgcttccaatgcctgtcctttagagctttcccgggcttcctctctagcttaaccctgatcctggggaccaggtgcaggaggagttgtggaattgtcaaggatgtcacacagtggacagaaagtccaagcgagggagggtctgacccagtgctgatggagattagtggtgggtgtctggtatgaggatctactgcactracaagggtgtcctacagagtggagtgctgtcatatggcctgggacgggagaggcccaagcacagcaaggacaycgcccgattcacctttgacgtgtacaagcaaaaccctcgagacctctttggcagcctgaatgtcaaagccacattctacgggctctactctatgagttgtgactttcaaggacttggcccaaagaaagtactcaggtcagaaatcaacatgtcatactgccccatcccctacagttggatagtccccataattcgtcctcttgcacccacctacccctagttagctcttgcttgtggaaagtcctcatctcccagcttgatggcttcctcccaagttttccaaatcatctgatttcctcttgtctctgccattcagggagctccttcgttggacctccacactgctgcaaggcctgggccatatgttgctgggaatttcctccacccttcgtcatgcagtggagggggctgagcagtggcagcagaagggccgcctccattcctactaaggggctctgagcttctgcccccagaatcattccaaccgacccactgcaaagactatgacagcatcaaatttcaggacctgcagacagtacaggctagataacccacccaatttccccactgtcctctgatcccctcgtgacagaacctttcagcataacgcctcacatcccaagtctatacccttacctgaagaatgctgttctttcctagccacctttctrgcctcccacttgccctgaaaggccaagatcaagatgtcccccaggcatcttgatcccagcctgactgctgctacatctaatcccctaccaatgcctcctgtccctaaactccccagcatactgatgacagccctctctgactttaccttgagatctgtcttcatacccttcccctcaaactaacaaaaacatttccaataaaaatatcaaatatttaccactaagacttctgactccaatttaaaccaggaaagggatggggtggataccccattttgccctcccccatcaacacccagtcccagatccaaagcctcagtcttcaagtatggagttcaatgcccgcctccgcttggccaccgcaccctgctgctgttcccaagcctctcgccgctttaggaaggtagtcaaggccacatttcgagccacatggtggccgaaagggtctcttatcagctcctggttctgctcccctgcaaagggaaccactcatgtttagtactaccatgctcaaagacagactctacttgacgtaaagatccctccatttcccccagaccctgggactgccactgggataaagtgaacacttcactttccaaagaacagaagtcagagggcagggtgagggcagaggactacacaatcagtcagcgggagggaaggggaaagcagactgctaagaacccatgagcaagaccaccctttggaactaaagactgttgaatttcagtagacttcccagctacccagtgatctggagtaagagaggggagagtctggaaacatcaaagagaggggctggtactcaccaagctcagcagcaatttccttccgggccctcaaggctgctccactccagatggcatctagcacacggctgccatggcgactacaggccagagccacatattgtccctgtatggagacaagcaaagtaggtctccctagcaaaatccacaaaagtattttggaggcttgtggagagtgaattttctgaagagtttaagggctgaattaaaatagtctaggaattacatagcctttttgagtctgaaggtacagtccagggaaagctcatattctctaaatggatgatggtggggaatcaaggcaaaagccagaaatctaacctttaggttctgcagcacacggcggcgcagcttgcgcgtcacagaggggctggtcaggatggcatcgagcacatgagagccagcgggactttgggcaagggacagaagctgtggtcccgtcaaggcacccagacttcgaagtacaagaccaggagtggagaagtgcagcagatgctggagcagtagagacccaaggactgtcacatcccccaaggctctggctgcggccattgccacctggcagcgcagagataagaaattaggaggcaccaacaagccaggtggatgagcccatccccagaacactgccacctccacctggatgaagtcaccactctcacctcagaagtcagacgcttgctaaaccctgggaggcctgactcccaattagtcactggcttggcctctcccctacctcacctggtgctctgcaggcactgccccctcctcctccgtcagtccatagtacacctcataagccatcaaagtggcaaagagaggcacacaggccacttgccgggatgagggctctgcacagtggaatgcctaaaggagaagacaaaatatgatgaacctgagaacttctccgtcccttacctcaactttaagggaacaccttcaggaaaggaaagaaggcccaactccacaagaatgttagctctatgaaagcagatgtcatgccttgctgtatccccagcctctatcacatacaggggttaataaatgtttatcccttaaataaacttctctcttagttctgggagacaatttttgttccaggactgtgaaataacatttggcctcagccgggcacggtgagctgagattgcgccactgcactccagcctgggcaacaagagcaaaactccgtctcaaaaaaaaaaaaaaaattagctgggtatggtggcgggcacctataggcctcattttcccccattcctgtgaactccttgggcattagacttcctgagtccagaggtacaaaaacttaagattagataagtcctaaaaggtagaagttgaactgagggcataaacagattgtgggtaatatccactcacctccaacaagagctgtaggaccttggcttggtaggccccaactctgcgacaggcccccaccagggcaatgactacccctgggtggccctgggccaatacagcttccaagacagggctcagctcctcaaacacaggggacagctgatgggaaacatggaatgtaactctggcattctggtaatggcggaccacattattcagagaaatcttcccaacgaaaacaactaaaaatgctagataaaacataaaaagcattgccagtatcaggacttttgtttggctagataaggcccaggataagggggcagtcttagaggtgccacctcacaggaaggaactttaagtggctcttccctatgtgtaagggagcactaggagcaaggggagactaaaattaaactgcacttccactctaacacccaatgcatgagaccacagggaagcccaccttagtcctaagcagcaaaggaaaagagaagctatggcaacagctctagcactcatgtgggcttatagccaagtaccagagtctgggtgggccatggaacctcaagctgtaaacctgaataaagccagtctcttgctggtcctcatacctgagagaagtcaaaacaaatcctcactagaaggtgggcacctttatcctaagctctggaaaacctcaaagaatagcttttcaagggcaatggccagcacaatgtcaaaggtatatagaggcagacagaccataaaataaggtccagtgatcaagaattagcagaaacagatccagctcaggtttccaactcaccagctcaggggtagtgactgcatccagtaagcgctgcaaagggaagttggcaatgggatgtgcagccagggtctgcagctgcccctgcaagtgctcctcaaagaggctctggagtcttgggggctccaacaccagcaggacctgctccaggagtctggaactcgtctgatctcggagaaatagcagtaggggactagggacaagaagggcatcaggcagtcttaactccatttcatgcaaaatacagttgcactacatcacctcattcatttcacacagccccgccaacttgggtcgatcctgaggccctgaccatacctgccatctactgaggaaccgcgagtactcaggtagccaatcacagcattgcagaggtgagcgcaaaactggggaagtttgcggtgtaaaacctgtaaagccacttgaagacagaagctggagatcttatcagtgataaacactgtggagagagggcagaaataaagcggctttctcaaaatccagacaacctgcgtaacctcaaactttaggcaacaagatacagggcactatggacacaaagggactatacaaagtgctctgaacgtcaaaccagaccaggtttgaaaagaagaggaataacctgaggtaagggccttgcttggtggtaagatgacctccagacaagtagatacgagaccatcctcctacttccctccttacctgcaatgtccttcagaaaggaggagctcaggtcctgaaggcgattcaaaaaggtttcagggacttcaaaatcagctggcttacattcctgagctggggtcttctgtgcttctgaaggaagattaagaacatgtgcagtggggagatcacaaactgccatccaggagagaaaaatttcacagatgaacaaggattccgcttggagatgcagaacagatgtagtacaactaaatgtctcttctggatgactgaactgagactacatttctgtcttaatttttctaagaaacttcaaccagcttccccatggtccacagaagacagttcaacctcctcagccaggtattcaagccattccaaaataaagcctcatttaaactcgctaactttatttcctagtttttcaaaatgtggatcacagctcaagactgtaccatgaaatcaagttagtggtctcaactagcattttttttaaatgaaatagagcagaatagttttgaaaaggaaaaaaaaataacagagtgggctgcatgtagtaagggtatagtttcctgaacttctgcttgagtccagtgtgtatgttacttttgcttaagtccatttgtatattaagtcatgcttaaaaaaaattctcctcctgcgtccattctaatagccttccccaaacacaactgtacatccctacctctgggcctccgcacacactaatctttggcttgctaagccctgttcagattaggacaggtcaagctaattcttcccggtcaagctcccccatgaagacttactcttctgtttactgtctcattctgaactttctaaattcttcttccccctaggtccactttcctcttgtaatacttaccagatgattgggaaccacggggcctggctctctcagactccagaatagtccctcctaacacctgaagcagagttctgaccacgaagctgccatgtgtgtctccacagtagacaagaaaatcatcacacacctcagcggctagtcccaggaccagctcctccagggtctccgtgggaccatcctttccatcctcctcctcctcctcctcctcctcctcctctgcagcactccccagcaatcgagggagctgtagcaaagcactttgtaatacatggaccccgcatcggtgacaggccacagtgcgcaagttagagcgcagagcagcccacacgcgacaaagcggtttcaagggactgaatcccaacagttcctgcagcatctcactgccagtcctgttcgtggacaacgctagggcctgagtctctacttccttcattatattgtgcaccatcagatctgaaaagggaagaaagacacactttgaagagacttagtagagaatacagttatgtaccctcgcttaaccaagggtcgtgggtcggaggccgaggaagaggacatgggaaatgaaactaagtccccacgccctgccgaccctagaaagtttccttgcctgccctggatttgatgctcttggtctaaaccccgaagttgctgcctacctcgttcttccccagtctcgggagcctctttcaatgctgacagcgcccggcggaaatatcccagagcttccgggctcaggtgcgggtgcgaatctggagccggctccgagcgcccatccggaggcggccagggttgccgcttacggcctggtaaggggcgccccgaccccttggccccgcgcccccgtttgccaccagctgggaaccggcgccccaccttgtgtggagagcgcggaccctgccccatgtgtgcttcgcgacctgtccggctgcaaaagcttccttaactgcggacggaccttcgacgtcgccaagcgtgcgccttatccagacaaagtttagaaacgcgggcgcgctcctgacgcagctactacgtcatagttccgcgccgccccagccgggcggggtgggtgtgtcacccagatcgctccgcccccatccgcaggttctaactttggcctgggactctgcccctctacctcagcacagaatcgccccgggtcctactacagaatcaatccttgaacactgcctccacgtcgccggctcaatctgggcgagaacccagacttccaccgcagccccgcaatctgcagacctcagcggcagcgcaggtggcaggtaagcggcgcacgctcgtcccacttagggcttaggatctccaggcttcgcgctcatccccggcccggaagctgcgcctctggctcagccggactgggtcaggccagggaccggagcttcagatagcccaggactctgcgtggacgcgccccgaggggctgccgcgccagattcccatatccaggcagccacactcagagggttgtagtagttgtccacctctggacagtcccactcagccccttcttcactatctgggcctcccaaaagacagtcagccttgtcctcaggcccgcacccagttgtcagcctctgactcctctcccctcaaaggattcttaccttggctcctcctcttagccctagtgaggttctcccctaccccccaacctcgccccaacacacacacagtctccaggct

SEQ ID NO: 98159 - DNA, 55615 bp, Homo sapiens
  misc_feature (1)...(55615): n = A,T,C or G
tcccgcatggacttttaggaaagattctaggccacagcacggggcctcctccgtctcagccaggataattctggcatcagcccccggcccaggcgtgttcccacataattgaagtcgaatgtgctgggggagaggcctccgcattcctcctggctgtggaatcctcagtgccctgcagttggccctgtttgggatcaaagccagttcgtgttgattttccgcagcatggaaacaaatgcgacgaagctgttttcctgaggcaggcattttgaaaagaggatcttaatttttttccccaaggacaggtggggtggggaggtgggggagtgccacgtggctcctctcttgctgtcccttttgcaaacagttgggctcatagtgtctgcatgagcagaaactgatcagttagaatatgagtgaatacagctacagctaaggttgcttctatcacaaaagataattcctaaaaaatgctgccggaagaccctctggctgcgtgtgataagtcacaatttggttgctctctgttggagtgtttccaagatagcaactctcctttttcctcctaaaattttctgcttacatgtcttaacttctaggtctttctctgtaatctgttgtgcctgtaaaattaattcctgtcccttctttttagttagcactgaagccttttagtgctaagcattatgctaatgatgtaaactgatacaggcgagtttcttaagttgtggaaacatctttatttatttattttttttagacagagtctcgctcagccgcccaggctggagtgcagtggcgtgatctcggctcactgcaaccaccgtctctctggttcaagtgattttcccgtctcagcctcctgagtagctgggattacaggcacctgacatcatgcccggctaattttttgtattttagtagagacagggttttgccatgttggccaggctggtctcaaactcctgacctcaggtgatccgcccgcctcagcctcacaaagtgctgggattacaggcatgagccaccgcacccggccggaaacatctcattcttttacaggggacttgagttctcccagttctctagggaaaacctgaacttttgcctattgggccataatcaagggattgagaattagaaccaggagttgatatagctgggagagcagtggtgcgatcatagctcactgcaagctcgaactcctgggctccagagatcctcctgccttagcctcctgagtagctgggactacaggcatgcgccacccctggctaattgtttttaatttttagtagagacaaggtctatgttgcccaggctggtcttgaactcccagcctcaagcgatcctcttatctcggcctcccagagtgttgggatgacaggtgtgagccacagcacctagcctgggctcttcctttttaaattaggaaacacatgtaccaggaaatctggtctggaacctgctgcttcttctgggcaaaaaaaatggcagaagacatcctcacagaggccaagttggaactgtttttcctatttggcatttatgcttagtgctgtagatttacttttacttttttttttttttttttttttgagatggagtttcactcttgttgcccaggctggagtgcaatggcgcgatctctggctcaccacaacatctgcctcctgggttcaagcggttctcctgcctcagcctcacgagtagctgggattacaggcatgtgccaccatgcccagctaattttgtatttttagtagagatggggtttctccatgttggtcagggtggtctcaaactcccaacctcaggtgatcctcctgcctcggtctcccaaaatgctgggattacagtcgtgagacaccatgcctggcctgcttttatcttttgaaaatacaacacccaggctgggcgtggtggctcatgcttgtaatcccagcactttgggaggccaaggtgggtggatcacttgaggtcaggagttcgagaccagcctggccaacataatgaaaccccgtctctactgaaaacacaaaaattagctaggtgtgatggtggggacctgtaatcccagctacttgggaggctgaggcaggagaatcgcttgaacccaggaggcggaggttgcaatgagccgagatccagccactgcactgcactccagcctgggtgacagggcaagacttggtctcaaaaaaaaaccaaaacaaacaaacaaacaaaacacccagatttatcctgagtgctgtacacgttcacgttctgggatcttgcatgtaatttcactcttggacttcccctcctggacaaacctccctgcatttgtttcaaggccatcttgagctggatcggaaaggagtcttgggtcaggggatttagaaaaaggtctgaaaagaaacaaagctgcttcagttcacttagtaagtgtggtaattagccttagagtaacaaatgttatctgcaccagtgcagctccgtgccaagtaccaaaaccacattttccagatgattccagtgagtttttcactcgaagcaattcaacattaggccctaaagacggcaatcatcttgtacaaaacaagattgttcatttcttcctttcatgcagcaagaatgcaaaatccagattaagaaccaactgcagaacccctttctttcatgtcctcctaagcttccagaattatagggagagactactcaatgttcatgaaaagcatactagctacaataattctgaaattgttttggcttctggaagtacaagtttccaaattaatgtctgatagaccctatggtcgtaaatgtctgtgaacatgtgagtttcaggaatacaaggtaaagaaaggttatcactaaaacatgaaaagatggccaggcgtggtggctcacgcctgtaatcctagcactttgggaggccgaagcaggcagatcacttgaggtcaagagtttgagaccagcctggccaacagggcaaaaccccatctctactaaaaatacaaaaattagccgggcatgtagtatgcacctataatctcagctactcaggaggctgagacacgagaatcacttgaacccaggaggcagaggttgcagtgagctgagatggtgccactgcactccagcctgggggacagagcgagactccatctcaaaaaaagaaagaaagaaagaaagaagttgttgattatggcaattaatcaggataaagaggccagcccccactccagtaaaaattaaaagccttatgtaacttccctgaagttcactaatacccaaatgcaaataatgcttttcacttgctccagggagactacagaacagggtttgggggaggccagtgggtgagggtgggaggtgcaaaatcaacttcaccttgcagaggagaagcagacacttggccttggctctaggataaaacttggggttcctaaaggacaggcttttctccctcttactgcttcactctttactgtcaaagctatatctgggccaggcgcagtggctcacacctgtaatcccagcactttgggaggccgaggcaggcagatcactagaggccaagagtttgagaccagcccggccaacatggcaaaagcccatctctaccaaaatacaaaatacaaaaaatacaaaaaatggctgagcacagtggctcatgcctataatcccagtactttgggaggccgagtaggtggatcacttgaggtcaggagttcgagaccaacctggccaacacggcaaaaccccatctctacaaaaaatacaaaaattagccaggcatggtggtgtgtgcctgtaatcccagctacttgggatgctgaggcatgaggattgcttgaacccaggaggcggaggttgcagtgagctgagatcgcgccactgcactccagcctgggcaacagagtgaggctctgtctcaaaaaaaaaaaaaaaagctgcatctgttggtgcaaccattttataggtattctgggtctctatttcaagaattttcacagggaagcatgaaaaggactggccaacagaaaaggtctgccacagaatactcggtggcttcctaaactcgattaaggtgacagcctggtctctgggtagtttaaaggacccccagcactgttaaggtgcagctgattcttaagagacttttaatttcccttctgctgccaagagaagtgatgcagcagagtcactatgcagcagttaattcagctttatcctggagaaaataagagtgactttttccttttttagataagcccatggcatcgcacaagccaaaatatgccaccagcccaagcaacgtggcatcatgcatggcagccaaatctcatggatggtatttgtagcttgtggagcctgactgtactaggagaggggtttctaaacgatgacagaaggttgttcattcgtgatttgccaagttctccacactctactagctggctgtggaaatcagtttctcagcccttttgaggaggacaactttgccatgcaagcagagagtgggtagttgcttcagtgtttatatattgatcaatatattctagcaagtcacatttatgacggtttcccaccaagaacaaacccccccaccaaaacaatctcagcttagtgggaaatagtctcaggtgtaaaaattgcttttagtggctgggtgcggtgactcacaactgtaatcccagcactttgggaggctgaggcgggtggatcacttgaggtcaagagttcgagaccagcctcgccaacatgacaaaaccccatctctactaaaaatacaaaaaattagctgggcatggtggcacatgctataagcgcagctactcgggaggctgaggcaggagaatcgcttgaacccagcgggtggaggttgcagtgagccaaggtggagccactgcactccagcctgggagacagaacaagactgtctcaaaaaaaattaaaaataaaaaaatgtgcttttagtttgcaagagttgtgtgcctaggacttcccttgcccagttcagctacttttcactagtttgggaacctggaagaagggagtggaaagatgaataatctagatgctcactatattgttgagggtttttttttttttttttttttgagacaaggtctgttgcccaggctggagtacagtggtataatcacagctcactgcagtctcgaactcctgggttcaagcgatcctcccacctcagcctcccaaatagctgggactacaggtgtgcaagaccatgcccggctaatcaaaaacttttattattattattttttttggtagagattgggtctggccatgttgcccaggctggtcttgaactcctgacctcaagcattcctcccacctcagcctcccaaagtggtgggattacagatgtgagccaccgcacccaaccaaggggctgatttttacgttgctttttaaatcaaggccactttttttttttttttttttttttttgagatggagtctcgctctgtcacccaggctgaagtgcagtggtgcaatctcggctcactgcaagctctgcctcccgggttcatgccattctcctgcctcagcctcccaagtagctggaactacaggtgcctgccaccatgcccagctaattttttttttttatttttagtggggacggagtttcaccatgttagccaggatggtctcgatctcctgacctcatgatccgcccgtctcagcctcccaaagtgctgggattacaggcgctgagccactgtgcccagccgacactttcttagattattagagacatgctcccaagcaaatgtcagtcagagacacacatttcacacggggcagaataatttcaaagtttggctattttaattcaatttcattgttcaaggtagtatgggtatattaagtggttcatttccctcctgaagaaaacaacttctgtctgatgtgattttgtgaaattcaaacatgactctttgactgtttaaaaaaaaatttttttttctttacgtatcttggtaagattttttttttttctgggacatattttttgtaaacctccaagtagtttggaaacacttgcctatttgctcattcctctgggcacagcctttcagagcatttatcccacctgtactgaaaaatctgttttcccaggtggtggtggggccactggatagaagggatcacagagaaatgaggagtgagcgagctttgtaaactacttctaattctcttcattagtatgctatgatccaccccagcttctgcaaggtcagacatgcaagacaagtacttggccaaaacagcaggattctaactagtgtaaaaatagattttaaataaaatagaatctctataggaaagagaattaggttatgctttacattcccactcttaagatatctgtatatataagtccaagagagactcaaagagttggtctgccctaagtaaaaattaagaatgtctgagtacattcattttgcaacattacacgtaaagttttttgggaaatgctgcagcacatcccacaaaaacagatggtgattagtgatacagttgatgtgctaacaagtaacatgtaagacatttaggtcaaaggggatgaggcctaattacaggctaaaaacctattctgaaatgtgatcatttgaaaacctgtggctaattataaagcaaaaactaaaacctgttgtttaacaatacatcttactaacctatccctctacctcttcaagaaactaaattccaacacaggtcttattttaagtttgctcaattactgcaggttataaattatttgacatttatggttccagagagagtacacagcccctctgttggcccacacaagcgttatatgactgttctaaagggggctctgttgaaattctaattttaggatttagaaacagcttttggttatatcttgaaagcgtaattgaaaatctgcccaagctccctctagctgcaacctgaacatgcagcccaatattttgtaaacatttagaaaatactaaacccaacaaaatacacaattagctagtcagaggcctcactctacattttcacacggatgagaaatctccccactcagtcttgctagatgctaggatacccactctgagatttgagtttgggaacagccattaagcctcctccttaattgcggttcataatgacgtacgaagtcaccaaaaataaacagtggagctgccaccatttttcctacactgagtctacccaatgtgccccgggttgtttgtttttcctggctggccccagagcaagaagagatgactgctggyaaagagccasgsmmtkrwtkwswryyaggcctcttttcagataacattcaagcaattcttccactccccagaggaagggggagatgataatgatatgacactattgctagggagttttcataactccttaatagccaatggaaacctctctttaaagcagctgttatgccctcagagaggtttggtgctttagtgctagataaccttacctttgaggttacaagaaataacttaacatcttaaacctaccccagaactgaatgtcaaatacgccaactccataaatacaatggaaaaatgcacagcagagttggggcttctaccaagcaggaaggcaaaatggtcattagaatgtgaggttagtgaactcttaagaccttttcgaacgcagcgcctttctatcagctctccagtcagcaccctttacattcactacatcacacactagcaaatgaaagagccaaacaactgtggcttgatcctcacttgtacttattagggcccaccctcacatttagctgaaggtcccagcacactctcacagtgtcagggagaacagtctcagggatgtctgttgctctgaaggtcacttgcccctcttgctgcggcccttcctggagggcaacttcccactgccccccgaagaggcagggctcgaggccgaggccatggcgatgttgatctgtccctcctggatttcctgccgggtctcggcaggcagatggttgatcttctgctgtgtctccaggtagaacatgacgtcacgcagctgctcctggatctcggtgatctgcagatctttttggtcacaggtctccttcagcaccctctcctcctcttttagcttgttctgcaggaggacttggttggctcgcaaacacttgttcatttcctgctcctctttgagctcgttggtgagtttggccacttttgtgtttagctgagtgcaccttttgaaaaacaaaggaagacaaaagcacatttttcatttgctgacacagtcccctttctgctctgggattgaacagagaaaccatgacctcagaatccctttaggacagacccctttctcccatcgtgagggagaatggttttctgccatcgcaatcagctatgcaaagcaagaattttgctctacttaacacaagtgtatttttttttgagacggagtttcgctcttgttgcccaggctggaatgcaatggcacgatctcagctcactgcaacctccacctcctgggttcaagcgattctcctgcctcagcctcccaagtagctgggattacaggcacctgccactatgcctggctaatttttgtattttgagtagatattggggttcggcatgttggccaggctggtcttgaactcccaacctcaggtgatccacctgtctcggccttccaaagtactgggattacaggcatgaggcactgcgccagtccacaagtgtattatttatttatttattttttgagatggagtctcactctgttrcccaggctggaatgcagtggcgtgatcttggctcactgcaacctctgccgcttgggttcaagcgattctcctgcctcagcctcctaagtagctgggattacaggtgcctgccactgtgcccagctaatttttgcatttttagtagcgacggggtttcaccatcttggccaggctggtctggaactcctgaccttgtgatccacccaccttggcctcccaaagtgctgggattacaggtgtgagccaccgygtccagcccacaaatgtacttttaagacacttttttttaagcatcagaaagttttcagtagcagaaactattctgtgactgacggtaaaaattctactgcttctttgttttgcagtcagtggttaaataggtgccttcgagatgatagctgtgataaggaagttatgaggaaaagtggcattcttggagagtcaagtactctgacttcattgcatttgctgaaggggaaaaaaagggcacttattctaaccaaagggctttagacttgggagtgccctattcttgatgtccagtcttactcataagtaaagaattgcaaatgaaaccaccatttgaggccaggtgcattggctcatgcttggaatcccagcactctgggaggctgaggcgagaggatcgcttcagtaaatgaaacaggaaatgagttcgagaccagcctgggcaacaaagtaagaccctgtctctacacaaaatcaaaaaacttagccaggtgcagtggcgtgcacctgtggtcccagatttacaggaggctgaagctggaggattgcttgatcccagcaggtcaaggctgcagtgagctgtgttcatgctactgcactccagcctgagtgacagaacgagatcttgtctcaaacaaacaacccataccatctgagacccagcagagtggctcatgtctgtaatcccagcactatgggaggcaaaagtgagagggtcactttgaaatcagcccggtcaacatagcgagacaccgtctatacaaaagaaaaattaaaaaactagctgggtgtggtgatgtgcacttgtagacccagctacttgggaggctgaggcagaggactgcttgagcccaggaatttgagcctgcagtgggctgtgattgcatcactgcactccagcctgtctgacagagtaagaccctgtctcaaaaaaacaacaacaaaaaccaaaaacactcacacacaaaaaccacgaacaaaaaaaccccactatttgagatactatttttatgcatcagaacacccaagagctgagacatgagaaaagasgcacttacacactagcactggagcatgaactggtataaactctttcgaagacaacttggcaatatctataaaaacaaaaaatttgggccaggcacggtggctcacgcctgttatcccagcactttgggaggccgaggagggtggatcacgagatcaggagttcaacatcagcctggccaacatggtgaagctccgtttctactaaaaatacaaaaattagccgggtgtggtagcgtgtgcctgtaatcccagctactcgggagggtgaggcaggagaactgcttgaaccctagaggcggaggctgcagtgagtcgagatcgtgccactgcactccagcctgtgtgacagagcaagattccgtctcaaaaataaataaataaaaacaaaaaatttgcatgccctttgacacagctattttacttctaggaatttataccatagaatagatatactcaggattaggtaaaaagagacatggaggaagatgctcattacagtattgcttatagtagtgtgagatttgacacaacttgacacaatcaataggaacctggtcaaaatcattatgcaggccaggtgcagggctcatgcctataatcctagcatttttggaggccaagacaggatcaaggaggaggatcacttgaggctaagagttcaaaaccagcctgggcaatatggcaagaccccgtctctacaaaaaaattttcaattgggcagacatggtagcacacacctgtagtcctagctactcaggaagctcagactaggaggaccacttgagcccagtagctggaggttgcagtgaactatgattacgccactgtactctggcctaggcaacacagcaagaccttatttcaacaacaaccaccacaacagaaatcattatagtacatccatacaattaaacagcatgcagatgttacaaagatcaggatagatttagatgtgctagtatgaaaaaaaatccaaaaacatattttatcaaaaagaatacctagattctatttttgcagagaaaagattatgcatgtgagatatttatgtgggcagagctaaacatctagaagaagaaatattcactggtactggttaataatggttaacactagatagcaggatctagagggtgaaaaagaacttccagtttttgcagggtgtggtggcccatgcctgtaatggtaaaacagtctctgcaaaaaattagccagaggccaagcacggtggctcacgcctgtaaaaccagcactttagcaggcggatcacctgaggtcgggagtttgagaccagactgaccaacatggagaaaccctgtttctactaaaaatacaaaattagccacgcatggtggtgcatgcctgtaattccagctacttgggaggctgaggcaggagaattgcttgaaccccggaggcagatgttgcagtgagccgagatcacaccattgcagcctgggcaacaagagcgaaactccgtctcaaaaaaaaaaagaaaaaaagaaaaaaaaattagccaggggtggtggtgcacagctgtagtccagttacttgggaggctgaggtgggaggatcacctgagcctagggaggtggaagatgtagtgagctggccgaacacagtggctcaaggctgtaatcccagcactttgggaggctgaggagggcggatcatgaggtcaagagatcgagaccatcctggccaacatggtgaaaccccgtctctactaaaaatccaaaaattagctgggtgtggtggtgtgctcctgtagtcctagctactcgggaggctgaggcaggagaatcacttgaatccgggaggcggaggttgcagtgaactgagatcgctccactgtactccagcctattgcgccactgcactccagcctggcgacagagcaagactctctctaaaaataaagatgggctgggcacggtggctcacgcctgtaatccaagcactttgggaggccaaagcgggtggatcatgaggtcaagagatcgagaccatcctggccaacatggtgaaaccccgtctctactaaaaatacaaaaattaactgggtgtggtggtgtgctcctgtagtcttagctactcgggaggctgaggcaggagaatcacttgaatccgggaggcggaggttgcagtgaactgagatcgctccactgtactccagcctattgcgccactgcactccagcctggcgacagagcaagactctgtctaaaaataaagatgggctgggcacggtggctcacgcctgtaatccaagcactttgggaggccaaagcrggtggatcatgaggtcaggagatcgagaccatctggctaacacggtgaaaccccatctctactaaaaatacaaaaaaattagctgggcatggtggcaggcacctgtagtcccagctattgggaggctgaggcaggagaatggcgtgaacccgggaggcggagcttgcagtgagccgagatcgcgccacagcactccagcctgggcaacagagcgagactccgtttcaagaaaaaaaagatgtagtgagctaaggttgtgccactgtactccagcctgggtgacagggaaagaccctgtctccaaaamaacaacaacaacaacaaaaaaaacccgtccggtttttactttgtattctttaacacagttgttcaatttgttagggtgctgaaagtatagggtaatttttaagttttacgtctattaattttgtagtgttgtttttacaatagcttaacaaaattttatttttgttgagacagggtctcgctgttgcccaggctgcagtgcagtggtgagatgttggctcactgcagcttctgcctcccagactcatgtgatcctcctacttcagcctcctgaatagcagggactacaggtatgcgccaccatgcccagctcatttttgtatttttagtggagatggggttttaccatgttgtccaggctggtcttgaattcctgggctcaagcaacctgcctgcctcagcctcccaaagtgctgggattacaggcgtaagccaccatgcctggctggtaatttcaatcagtagcaactatcttcccaaataacagtaaataaggaatgttatcgccatgctgttcatgagttttttgctccatattcaacatctcttgcctttaactcctgcccaaggccacagcatagaacatctccagcttagacacagtctcgttcctaactgccagttctcagccacaatggctcaaagaagccgaaggctctggatggaagaaaattgctttccacaggcaaaaatggaagatatctgcacacactgcaagtgcacagacatcagaagagagcactgcattccacatggcatccatctggtatgaaaccccgcattttttaataaacgagaagcctgttccatatatagggagactcctgaaaacctggtgatacatatatttgaaaatgagggtgtttccataggaatgaaagaaactgtctgtttatagagcctgttacaacagaatagaccgattatacctactttctttccacagactgcttttcttttaggagatcatttagtttgtgctctagattatcacayttctcaattgtttctttaaacttggtcttcatgttgttaatctgaaagagcaaagagaaatcagattcatttcacaaaggtaatgtggtgtgctctttgggaccaacatcatatttttccccccaattatctgtatataactttgacaaaccaaaattagagaaggtgagatatggcagtttccaggcaggggaaaaaaataaagaaaaggtgaggtaatcatttgaaagaatttctgtaataggattaaaaatgccgggaaatctttttttttctttttttgagccagagtctcgctctgtcgcccaggctggagtgcagtgggatgatcttggctcactgcaacctcccgctcttgggttcaagcaattatcctgcctcagcctcccaagtagctgggactacaggtgcctgccaccacgcccggctaatttttgtatttttagtagagacagggtttcatcatgttggccaggctggtctcgaacacctgacctcaggtgatccacctgcctcggcctcccaaaatgttgggattacaggcgtgagccaccgtgcccggcctaatttttctattttttagtagagatgccacgttggccaggctggtctcaaactcctgacctcaagtgaggcttgcctcggcctcccaaagtgctgggattacaggcatgagccactgcgcctgacctaatttttgtattttttgtggagacaaacattggtaatctaagaaacttgtgacacttgactctagttgtttattttttccaattcacaatatttttttcatgtatcatgaagccacatggagtataagcagtccatgttcttttgagtctatttataaaaacaatatacatagactaattcatattacacagccttaaaaacataagagaattaaaaaattctgatgtataacatatcagacggcagccatcccagcccagagtatgttggagtctggctaggtagatactggatccactcctgtgtgaagatctgcgaacttgggaatttcctcaactccactggtctaaggacaccagcaaaagatttggtgggaaggcaaagtcaggaggctgggtgaaccacaaggcaatataacaggaactgaaagtggctgagaatttaagtcatacagcccagggatcagctagacctttctttttaatcattttccatacagcctgcctagcaagtctctaatagcactagctttaataataataataataataataataataataggccgggcatgatggctcacgcctgtaatcccggcattttgggaggccgagacgggtggatcacgaggtcaggagttcaagaccagcctggccaagatggcgaaagcccgtctctactaaaaatacaaacattagtcgggcacagtggcaggcgcctgtaatcccagctactcaggaggctgaggcagggagcggcttgaaccagggaggtggagattgcagtgagccaagatcacaccactgcactctagcctgggagacagagcaagacaccattacaaaaaaaatacaatacaatacaataaaaataaatgttttgttcaaattaactttatagccaacctccactggaagaacatggaagaaagatttcttttcttttttttttttttttttttgagacagagtcttgttctgtcacccaggctggagtgcaatggcgctatcttggctcactacaacctccaactcccgggttcaagcaattctcctgcctcagcctcctgagcagctgggactacaggtgcatgccaccacgcccagctaatttttgtatttttagtagatacgaggtttcaccatattggccaagctggtcttgaactcctgacctcatgatctgcccgcctcggcctcccaaagtgctaggattacaggcataagccaccacgcctggctggaagagagatttctaaatgtacttctctgtcataaaaatcaaaatagatttaaaatcgctcaaattctagttaggtattaattttctcttcaatattattttaaaataacagagcactagatccttttgaaattttcttctaaactgactcctgtcagtttaaggaagttgaaaaggacagaaattactatcctaaggaaccaaactgtacatgtcttggacagtaaagatacttaagccaaacacatttaaatcaagatgaaaatataaaggtaaccctaaaaaggttggttggtttgttttttgagatggagtctcactctgtcgcccaggctggagtgcagtggtgcaatctcggctcactgcaaactccgcctcctgggttcatgccattctcctgcctcagccacctgagtagctgggactatgggcacccgctaccacgtccagctaattttttgtatttttagtacagacggggtttctctgtgttagccaggatggtctagatctcctcaccttgtgatctgcctgcctcggcctcccaaagtgttggggttacaggcattagccactgcgcctggccagaaaggttcttaatattgctacagacaaatgttaacaacgatttaaattagtgcttattaaaacatttctggtccagtgccatggctcacgcctgtaatcccagccctctgggagggccgtggcagaaggtttgcttgagcccaggagttggagatcagcctgggcaacatagtaagattcccccatctctctctctttttttttgagatggcgtctcgctctgttgcccaggctggaatgcagtggcgtgatctcagctcactgcaacttccgcctccctgttcaagtgattctcttgcctcagcctcctaagtagctgggactacaggcacgtgccaccaagcctggctaattttttgtatttttagtagagatgggatttcaccgtgttagccaggatggtctcaatctcttgacctcatgatccgcccgccttggtctcccaaagtgttgggaattacaggcgtgatccactgtgcccggccraccccccgatctgaataaaattttttttttaaatcagccaggcacagtggcaccctcctgtggtcccagctactagggagactgaggtgggaggatcgcttgagcatgagaggctgagcctgaggctgcagtgagctgtaatggtgccactacattctagcctgggcaacagagtgagatcttatctcaaaaaacaaatgaaaaattctgatcattagcccacagtaagaaacacccatgacacacacaaaagtgaaatgagtttcacaaaacaatattaattgtactacatcctaatatttacatctacactattttatctaataaaaatgctagttgtggtccaccaaactcattttacaatccacagctggaaaaatactgattaaaatggagctagacatccacaagaaaagatatacttttagaggaggtcaccttatgactgcctctgcctaccatgtgttcctcatacatggccatgaaaactaagaacctttgaatgtctgtgagcttcatcttctagaataggctgtgctcacatgctataataacggcactacctaaggcactgggggaaagaaacagtgtttataactgaagcccacaatgaatttcaaccttgatccacacccctcctccacatcaacagaaggcccacaaacaagaatctctgtcagtgaaacccagggtccgggttactgtttctccctgaacatgttctactgctgggggtgctaacggacaagggactggccaaaaggaggaccgtggcagaacaaaaggcttgcatcatccattaacttatggataaacgacatttgttactagaaaacaaaagcatccttttaagcaccccaagcgttttatttagagctgctctggcttccattttaccctgacctaaaagcaaacataagtttcagtgtttcgttttcctgccccttgacttgcttttcaatcctagagggcagagagaatcctgagcttagcttcaagggtctggatgaagcacttgaggtagtcacactggtatatcccatggaaaaacccatgagtgcagctgcagtggagctgccaatgcacttcccgtgagccaacttcacagtacgcggcagcgacctgcgctctgctccaacgagagcattgggaggtggtcctccctgcacatactctaatcaaggcctattcagaactagcaaagtcaagtgaccttgagtgccactggaagggcacatgcattgattagaaggctcttgtaagaagttcatcaataacttttaactgcagatcattttaaaactgacttttttttttttttttgagacagagtctcggtctgttgctcaggctggagtgcagtggtgcaatcttggttcactgcaacctctgcctcctgggctccagcaattctcctgcctcagcctcctgagtagctgggattacaggcgcctgccaccacgcccgaccagtttctgcattttcagtagagattgggtttcgccatgttggccaggctggcctcaaactcctgacctcaagtgatctgcctgcctcggcctcccaaagtgctgggattacaggtgtgagccactacacctggcctaaagctgatgttaagcattaatttttacagaccttgattttgcccacttacggcatatccagaaactggggcccatggccctgcctgctaagctccaggatattcctagccacctcagaggtgggccccaagcccagctctgtactgcctatctgaaggcccaaggataggtggggactcacaaggttactaaagtaatcattgagaaattttacaagattttatttcatactaagggaatcactgaattacaaacactgtccctaggtccaaagaaaggttcctagagccataattatacacaattatacacagatgcttactagttttcagactaccttctttggaagtcacagggttccttgcacatactggagacagagctctgggccttccatctgagtttccaccaaaatcataccactttttaattttgctaaagtagtgaatggcatcttttttaaaggactattttgttaaaatttgaaaactgctgccctagaccttcagggtgaataatgaagtgccagtatctctgcccaattttatttccttccatttagaaaggctctgcgccatttcattgccttagaagttcatgtttagctcccaaaggcagcggttcccaagtgcctaactcaaatgacaaaccctcagktagatacttctatgtttttagtggaacttcacaaggcactagaaaaccagactgaggtttaaaaaaaaaaaaaaaaagcaaacaaaaccccctaagaccccaaaatatcaaaacagtcaagcctttaaatccaaagtttctttttagtggcaaaacagttctccacctattacctgcctgagaagggaagatggtaagattcctctttccctgtactctgccttccacaccccccatcagagtgccctgccatgtgtcatttccgcagtcacccaaaccaaacagacttacttcctctgctgtgtccttctctatccgaactatcttgttttcccagtagattcgctgagattccagctggcttgttagtaaatatgaatactagaaacatagagaataaagaccaaaatgtaagtcactgttgtcagcctctgaaatccaatttaaaaatctgatatttaatgatccayagaaaactaaaactaaccaacagaatgtatatttacgccctggttctactctactcaatatatactggaccaggggacacaaatgacattatgcttctgtcttcctggggcttacaatctagtcagaataaatgtacttataaaaacctttattctggtcaagctgactttaagaagaaccacagtggttttaaatctatgtataactcaaataaacttacctgtctccctgaccccatgaagcagtcctgtcccatcctgtcccaaccagcacttgagtcaggcaccccctgactgatagcactgtgcctatcagtaacagcactcaggacagcagcacttcatcaccagtttacctgcctgtctccctgactggactgtgaactctttgaaagcaagggttatatctctactgctgtatctccagtgcctggcacatggtggatgtcgagaattgtttgctgcatgactgcatgaatgaatgaacagtgctgtgtaaccacagggaagggacagatggcgtatgacagtaagatgtgagagaaggcgagatttgagagggtgctgacagatagaagaagaacagataaagacagagatccgagtccagagaactacttgaccaagacagagctgtggacattagaatctcttcagaaatgaatgagtaacactaatgaggctgttgtaacactaatgtgccaggttaggagatatggcaccagtggaaggctttggggtattataatattgacaaatatgggcaatggggaacccaaggccaaggagtggcaaggtcacatctccattttggaaaaaccattctagaagactagaagagatataaacatgtctgcagactacagagagggcaaggagaagaacacctatgctactgaaccctaagctccatgagagcagggagtttgttcaatactgtgtttgcagcactagcaccagtggctgacagcaaagatttttcttttttctttcttttttttttgtttaaaactgggtctcattctgttgcccaggttggaatgcagtggtgcaatcacgactcactgcaacctcaacctcttgggctcaagggatcctcctgcctcagcctcctgagtagctggaactacaggtgcatgccaccacacctggataattttttttaaaatttatttttagtggagacaaggccttgttatgttgccgaggctggtttcraaatcctgaactcaagcgatcaagccttgccctcctgaagtggtgggattacaggcataagccaccatgcctggccaataaatattcctttctttttggagacggagtttcgctcttgtcgcccaggctggagtgcaatggcgccatctgggctcrctgcaacctccgcctcccaggttcaagcgattctcctgcctcagcctcccaagtatctgggattacaggcgcccaccaccacacccaactaatttttgtatttttagtagaagtggggtttcaccatgttggccaggctggtctcaaactcctgacctcaggtgatccacccacctcagcctcccaaagtgctrggattacaggcatgagccactgtgcccggccagtatttcttgtatgaatagaatgcatgtacatacttaatgtggaggatttactaattctaaatacttaaaagtgtttgatctttattaatacaatgatttattaataacgatataaaactcattttaggccattttactatcagacctttaagagtcttgaaatgagcaagttttcaaatgtccacttcctcctaaggttaaggtatgtttctaaaacaacattttttgaaatttatataaaacatgactcgtggccgggtacggtggctcatgcctataatcccagcactttgggaggctgaggcrggcggaccacgaggtcaggagatcgagaccaccctggttaacacagtgaaaccttgtctctactaaaaatacaaaaaattagcygggcatggtggcacacacctgtagtcccagctactcggaaggctgaggcaggagaatcgcttgaacccgggaggcagaggttgcannnnnnnnnnnnnnnnnnnnnnnnnnnnnnnnnnnnnnnnnnnnnnnnnnnnnnnnnnnnnnnnnnnnnnnnnnnnnnnnnntttttttttttttttgagacagggtcttgctctgtcacccaggctagaatgcagtggcacaatctcagctcactgcaacccctgcctcccaggttcaagaaattctggtgcctcagcctcccaagtagctgggattacagacatgaaccaccacgcccagctaattttagtagggacagggtttcaccatgttggccaggttggtcttgaactcctgatctcaggtgattcgcctgcctcagcctcccaaagtgctgggattacaggggtgtgagccactgcacccagctgacatttagactttcaaagaagaaaaacagaataaaaatattttaataacacctcacagcaatgaccaaacattttttttttttttgagacagagtttcgctcttgttgcccaagctggagtgcaatgacccgatctyggctcactgcaacctctgcttcccaggttcaagcgattctcygcttcccgggttcaagcgattctcctgcctcagcctcccgaggagctgggattacaggtgtgtgccaccatgcccagctaattttttgcatttttagtagaaacagggtttcacgttagccaggctggtcttgaactcctgaactcaggtgatccacctgcctcagcctcccaaagtgttgggattacaggcataagccactgcgcccggccatgaccaaactttaaaaaaaaaatgtacatccaggtaaatgacaaatatttcaaattagaatagtaaagagcagtagaaacagatagagtgataactcattaaatctcttacctctaactgtaaggcatctattttctcttcctggcaagtatccccctcacattcatactgtactatttttccatctgttttacttgcaaccagtcgatgaacatagttatctacagaaagagtcaacaaaagtgtgtttctttagaatgaaaagggtctctgtacacttttaactctgacaaaatttttttttcagatctaatttaaatgccttacaatatttctttaaaagtgtcaaatcatttgaattttagaggggagggagaaagcaagaatggaagtattaactccctttataatgtgtgattcaagacattcctagaaaaatagtgccctcagggaaactgagaatttgggtttgcaacagctgtcaaaagatgacatttcaagctgggagggaaagtgaaggcgttgtgaaggcaaagtttccacacagaatgagtccaaattagaaaagwgagtggtattcacctccagcatagtcccagactcgatggttggtaagctgcatggcatacgtgtgctgcgtttcctcaaagtgcttataagcatgtcgactracrtaccgtccacatcctatgtggccgcatattaaacaaatccaaagattctgccggaagaggtaagatcttaattagttaaataaaaataaatgatctggctgggcgcgatggctcggaggccgaggcagatggatcacctgaggtcaggagttcgagaccagcctggccaacatgatgaaaccccatctctactaaaaatacaaatattagctgggcgtggtggcagctgcctgtaatcccagctactcaggaggctgaggcaagagaatcgcttgaacccaggaggtggaggttgcagtgacccgaaatcgtgccactgcactccagcctgggtgataagaacaagactctgtcttaaaacaaacaaacaaacaaataatcgatccagctcactcagagtgggaaggaacctgagacactagaagacagaattgttggttgggcacagtggctcacacctgtaatcccagcattttgggaggctgaggcaggagtatcgcttgagcctaggagtttaagaccagcttgggcaacatagcaagaccccaactctacaaaatgttttttttgtagaaaaaacaaaaacaaaattttttagaaaaaacaaaaacaaaacaaaacaaaacctactaggccatggtggcatgcacctgtggtcccagctgcttgggaagatgagatgggaggaaggcttgagcccaggtatttgaggttacagtgaactatgatcatgccactgcactccagcctgggtaacagaatgataccctgtctcaaaaaaaaaagaaaaagaaaaagaaaaaactgtttctacaggagcctgagtgattaaatgtatgtttaaaacccaacaatcaaggatgcttttatgggtcattttttttttgctgatttctaaggagcactatgtgaacagcaagaaaaaaattcacaattcatcagtaaaagtctaagcctttcaaaagtgcaaagaaaaaaggaataaatttagctcaggagtaacataatttgtgtattcatatgtcttgcccaaccctagacaaaaagaaaaaaaattttaaagaatttaggctgggtgcagtggctcacacttgcaatcccagcactatgggtggctgaagtggaaggaccgctcgaggccaggagttcgagaccagcctgggcaacacagtaagccctgtckcttaaaataaaaaataaaaaataaattaaaaataaagaacttaagtcataccaggcagaagaaaactcatgacaattaaagctgcattctttgttcttttccatcacccattacttacttcctgaacaccacactcaaaacacttattttcttctactggctcgggcgtttgacagtaccggcaaacaggacacctatccaggacaccaaaagataatggtgcaggttaaatataaaagacagctgttacrgaacccaaaagtcaaacactggattttatatcctcctcctcttatatgctatttttatcataactaaggatatcacttaaaataaaatatacaaaataaaaatatacaaaatcttgataaaacagagaacagagaaattgggatctgcctcatgtccttttccgctcttatgtctaaagcttagatgatcaaagagctaagtatttacaggttacaattaggacttcatttcatgtctgattatttataatttttttttttttttgagacagagtcttgctctgttgcctgggctggagtgcagtggtgcgatctcaattcactgcaacctctgcctcccaggttcaagcgattctcctgcctcagcctcccgagtagctgggactacaggcatgcaccaccacacccagctaattattgtatttttggtagagacggggcttcaccatgttggccaggatggtctcgatctcttgacttcatgatccactggccttggcctcccaaagtgcttggattacaggtgtgagccacagctcccagcttgtttttttttttttttttgagacagagtttagcttttgttgcccaggctggagtgcaacggcatagtatcagctcactgcaacctcagcctcctaggttcaagcaattctcctgcctcagcctcctgagtagctgggactacaggcatgcgccaccacgcccagctaattttgtatttttagtagagacggggtttctccctgttggtcaggcttgtctcaaactcccaacctcaggtgatctgcctgccttgacctcccaaagtactgggattacaggcgtcagccaccgtgctcagcctataatgtatttttactccaacaaacaacctgccttatccccatttcccaaagatttaaatcattcaaaaagtaccctttcttctccaggttgctcctaagaattggatttaaaatctgtagtaaaaaaaaaaggttttttttttttttgtgagacagagtcctgctctgtcactcaggctagagtgcagtggcgcgatctcagctcactgcagcctctgccacccaggttcaaatgattctcctgcctcagcctcccaagtagctgggattgtaggcatgcacccccatgcccagctaatttttgtatttttagtgggcatagggtttcaccatattggccatgctggcctcccaaagtactgggataacaggcatgagccaccgcacctggctaaacacaaaggtgttaatgtacttattgaaatgcacatgatatctcactgcaccgtgaacatcatgtggaagataccagtgctctatcaggcattcatgtctcaatttacaaaaagccaataaaaacaatgttgaaaaaatccattaactgttttctattatactccacacaaaataatactaaatactagtcatgagtatttttgttagatgggcaactaggacagaaagtgggttatagctgaggctgactgaactggcaccaggaagaaacaatgctcaagatataactagtggctaggcgcggtggctcacacctgtaatcccagcactttgggagacctaggcgggcggattacctaaggtcgggagtttaagaccagcttgaccaatatggagaaaccctgtctctactaaaaatacaaaattagcagggcatggtagcacatgcctgtaatcctagctacttgggaggctgaggcaggagaatcgcttgaacccaggaggcagaggttgtggtgagctgagattgcgccattgcactccagcctgggcaacaagagcgaaactccgtctaaaaaaaaaagctataactagtaacagttacccaactaagtaaataaaaccaagaaaatggaataaacaggaagaacactgtgtcacagatgacacagctctatctgtgtaagagaaaggaaaggatctagtccacttcttcctttagcatcaaaagagaagacagaagacaaactcaaagaaagaacagaaatggtagccagaaagcagaatgcagaaagtagaaattggctttgtctcatcccttcggtctgtgtggtggctgtgaaagtggttgaataagaaaacaggccaggtgcagtagctcacatctgtaatcccagcactttgagaggccgaggcaggaggatggcttgaagccaagtctaccctggccaatgtggcaaaagcccttctaaaaaaaaaaaaaaacaaaaaactaaaaacaacagaattagatttcagaactggttctgaaatctaattctctacactatgcccaaatgatcaaaacgatctttctgaaatgtaaatttgatcttgaaaagaaaaaaaaattacaagaataaacttgtaaacaaacaattagcattctatgatatactacctcatctgtctactaaaaaataatcaacagtttatcggccaggcacagtggctgacgcccataatcccagcactctgggaggctgaggtgagtggatcacctgaggtcagcagttcgagaccagctgggccaacatggcaaaaccccatctctactaaaaatataaaactagccaggtgtggtggtacatgcctgtagtcccagctactcgggaggctgaggcacgaggactgcttgaacccgggaggtggaagttgcagtgagccgagatcacgctactgcactccagcctgggtgacagagtgagactccatctcaaaaaataataataataataattaacagtttattaaattcttcctgcctttctctgcaaaaaattattttatcctattttcctgatgagatctttgggagctcttcccaaagccttctctgacatctctatcaaaaagaccaacactgcctcctactgcagcccttcctgagtacccctggttggggatgccatcattctctcttccaatctccaccctgaaccacatgtgtttatgtccaagtgtaaactctcttagaccaaaccaccccaaagaggacctgaatttgcttcctctgtctcagcatctctcacagttctatgcatgtaccaaggctcaaaactcattaaatgaactgcatgattctgagggcaaatggcatgtcttacatcccatatgacaggttgaattctagtcccagttctggcattctctggccatgacactttgagcttgcaaattcttatctttgggcctgtgtcctcctcctgtataaaatgaggttgttggaaaaaatggtccctgaggaaacttccaactttaaaatgctatggttctgtaacagttaatttatatcaaaaggaatactggggatgggtatcgtggctcatgcctacaatcccagcactttgcgaggccaaggcaggaacactgcttcagctcaggagttcaagaccagcctagacaacatagcgagaccccatctctacaaaacaaacaaaaaaaacaattagctgggtgagatggtgcacacctgtagtcccagctacttgggaagctgaggcgagaggatcacttgagcccaggagtttgaggaggcagtgagctgtgatcataccactgcactccaacacgggtgacagagcaagaccctgtctcaaaaaaaaagtaaaactggagtggcggggaacaaagaattgcctagaacttaactggtatagcagatggactgaagatacaggtaaacactttaaggaatgcacatatctcagtatggctttgttcaaggcaactggacaattccttggaaaactcccaaatgatacctaagaattgactgaggactccacggaattggagcaagactcctgtccagctaaataagcagggcagtgataagctgcagagacccagtttatttatgtgctcctcagtgtctaccactgtgtgccacgtcccccaccaggtgtgagagacacagcagtgagcaagccaggcatggcccccgctctgtgaagctgatattcttcttccggccaccaggccacttgtgggtggacagagattcctgtagactttcacccctcctcacttctgtgcttgggaacatgatcttccccttcccccactgccttctctgggttctgctctttacccggcttaactcctaattaccctcctggagatgccacttctcaggtggtcctggcttcattagggccccagttctcagtcccaatgctgcacactgctcttctgtaacactggttatggctgtgatttatttacttgtgtgatttcatttctgggttcccctctgtactgggaaatccagaaggccagcatctgatacacctttctggttaagtcccacagtgcagtctgcaaagggagcaaccatcctggatttagggggtaaaaaaaaggtacaggccttacctgttctttgtctgtagcaacatcacctatgactaagacctggtatgttgggaatcaggaggctgtagagtagatctcatacttagtaactgctatttctactggccaccaagccatcaacagcccagcaaagctaaaatattaggctgctgtagcccagttgataagaagcccagagtgaatggcagacaccaagtgcagctgatacatgagattccagacctagatttcaytgcagcacgagagcctcaaactaagctttgcttttttttttcactctctggctcttggaaggaaagaacaactcatgctgctttggggaattccacaagggttcagaatcagcatactaaaaaaggacttggtctcagaatgccgattccctgaacttaggaaagggaaggagaaaaaggacctcttgaataaagtcaaatacttggaatggttcatttctgctggtggctctttttaattctggaagggttgcaatgggcttgtacacagaggggttcggcccctgcactcacgtggtatcgtcccagcgctgtagacactggctgtggaagctgtggttacataacgttgtgaggatgccattcacagactcgtccatgcgctccagacacaccgtgcacttggggagttcagtcaggtccatcactgggaggctggcrccctacaggaaacacctcacataagcctcactcttcatctaccagcaatactttatttttccttcttttttctgagacagggtctcgctctctgtcacccacgctggagcccagtggcgcaatcatggctcattacagccttgacctcccaggctcaagagatctgcccacctcaggctccccagtagctgggactacaggcatgagccactgtgccaggcctttcttcttttaataatagttttctagttgcttttttgactcctggcaggatatcctcaatatcattactctaagcaagtaatttaaattggtaatattttcattcatttattcattcattcaagaaacagggatggagtacctcctgtgttccagcactgtgccaggtactgggagtacagcggtgaacaaaacaaagatctctgcccttacagaactgacattccaggaagggagactgctgtcaaaaccttaacatataaatctcaaatgtgaccagactcctagctcaagctctaagtgtctacgactataatagaacacaaaggaacaaaagaatagctggacctgaaggatttttccatagagtaagttataacttaacactttctactcagtgatgacagcaccaacaacactgatttttctttattccctcattgtacagatagagattgagcccctgctatgtgcagcagacagacactgttctaggtgtggaacagtggtgagcaaaaacagatacgttaagtccaaaaaacagtcagctcctgcccccacagagtttagaatctagtggagggagagacaaaaatcaaattaaaaagcaaacagtacaggaagccacaacagggtgtgaattagggggcatgacagtctagatggtcaggaaaggcattcctaagacagtgcttgacttgacgcttccagccagaagacgagaaagaattacttaggcaaaggtcagggagcacacacttatggacagagaaaaagcacattaacctacagtccctgaagagtagatacttacaggaaatctctcaagaagccacgttcatttaagaaaggaatctctaaaactgaggcctcgtgcagcagccagcacaaaggatgcccaattttatcacgtcaatttttttttgagtttgacaaatttatcggtattttagtaaagacattcatctcagttgtttctctctcccagcttgaccttaggttaatatttcatttgggtcaagaaaagaatatctaggagaggtatgttaacaaacaggaaaatggacaaaaattgatagtttgcctacattaaagtaagttaaattcatgtattttgatataattaaatcatgtaagaactaagagttctatatacatttccattgttttacttggggctcattctaaacttaaatgctagtgaacaagtgttaggaatatacacaggatgcttctctggagttattaccaactaaaagagctcagcgagcagttaccaccaataaaacagtctgaagctgcctccaaatataatattgtaggagttttcaaggaaatgtttatactgtatgcttcttttgtctgtgactatgcttttaaagatgtgtttaactgtcacattaaaaaagatgccgggcggggtggctcacgcctgttaagtccagcactttgggaggccgaggcgggtggatcacaaggtcaggagttcaagatcagcctggccaagagggtgaaaccctgtctccactaaaaacacaaaaaattagccgggtgtggtcgtgggtgcctgtaatcccagttacttgggaggatgaggcagagaatttcttgaacccaggaggtagaggatgcagtgagctgagatcacaccactgcactccagcctgggagacagagtgaaactccgtctcaaaaaaaaaaaaaaaaaaaaaaaaaaaaaaaaaaaaaaaaaagctcatacacaatacaaaaatacaaaaactaacaccctacaatatacaaatctcacaaagtatatgtggtgagattccaaaaaaatgtttgaagatgcattttctttccttctactccagtatctaaaatgtgctttttgagaggccattggtcaacatgtatacatttaaaatcaaccatgtaattttactagtaagaaagctggggctggcacggtggctcacacccgtaatcccagcactttgggaggccaaggcaggcggatcacgaggtcaagagtttgagaccagcctggccaacgtggtgaaaccccatctctactaagaacacaaaaattagctgggcatggtggtgcatacctgtaatcccagctactcaggaggctgaggcaggagaatcacttgaacctgggaggcataggctgcagtgagccgagactgctccaatgcactccagcctgggcgacagagcaagactccgtctgggtcggggcggggtgtgggggaagccagtagttaagttcaatttaaattggattcacaagttagtaatttaaatcctcagacaaagttacagaaagtgtatcttcttgttttccatcttcatacaatgttaaattttttttttttggtgtttatactttttaaaaaaataaaaatagtcaaatgcttaatatgtacatttaattttttggtggtggtttgtattttaaaaraaacagcttccttatgatttggctcaagttctggtggaaatgcttacagcaactagctaataaacaaaaaacaagagaagcacattcgaaatactgatttactttggtagcaaatggtttttctttgaagacaaatgaagatacacaagacccattaaggtgaagtgggctatttcaaatattcaacagtttacattaaaaagaattctttttttttttttttaatttgttttttttgagacagagtctcgctctgtcgcccaggctggagtgcagtggcacaatctcggctcactgcaagctccgcctcccgggttcacgccattctcctgcctcagcctcccgagtagctgggactacaggtgcccaccacaacgcctagctaattttttgtatttttagtagagatgggttttcaccatgttaaccaagatggtctcgatctcctgacctcgtgatccaccctcaacctcccaaagtgctgggattacaggcgtgagccactgcgtctggccaaaaaaaattcttttaagagctaagcatctgtatccactgatagcaatgcaatacctactttatgatgacttgaaacaaaacaaatgcctataaggaaaaaagctgcattttaattttatctaaatttacgttcagtcaatagttaagtaacgttttcctcccaatactccctgtctctagaaggctgttcctgggagccagacaagtttaggtaataagggagttaagagagtaactgcttacagttttaaacagacaataactatttgcttctctctcttttttttttttttgagacggagtttcgctcttgttgcccaggctggagtgcaatggtgtgatcttggctcaccgcaacctctgcctcctgggttcaagtgattctacctcagcctcctgagtagctaggattacaggcatacgccaccatgcctggctaattttgtatttttagtagagacggggtttcttcatgttggtcaggttggtcttgaactcctgacctcaggtgatccgcctgccttcgcctcccgaagtgctgggattacaggtgtgagccaccatgcccggctttgcttccctcttaatgtgttaatagttgtctctaaaaatatatgcaattcttaaaaaggtaccatttctgatttattatctgtaacctttggaaactaatcacatgaaactacaaaattagcaaatgtcttgaaatctgtatataaaacataaattacctctaattttgaaccctaacttattagtgtacagctcaatatttaaacaaaaaatgaaagagaaaaaaaaagtggctccaaaaatagtcttataccattctttaaaaaaggaaactgttccttttaagtttacacccaccccacaccccaatttcaaaacatcgtttaattgtcttggtcattgacatttccaacataagattttatatttcgctcccatagcttctggttatcaaaaaacccatgctttcytttattgaaggagtttggtccagctgatgttggtgtatcccttccaatattcttcatcttcatctttgcttctggagatttcctctggttcactatcttcatcttcattaaaagctgctgctcctgaaaaagtgcttggagcaagagttggaacagtttcttttggcttatttgatccaagtttgatggatattgttgatgctttctttgtcatccaactaaggcaaatccaaacttggagatcactgtaggctttgttgggaggtctgcagcttcttcttcatctgaccgtttctcaatgctgcgactggaactttcccctccattactggaagaaacagttttagttttcacaagtttttctgcctcttcttcaggtcctctggcagctccagctcgctgagacttttcagccttcttctctcccatccaacattttcccccgccacccacttatcaaattttgatttcacctaatcaaatgctaaaacaatctactcagaactaacttccatcaagcggatctcaaagtaaaaagaccttcaggtctacttaattttttaattttgttttttagatgggagtcttgttctgttgcccaggctagagtgcagtggcgcaatctcagctcactgcaacctcggcctccggggtttaagcaattctgcctcagctccggagtagctgagactacaggcatctgccacgacaccaggctaatttttgtatatttagtagagatgagtttcctcatgtnnnnnnnnnnnnnnnnnnnnnnnnnnnnnnnnnnnnnnnnnnnnnnnnnnnnnnnnnnnnnnnnnnnnnnnnnnnnnnnnnnnnnnnnnnnnnnnnnnnnnnnnnnnnnnnnnnnnnnnnnnnnnnnnnnnnnnnnnnnnnnnnnnnnnnnnnnnnnnnnnnnnnnnnnnnnnnnnnnnnnnnnnnnnnnnnnnnnnnnnnnnnnnnnnnnnnnnnnnnnnnnnnnnnnnnnnnnnnnagtgatggcgcatgcctatagtcctagccacttgggattttgaggcacgagaattgcctgaacctgggaggtggaggttatagtgagccaagatcacgccactatactccagcctgggtgacagagtgagactcatgtctccaaaaaaaaaagaaaggaaaaagaaatcttaatcttaaaatatatcttaaaataaagagctgtattgctactttacaaaatgattccagtgaccacataatataggaaaggttcccatgggagtgaaagatcagagccatcacaaattgctatcaaaacagaatcaacgccatgcacagtggctcatgcttataatcccagcactttgggaggccaaggtgggcagatcacttgaggccaggagttcgagactagcctggccagtgtggtgaaaccccatctccactaaaaataaaaaaattagcctggcatagtggcgtatgcctgtaatcccagctactcaggagggtgaggcacaagaatcgcttgaacctgggaggtggaggttgcagtgagccaagagagtgccactgcactccagcctgggcaacagagtgacactctgtctccaaaacaaaacaaaacggaatcaagaggccaggcacagtcgctcacacttgtaatcccagcactttggaaggccatggtgggaaaaatgcttgagctgaggagttcaagaacagtctgggtaacagagagactttttttttttttttttttttttgagacagggtctcactgttgcccaggctagagtgcaatggcaagatcacggctcactatagcctggacctcccccgactcaggtgatcttcctgcttcagggtcctgagtagctgggaccaaaggtgctcagcatcacacctggctaatttttgtattttttgtagagacagggtttcgtcatgttgcccagcctggtctcgaattcctacactcaagcaatccatcacctcggcctcccaactcctgtgctcaagcgatccgtcacctcagcctcccaaagagctgggattataggcatgaaccaccgcgcccagccagggtgatcttgtctctaaaacaaatttaaaaaattagccaggcgtggtggtacacacttgtagtcccagctacccaggaggctgaggctagcagatgcttgaactggagagacagaggctgcagtgagccaaggtcacaccactgtgctccagcctaggtgacacagcgagaccctgtctcaaaaataaaaggcagaaacaagaattaggagttaatattgaaaacaaaaacatttattttcagctccaggcttcgttgatctagaattgataaacactcaatttcaacaatgcagtatcttttttctttttttttacgttttttgaaattttagaaaatgagatattcaataaaattctctattttaaagtatacagttcattggcttgtagtatattcacaaggttgtgcaactgtcatcactatctaattctagaacacgtccatcacttccagaagaaagcctgtatcctgttagcaggcactccccattcgtctcttcctgccctgataaccaccagtctactttctgtgtctatggactggcctattctgggtatttcacagataccttagcattcaattttacaccaatctgatatattttaattaaatataggaacaattcacacttacatcttcagatttgagcacttcagcyctttccacatacactagctggcaaacgtcatcttctattgagttgaactggcggccattgcatgtcatataaaaactatccgcatcagcctatgtacaccaatggggaaaaggaaaaaaattaagacagataccctgaaaatctgctttatattcaatatgcatggctttattcattctcatcagcttttaaaatttatacttaggagagagagcaaccaccaaaagtcacatctactgaagctgattggtaggctaatcacactctgtaagtcaatattccatgtttacagtatttcctgggctacaacagagtttttacctgaactggcagaaggtactgaagtgcaacaagctgaaagctggtacaattttcatattcaaccagcaacagtcaacatttcccttaatagcagttttttttccctctagtcatcacttgtgcagctgaaagtaaacactcatttctgcaaagcctggaaccaaataataactgacgcttgttatgaaagaactctttaaggaaatgtcagcattgggctgggcgtggtggctcacgcctgtaatcccagcgctttgggaggccgaggcgggcggatcgcctaaggtgaggagtttgagaccagcctgaccaacatggagaaaccctgtctctactaaaaatacaaaattagccgggcctggtggcccacgcctataatcccagctactcgggaggctgaggcaggagaatcgcttgcacccaggatgcagaggttgcgatgagctgagatcgggccattgtactctagcctgggcaacaagagcgaaacttcatctcaaaaagaaaaaaaaaaaaaaaagaaagaaaatgtcagcacttatgttagaaaaaaataaaagaccaggggaactggtatgagatgaaaaaccaactactctttaataaaccaaataataataataataatatatgatagttagatcccatctaatgggtcccatcaggaggtcttaaaccgccacctagtgtccaataccaaaagcaaagctcttggtcaaggtcaaggggcccaagatgaaccagcctttaaaatactaacagtctcatttgctagcgttagaaaatgggtgaaatgtggacaaacagtccctttgaggcaaagctgcaaaggcacatgtgcgtctatgaaatggacacaggtaaacagaaccttctagtctagccttagtagcaagcaatggagaygattccagtttttaaactcagccaattttttaaggcaagcggggaggccaaggcttgtctggattttattcccatacgggcattaatccaaacacagaaagttatgtgctttggccctaccaacattgacaggctgcttctgggaattctgcaacaggaaatgcagcatcgtcaaccttaaggaagagattcagggctgcaccaggcaaaaatattcctgcctgtccaccctcacaaggttctgaatctcacagacactgtaagcttctcgatagcttttaattcccctctaatgaggtaattgtgaattcttgattacttatgcttcccccccaccttttttttttgagatggtgtctcgctttgtcacccaggctggagagcaatggcatgacgtcagctcactgcaacctctgcctcccaggttcaagcaattctcctgtctcagtctcctgtgtagctgtgattataggcatacgccaccacacccagctaattttttgtattttagtagacacagggtttcaccaagttacccaggctcgtctcgaactcctgagctctggcaatccacccacctcggtctcccaaagtgttaggattacaggcgtgagccaccgcgcctggctacttatgctttcttaacatgaccaagtgagctaagcagctgaggaaggatgatcaattctgaatatacttttattttggaggggcagagtggcagcaggtcggggtggagaggctttacttaagaaaataatccgtgtattgagcatagtgcattacaatttgaaaatgtttaaagccagctgttggagaagaagcctctttaatactaagaggttacaacctaatatggcttcccccattcttcaggagcaacggtttcttgaaatgcttttggctaagtaagcagcaaagtcagcacatggattcaccaggagaaaacggactgcctgaaagtcagggccttctctcacctcttcagagcctcaggcaccaccagtggctggtagagccctcttggggtctagagctctgcaaatgctcactaaacgaccagcctcctctacaggaaaggataaggcatgtgaccaaaaccattcaatgaattattcctttctgctacctgagcccaggagtttgagaccagcctgggcaacgtggcgaaaccccatctgtacaaaaaatacaaaaattagccgggcatgggggtggaagcctgtagtcccagctatttgggaggctgaggtgggaggatagcttgagcccaggaggtgaaagctgcagtgagccgagatcgtgccactgcagtccagcctgtgcagcagagtgagaccttgtctccaaaaaaaataaaataaaataaaaaaggagaagaagcatgtaggtgagttgtcatggtggcctacactaggatgattgtggcagaaatgaaaaaagtaaaaagaaaaagtacttttttgtaatgacaacatcactaaacagctgagatttcccaattaacatattgatctcttctttaaaatcttggtattagaaatgcaccttcacctgttcacatattttctgagcatctagtatgtgccaggccctgtgctatgtactaggtagagagtagggaacaaactacacatggttcctacttcaactcaccatctaaatgcactaaacaaaagcctgaagctaactgccaagaacattgcagaaacagcttttattgaaaatgtttgcattgtgtggacccaaaactttaaataaacctggcttttgtttccctctagtcctttggttttattgttctcttctgaggattaactcagaaaaagacaaatccattatgatcaagttccttcgctgtcacaggaatcaactacagtgttgagaacatacctctacttctccaaggaggtgtctgctaaggctgtggtaactaagcacgcaggtgaaaaaagccaacatactctattaagtggtcatctgtccttttctgcccccaagaacaacaaaattgaacttccttctgcttttcctatgtcctgaagaactgtaaattctctacccaaagaccaagtttcctaagggtcacactacaaattggtaagcacaccccccctttttttttgatcttttaaaaaaaatttttaagaaacaggatcttgccatgttgcccaggctggtcttgaacccctggccttaagcaatactcctgtcttggcctcccaaggtgttgggattacagacatgagccaccacacctggcctcacaactctttcagctaaagctaaggccaacagaaattcaaaaattaccaaagataaagagaaggcttataagtccttatttaaaaatctgtggtgaggaaaagaataaaaacatagttaggtgcccaggctatggagtcaggctgcctaggtttgaaccctaactctgacacctactagctgtttggctgcaggcaagtgacttatctgtgcctgtttcctcaactgtaaaatacatggcatttttttttttgagacagagtctcgctctgttgcccaggctggagtacagtggtgtgatcttgactcactgcaacctccacatcccaggttcaatagtttctcctgcctcagcctttcaagtggctgagattacaggcgtgcgccaccacatccagctaagttttatatttttagtagacataagcttttaccatgttggccaggctggtctcaaaccactgccctcaagtgttccgcccaccttggtctctcccaaagtgctgggattaaaggcatgaggcactgcacctggccaacatggcatcgttgagaggattcaaggagacaatgcatggaaagcacttggcacagggtccggtctctagtaagtgcttcagagttggtagctactgagcctattattctcactacagccgatattagtttaacttccagtcttacaccaagagggtattattaggtattagaaaatccctgttaggatgatagggattagcccctaagacccagagttagcaataaataatacaactcatgataccaagataaagggttctagccccatggggaagagcatgcagcaacctgtttcgcagtctcagaaaaacatgtcaacttgagcaaccttcacttgatcaaaagacacaaggggaaggatagtgcagatgtacaaggaaaattcattcacagtaaatatccacagtactacctgcacattatgaagggcagtacttgttatagggaactgtgtgggtttattaaacaggtgactgtggtggatttatacgacttcagactatttcaaaagcctgagtgctcttcaacatttttttcccaatctatttctgggtcttttcctttgttacttgcttattgccctagttgttaagtagaaactgtaacaatactgctgtcatagaatgtctcacaaacaaccgcctcccttccccacaccttcatcccactcctactagaagaggaacgcgtccctggaattaaaagtgagggtgccacactcttgcttgtcatttatgtctagctatgtaaccttgggcaaaccatgtatctccctctgcagtcaccctcctcatctgtaaaacaaagataacaacacagtttccgcaagggattgtagtgaggattaaatgagacaaagtgtattgaacacttagcacagtgagtgatacagaagccatcgataaacgttggatattatcatcattatccwtattacatgtgctaccagactgaaatggcttaaggcacgattttcccatggtttgcaaagctccttggcacccttggaaggctttctgatggacagtgaaaggagctattcaagtgcttttctgttcttaatgtcaacttgtaaactttaaatccaaaggataattgaaaccttttaaatgtctccctaaatgatggggtactttgtaaacagaaaacataataactgtgtactctcttgcagacagaactccacactaaagcttctctctggagatcacagaacaggtacactcttcccccactaaaaagagaatgaggccgggtgcagtcgctcacgcctgtaatcccagcactttgggaggctggggcgggcagatcacctgaggtccagagtttgagaccagcctgaccaacatggagaaactccgcctctactgaaaatacaaaattagccaggcatggtggtgcatgcctataatcccagctactccggaggctgaggcagaatggcttgaacccaggaggtggaggttgctgtgagctgagatcgtgccattgcactccagcctgggcaacaagagtgaaactccgtctcaaaaaaaaaaaaaaaaaaaatgaaagaagtgggggtaatggaaaaataataagatggtgttaacttcaaaaagtctgggaaccaccgcttttctggaatagttaccgcttgtttaaaaaaacaaacaggccgggcatgatggctcacgcctgtaatcctagcactttgggagactgaggcgggtggatcacaaggtcaggagttcgagaccagcctggccaacatagtgaaactctgtctgcactaaaaatacaaaaattagccaggcatggtggtgcatgcctgtagtcccagctactcaggaggttgaggcaggaaaatcgcttgaacccgggaggcggaggttgcagtgagccgataccacaccactgcactccagcctgggcgacagagcgagaattcgtctcaaaaagaaacaaacaaaaaaacacactagattttttttttttttttttttgagacggagtctcactcttgccacccaggctggagtgcagtggtgtgatgtcagctttctgcaacctctgcctccttgcaaaaccctaaacttcatactcaatctgatctataaaaaatcatgggcatgaggccaggtgcagtggctcagagcatctgtaatcctagcactttgggaggccaaggcaggaggattgcttgaggccaagagtagcctggaaaacacagcaagatctcatctctaccgaaaaaaaaaaaagtgtatacgttataattgtatttctgctaatgaatttagaaatacatctagaattacaattatatcttagaagacatctcaagaatcttaagtgcaaaatgttgtaaatcacacacagctatcatacagtttgaataccacagtttctgtggcaaagagatttttaataaatttaataacttttacctgtgcacgaaactttatcagcaccatatattggttgggagtagagtctctgataattttcatttgttcaattacttcgttaaatggggcaacaaacttcataaggtcatgactggtcattgcagcagggactgtgagaatacacagcatggcactgcgccgcacatcttcttttaaggaggtcatcttactaacaaaaaaaaaattagagtgtcttgaatagatgaggtatggttagtttaaacaatactagacaacttttatgtccaagaaaacaggaaaaaataaaaattgtaatatttcattaatgaactgttctatattataccccccattggactttttaatcttcagttcaacatttattacggttataaatctgcattcggtaaatttgcagtgttttactctcatcaatgtttgaataataatctgtcactggtggccaggcacagtagctcatgctcgtaatcccagcactttggcaggccgaggcgggtggatcacgaggtcaggagatcgagaccatcctggctaacacggtgaaaccccatctctactaaaaatacaaaaaaaattagccgggcatggtggcaggtgcttgtagtcccagctacttgggaggctgaggcaggagaatggtgtgaacctgggaggcagagcttgcagtgagccaatatcgcgccattgcactccagcctgggccacagagcaagactccatctcaaaaaaaaaaaaaaaaaaaaaaatctgtcactggttaacttaaaagcacaactctggctatggacctctcttaaaaggcctaaaaaaacagctctaaatatacgagagaattctgtctttttttttttcagagtcttgctgcatggtctcggctcactgcaacctctgactcctgggttcaagcaattctcctgctcagcctcccaagtagctgggattacagacgcgtgccaccacgccgggctaatttttgtatttttagtagagatggggtttcactatgttggccaggctggtttcgaactcctgacctcgtgatcccccgcctcggcctcccaaagtactgggattacaggcgtgagccaccacgcccggcaagagagaattctaaaccatgaggatgtaactgaggattacaggaagtgttaccaagttgagatggctggaatagagaggaaagaaaatcctcccacaatgcaatttgttttttgaaatgctgcaaactcacttgacagctgtgatccagaatggctacctgtgccgggtgcagtgactcacacctgtaatcccaacactttgggaggctgaggtgggctgatcacttgaggttaggagttcgagaccagcctagccaacatgatgaaaccccatctctgccaaaaaaaaaaaaaaattaactgggcgtggtggtgtgcacctgtggtcccagctactctgaggcaggagaattgcttgaacccgggaggggaggttgcagtgagccaggattgcaccactgcactccagcctgagttatggagtgagaccctgtctcaaaaaaaaacaaaacaaaaaacaaaacaaaaaacaaaatggctacctgaatagtcactgttttcccagcagagatctggcaaatgagttagcacaagaacagccttaaggtatcagctaccattacccaagaaggtagtggctgggcttgtggattatctagccaaatgcttcctttccttggggctctagcaagctttgtttgaaccacagaaaatggtaaaaaagaggtaataaaattgtaatgagttaactgacttcttagcagcctcttcagtaaagatttggtggggacatgagactacaaagatgctgtggatcattttctttgtcctttcaattccccatcaccttccatgcctatctgctaagaaaacattttcctggcagggcgcagtggctcacgcctgtaatcccagcactttgggaggctgaggcgggcggataacctgaggtcggagttcaagaccagcctggccaacagggtgaaaccccatctctactaaaaatacaaaaaattagctaggtgtggtggtgggcacctgtaatcccagctacttgggaggctgaggaaggagaatcacttgaactcaggaggcagaagatgcagtgatctgagatcgcgccattgcactccagcctgggcaacgagaccgaaactccatttcaaaaaaaaaaaaagaaaacatttttcccacatattctcttaagtgtatccacaagcatttcttttataaggaaaagctttgacccaatccacaagattaatcaaatgtaaaacatctgagaattctctaacatacaacagacaaaagtattattattttgaagcttaaaatacccactttccttcaggacaagagactatgctaaagcaaagcaaaaaaaaaaaaaaaaaaattgactaacccccaagaaaagagggttttcttactttgtcttatataggtgcataataccatgaactatttcaactgatggatttccactgaagaatgaaatctggtctggaagctgtttggacggagaatctggggcagcgtttatgcattccttactgtgatctttacttctttgcgcagtgggggaggcttctgaagacttcctttcttccactgtagtttttagttcatctttcaccagttaaaaaatagcagattataaatggataggacatatgctgaaggatttgaactagattaaaatttcaagtcagaggaataaactttgatagagtaattacaatgtaatgcattaacagctattatttgtagaatagctgagtttatgagggcatcatactttaaagctctctttgctccataaaaatctcattaacaccctcagaaacttaaggatggctattacatttggcaataccataatgcaagcaggtatcttctatcacgaaatcctaactgggacaaacattcagggctactaaggtggaaatccaaacctaccagttctgaccacctccatgttggagatgtagtactatctacacatccacttccgcagataaaatgagctggctggccgggtgcagtggctcatgcctgtaatcccagcactttgggaggtcaagaggttgagaccatcctggctcacatggtgaaaccctgtctctaccaaaaatacaaaaattagctgggtgtagtagygtgcacctgtagtcccagctacttgggaggctgagagaggaaggagaattgcttgaaaccaggaggtggagttgcagtaagccragatcatgccactgcactcccacctggggacaaagtgagactgtctcaaaaaaaaaaaaaaaaaaaagaaaagaaagaaagaaaaaatgagctggcagagcaggggaaggcacgacatgtttatttggacacattaatgatctgccactgaactaggtggtaagaaattctccctggtagccgggtgtggtggctcacacctgtaattccagcactttgggaggccgaggcaggtggatcacttgagaccaggagtatgagaccagcctggctaacatggagaaaccttgtctctactgaaaatacaaaaattacccaggcgtggtagagggcatctgtaatcccagctacttgggaggctgaggcaggaagactgcttcagcccaggaggctgaggttgtaatgacccgacattgcaccactgcactctagcctgggcaacagagaccctgcctcaaaaaaaaaagtcccccccgtcactgaactgaattgtcaactccaactgttaggattaatttggaagaaatatttggaaacactaacatgtggcttaacagtgtcatataaagcacacacgtagtgaaagacaaaagtatgctagatgttgaaattgtaggctcatcaaacaccgtgtataaaataggcaaccagtgttcacattacaaaagagagtccagggttttagaaagcatacctgggttggacttcatggtctcaatgatcacatctgtcatttctcgacggccgagatgctgatggataatcgctactttctctcctggtgacttgccttctaaacaggctacagctgaggctagtgtcgtcttttttatctcctcatcagacatttccccggctaaagaacacatgaatgattaatacaaggtaataaaacaagctcctctctgttctctattcctctatcattaggttttccttttctttctcctgccttccgccaagatgataagaagcctttgtagtatccatctcactcaactctgggaccactgcagtacacagcaaagagtcaataagcagccaggacaatatactcagaaatgcagggctgttctactgaaatcatgcactttatttttattttttgagacagagtctcactctgtcacccaggctggagtgcagtggtgtgatcttggctcactgcaacctccacctcccaggttcaagtgattctcctgccccagcctcccgagtagctgggattacaggcacgtgccaccacgcccagctaatttttgtactttcagtagagatggggcttcaccatgttggacaggctggtctcgaactcctggcctcaaagtgatccacccgccttgacctcccaaagcgctggaattacaggtttgagccactgcgcctggcccaaaatcatgcactttaaagcaaatcgccaaagagggagccttagagaagatgcaacagtgatcatgcccagatgagctaacattttagtaacacctgataaaatgaaattgtgttcagcccaaaatgaagctatcaagtccattaaaaaaacaaaatttcaaaaacttgtaggggtagtcttaaacatcctggcttatgctcatgccatgaaccaagccatgawcatctgtgattactgtcttaaatcaatgaaacacatgaaaagggaaacggaatttggagacttaactgaaatatccctaatacatgctctgtcagggcagggacaaggcctgttttgcccaccactgtattcccagcccttataccacagtgccgagcacacagaggaagccctctaaatgtttgatgaataaatgactacatgactgacccatgcagatgtctatatgcggctaatatcaatttagctgactctcagaactcagaagccacttttagcctttggaaaggtgctcataagctataaagtcatattcaatctttaatttgcagcttcaaaggtcacgtcctcaggaagttcccaatgacaccatccctacctgcccccatccctctctccaaaccaaacacatcttcttgtaatactttcccaaattgtttctcctttccttcacagcacttaccacagttgtaattctacacatattctgcacttatttaattcatctgtttcctccatgatactgctggtgccattaaaacagagacgctgtctgattcagcacacaaggaaggctccagcagatatgagcataagttttttttttgtttttttttttgaaatggactttatctcttgtcgcccaggctggagtgcagtgccacaatcttggctcaccgcaacctccacctcccgggttcaagcgattctcctgcctcagcctccccagtagctgggattacaggcacctgtcaccacgcccagctaatttttgtatttttagtacagacagggtttcaccatgttggccaggctggtcttgaactctcaacctcaggtgacccgcccgcctcggcctcccaaagtgtgaggattacaggcgtgagccaccgcgcccggccaagtatttcttgaatgaatgttagttaattatctgaggaccaaggaacagagccagagctgcattccccactaaggagcttcctcacttgtgttaatggtgtaaaaagctcagactcaagtccagctcactgagttagaatcccagtttcacccattacagataaccttgggcaaatcaattaatcactaagcttcagtttcccaatgtgtaagaggtacatgtcacatccatctgcctcttagggctgttgcaaagataattaaagaatacaatacacaaaaggtgcttagtacagtgctgggatataggaagtgtccaaattttagttatgactatggttagggggcacttcaatggatatcgttccaaaagggaacaatttaattaacccagggaccgtccagcgttgctggggacccagtccctgcctttacgaagcccatagggaagcaagtgagacaaacacaccactcgactatctcgagagggagacgcgccaggtataaactraatgccctcagacggcacagggagggaggttcggggcagggcttccctgagataacaaacgggaaggcctctcaaaggcggatgggaaagagagggatcccgattacctctccgtgtcttcctgggcaacagccctcgccgcgggcttttcccgggccagtgctttgggaagggaagccctccgggcccagacccggctacagggaatgcggcgaggccgcgggactcacccgcggcgctgaagccgaagccggcggggacaggcgagtgttccgcgagctccaatcggataacaaccagtgacacactcatagggcaggcgctggccggcgcgggccccggcgggctcaggcgaggctggaaggcgagccgagaggccgagcggcccggggccggcagcgccgccaccacctcaatgcagttgccgccgcctcagcagcagcagctcctcgaacagccctcggagccacaacaacctccacttccgcctcccggccgccgtcgctgacctgcggtttacgcatgcgcgcaggaccgcgcacagcgattgggcggcgtggcaggggtcacccactgctcttccggacgcaattttgaggaggtcggagcggaaggacgtcgtggagattgcttgcgctggggtgccacacttaggctgagctgcaggttttcgcacagtcgcgagttaacctctgcttgctccagaggcctcgtcctaatccacctcggctgacggcgcgggatccctggctccgcgaggtctccgaattgtccgagctatctgctatgcagaactttgccccttttgttgtgtttgactcctgtctctaaccctagtctggatggttttgtttctgtcccactttacagataggtacaacgaggctcagagaggtgaagttccttctaaggggccgtagagagtggagagtcgatcgctgttcagatagcgatctggctgggcgcggtggctcacgcctgtaatcccagcccagaggcttaggcgggcgaatcacctcaggtcagcagttcgagaccaacctggccaacatggtgaaacctcgtctctactgaacatacaaaaaattagccgggcttggtggcgcgcgtctgtagtccaagctacttgggaggctgagacaggagaatcgcttgaacccgggaggcggaggttgcagtgagtcgagatagtgctagtgcactcccgcctgggcaacaagagcgaaactccgtctcaaaaaaaagagagaaaagatggtgatctgctggttacgagcatagtgctgcagttagaccggggtcctcctccccaccctgtcacttcacaaatgtttactgagagtctagacacccttgggatgcttgagatacgttggcgtataagataaacacagttcctgtccgtactatgaggttgacctacatcagcagttgtgcagtcttgaactagtatagtcattgcataaagttggcatgatatcatgtcctcatgcagttgtgaggatgaaatggaattatgtatatggagataacattagcttttctgaggctcagcattctttccagtatgtcagagtggcttttgtatgtagatactgacacaatcaatgcatatgggacacatacatgacaggatgctactctaggtacattgtataatgatacatatgtaagtacatagtacattctagatgtgtgtgtgtgtggacatagtgcgttctagatgtgtgtgtatctggactatgacatgaccacaagatacatgcgtatatagatcttgtgactacatcctatgaaatacgtttccatatgccctgtttaaatcagggtttctcaactctgcactattaacattttgggtcctgattattcttttttgtttttggcaagggggcggggtgtcctgagcattgtagagtgtttagaaacatccctggcctgacccactagatgtcagtagcacctctccccaggtggtgacaaccaataatgtctctggacctttccagatgtctccttggggttagaaaacataaccctgttgaagaatcacagggttatgtgaaagtgcataaaccatacacacatactgtatgcataaaacctatgagacctcttgtgaacttttttagtatattactatagtagataacatttcaacatgtgccaggtactaatttgagtgtttcatataccttgtgtcatgcaatggtcacaacaactttatgaaactggtactatgtccctgttctacagaggagtaacctgaggcttggaggaagagtaactggctcaggatttcacaggtagtagtggcagagctggaactgaaattcaggcaatctgaatccagaacgaacattctttatctctttaccaaacaaacctttttttttttttgtattttgagacggagtctcactctgtcgcccaggctggagtgcagtggtgccatctcggctcactgcaacctcggcttcctgggttcaagcttcctgcctcagtctcccaagtagctgggactacaggcacacagcactgcacccagctgatttttgtatttttttttagagataggtttcaccatgttggtcagacttgtctcgaactcctgaccttgtgatccgcccacttcggcctcccaaagtgctgggatgacaggcgtgagccaccgcgcccggcccccccaaaggcatttttcgtctctactaagccctcacacaaaatatacaagtgtgtaagtaaatttctctttctatcataaacattggccttggcataggaacgttaagtaaaactgaaaatgcaaatgaaccttgacatttttagtttcaaatattgcccccaaattcagcaaatttccaattactgtcgttgcatggtggtatcctcagcagatgggtgcaggaccccctgcagatgccaaaatctgtggatgctcaagttcctgatatacaatggtgtagcatttgtttataacctatgtacaccctcctatatgctttaacccatttcccatttagaaaaaaaaagtacttgacttggtgtggtggctcacgcctgcaatcccagcactttgggaggccgaggccggtggatcacttgaggtcaggagttcgagaccagcctggccaacatggttaacacccgtctccactataaaaatacaaaaaattagctggatgtggtggcgagcgcctgtagtctcagctactcgggaggctgaggcaagagaatagcttgaacctgggaggcggttgcagtgagccgagatcacaccattgcactccagcctgggcgacagagcaagactccgtctcaaaacaaaacaaaaaaaagaaagcaaaaaaagtgcagctcgctgccagcacagtattctcagggcaagcaagatatgagttaagtaatccctagattgcttataatactggctgggcacgatggctcacgcctgtaatcccagcacttagggaggccaaggtgggtggataatgaggtcaagagatcgagaccattctggccaacatggtgaaatcctgtctccagtaaaaacacaaaaattagccaggcgtggtggcacgcacctgtaatcccagctactcgggaggctgaggcaggagaatcgcttgaacccaggaggtggaggttgcagtgagctctgatcatgccaccgcattccagcctggtgacagagggagactccatatcaaaaaatatatatatttaatatatatatcaaatcatatccatatcaaaatatataaatatatatacatgcatatatatgtatgtatacctaaaacagtgtaagtactgtgtaaataaatagttgttaacctgtattttttgtttgcattttttattgttgtgttgttatttttgttggtttttgtttgtttttgagatggagtctcactctataaccccggctggaatgtggagtgcagtggtgcaatcttggttcactgcaacctccacttccctggttcaagtgattctcatgtcccagcctcccgagtatctgggattacaggtgtgcgccaccacgcctggctaattttttttctgtgtttttagtagagacggggcttcacaatgttgaccaggttggtctcgaactctcgacctcaggtgatccgcctacattagcatcccaaagttctgggattacaggcgtcagttactgtgcccttactgtgtgtgtttgttttgttttgttttacttcaaatattttcttctttttttttttttgagatggagtctcactctgttgcccaggctggagtccagtggcaccatctcggctcactgcaagctccgcctccccagttcacaccattctcctgcctcagcctcttgagtagctgggactacaggtgcccaccaccacgcccggctaattttttgtatttttagtagagatggggtttcaccgtgttagccaggatggtctcaatctcctgactttgtgatccgcccgcctcggcctcccagagtgctgggattacaggcgtgagccactgcacccggccttacttcgaatattttctattgtagttggctgaatctgcagatgtggaactcacaaatacagagggctgactatagatgagaaacacattatattcaagatttaccacttaagagtcctttctctaggtgcttatagaggttgagtatcccttgtcccaaatgtttggaaccagaagtagttcagattttggattttgatatatctgcgtatatataatgagatatcttggggttgggacccaaggctaaacatgaaattcacttatatatatatgtttcatatatatcttatacacctagcctgatggtaattttatacaatattttaaataattttgtgcatgaaacaaagtttgtgttaagtacttacgtgtggaatttttcattgtggcatcgtgtgggggctcaaaaagttttggattttggatcatttcaggtatcggatatttggattagggatgctcaacctctacagttttttagtcctagctgggcgccgtgactcacacctgtaattccagcactttgggaggctgaggtaggtgaatcacctgaggtcaggagtttgataccaacctgaccaacatggcgaaaccccatctctactaaaaatacaaaaattagccaggtatggtggtgcgtacctgtagtacctgctactcgggaggctgaggcaggagaatcacttgaacctgggaggcagaggtagcagtgagccaaattcgtgccactacactccagcctgggcaacagagtgagactctcaaaaaaaaaaaaaaaaaaagagtttctgattttggagcatttcagatgtcagatatttggattggggatgctcaaagtatatagttttggagtccttttggccccactgaatgactcctgtaaactcagatgctgtcttaccaacctgttttgcactctcctgatttttagtaagctttttaactgtagaaatcacataaaaagcttaaagattttcatgaagaaaatagaatttgccttcattattttggtttttttccccatctttttatttcaagcttatagaaaagtcaaaagaagttacagtgatctcccgttatacctttcatctagactcactattaatgtctggccatgtttggttttctctatacacgagtgtatataggtatgcatctgtatacgtgtacatgtatgtatgtgtgttgtgtgtgtctttttttttcctgaaccttttgaaagtaagtttgaggaacagttaccaggctgctgcagtgatctgtaagtggaaatgatggtgttttgtggtgtgagggtgtcatcgtaagtgctaggaggaggcgagtacaggacatcttaggtgcatacaggagagactcctaatgagtcttttctggtatccccaagaggcttcatgaagacagtgactggtaaactgcaacccaaaggactgtttggaattagccaggcaacaggtggaacagagcattgcagaggagaacatgcgtttgaggaaactgcatgtagatgtgtatgtccagatcatcccaggttgagatgaaaaaatggggagctgctgcagaaaggaatgagatttttttttttttttttttgagatggactctggctttctcacccaggctggagtgcagtggcacaatcttggctcactgcaacctctgcctcccaagttcaagcaattctcctacctcagcctcccaagtagctggattacaggcacccaacaccatgcccaggttatttttgtgtttttgagtagagatggggtttcgccatgttggccaggctggtttcccaactcctgacctcaggtgttctgcccatctcagcctccctaagtgttgagattacaggcgtgtgccactgcgcctgacgggagtagatcttttaagccaggcttaggaattgagattttattttaagggcaatggggagccattgaaggtgttgtttgtttgttttttgagatggagttt

SEQ ID NO: 98160 - DNA, 63507 bp, Homo sapiens
agttacttttaataccgcttttagggaaattgatatgttctgtaatgagaatgtagtcaacatgatggagactcaaacctcctgctttaccttactctttgtttattttcctaggttaccaaagtgacccaggtagatggaaacagccccgtcaggttttccacagagaccactttcctagtggataagtatgaaattctgtaataccaagaagagggagctgaaaaggaaaattttcagattaataaagaagacgccaatgatggctgaagagtttttcccagatttacaagccactggagaccccttttttctgatacaatgcacgattctctgcgcgcaaggaccctcgactcacccccatgtttcagtgtcacagagacattctttgataaggaaatggcacaaacataaagggaaaggctgctaattttctttggcagattgtattggccagcaggaaagcaagctctccagagaatgcccccagttaaatacctcctctacctttacctaagttgctcctttatttttattttattattattattattattattattttttgagatggagtctcactttgtaacccaggctggaatgcaatggcatgatctcagctcactgcaacctccgcctcctgggttcaagcaagtctcctgcctcagcctccgagtagctgggactacaggtgcacgccaccacgcctggctaattttttgtattttagtagagacggggtttcaccgtgttgcccaggctggtcgcgaactcctgagctcaggcaatccgcccacctcagcctcccaaagtgttgggattacaggcatgagccaccatgcccagctgctcctttattttaatccctaaatataatccctaaatatagttatatttcatacttagtttgtttttaaaaagttttctctgtagaaaattttaatcattcataccctttacctttaggtttttctttctatacattcagtcaggcactgggatcatctgtttacaggcattatatttatttggcactcctggaacaagtatatctaacccattcttgatttttggactattcaggtgaactatttgaggggtatggggtctagaagttaaaagatacgcatgtcttctgttcttttcccgtatcaattcattccttcatctctttgccaagttgttttcctttcagggcctgtccttccagtttagaacagtaccatgaatcccacttgtgtcaatattaaagatagctgagaagcacctttcaaatggcacagtccctcttcaagatgtctaaaagaatggttatgtctgtccagttagggatttcacatccacatgtaatcatgtctgctgctgttgctacccaaattttcatttctccacattttgggtacttaagctaaaacgtaatggccacagtctgtaatccattcacattcctcagtttcaccacctccctcttccagactgcactctctgtcatcagtcccctcctttctaacagaaatggggttatgattttgaaggctgtgggttcagggagtctttgccaatcctgttggccctaaactatcaaggaggctccatttcaccatttgattttttgcatttcaggaggcaactgattgtttcgatatgtacatattactcacgtataccccatttccttccagtcagcccaacattttccaccagtctgtccccatctctgaaatccttccttctctttccccctaagtcttttgagtgtcatcatgtactggtggtttctcggttccatctcatccatttccttttcaatggagactacagcgtcagccagctcagccttggcttttaactcaatattccagtccataggggtggttaaaagttgctgcaaggctgcaggcactggcagtgggaagaggcagacgactagatgacttctgcacttttagctggttgaaaagtaccactcccactctgaacatctggccgtccctgcaaagagtgtactgtgcttgaagcagagcactcacacataaatggctgtgtgtggaattgcttgccaaagaagtttctagcctttccctttcccctaactgcatcagggaagaattcttatctctagcttggtttccacatgaggtttttctgagaagggcttgggacaagaagtctgtcatgttagttaagcaggcaagaaatcctactaatccagttttgtttgaaagttgtttgtccgtatgattttttaaaagtcaagtttaatttcaaaaaaccttttttttctgagattacttttggggtaatatttaaaatgagagacattttgtaaccctgtaaaatacatagggaatataacattccagtgtatacaaagaaggcaaattctttaatcaaataaagcgcattataaaatgagatgtttattggattattgactcactttggtgtctgcttgttgattcaggatgctgtaatgggacctaacattaaaaattaatgacatgttttttttaagagaaagtaatctgtgagagtattcattgcctttttccatcttatatgtattgtgcttccttgcgtatttttctacatttgatacatgcactcctgacagtgtagcttttgaatttgatgctacttctggcctttttggggattggagtcttaattttgtcagacggcagttggagagtcaaaaaagtcaggcttcatctttaatcttggagtcttggagtcttctcttccccattagaccgtgatgagaagtgatccagggatgagggataatgggaacaatttttgggaactgttgataattccctcagataaacctgcttactttttttttttgagatggagtctcgcttagctgcccaggttggagtgtggtggtgcgatctcagctcgctgcaaccacggtcgcccagcttcaagcgattctcctgcctcagcctccagagtagctgggattacagtcacccgccatcatgccgggctaattttttttgtattttcgtagagacggtttcaccatgttggtcaggctggtcttgaactcctggtctcagatgattcgcccacctctgcctcccaaagtgctggattacaggcgtgagccaccgcgcccagccttttttttttttttttttgagacagtcaccaggctgcagtgcagtgacatgatttcggctcaccacaacctccacctccagggttcaagtgattctcctgcctcagcctcctgagtagctgggattacaggcattccacaccaccacccccggctaatttttgtatttttagtagagacggtttcaccatgttggtcagactggtctcaaactcctgacctcgtgatccgcccgcctcagcctcccaaagtgctgggattataggcctgagccaccgcgctccgccagagctgcttactttcttatgcttttttaaaatttaacttggaaaaactattgggtgtcaaaaaattggaaggcaaattattctcacttattaagtatctgggatgagaaatttctaatgttgaaagccaagattctgattttttttttcttggtgaaaaaaagtatctggtctaatgttgctcaagtgtggcttagctgtctgagactgtagccttaatcgaatgaaatgattaaggtctgtcattcctttactcaccatagcttcaaatttgtcaacccatgcatctctgatgggaaactttgccctccaattaatttttaaattgtgaacagttttaaagttgttcacactggctagggtctgagatttccagggttgatatagaatagctttttattaaacttcacatctgacagggcttattggaaggagacaggagaaaaatggaaaaagtcatcctcaagaagattaaagtctaactggaagcaatgactatctgcttgtgaagcctttttttttccaagttagacaagtgttaactacagctagtactaaacatggatctatatgagagtaggtaacatggcttctgtcttgtaggctctagaggaatctcaagcaaaacctcacaaatgattttcttttgctatgcacatctgtcttattacaacccccttacccccaattcccttgtcctagaagatccacaagtaggttggttgctgtgcattgctgttacccaagggcagacagcaacactacaaatagctgccttaacgtcttatcctggggagttggggattgatacggaggtaggcctttagaaaaattagactatctttccaaaccaggctgttttccctctcacaatcacaagtcaagctattaggcagttttcagaagcttggaccacttctcccatcccccaccgcagtttttttgccctgctgttcttagggcaggggctaagtggttatttagggtctaaaccaatactggaaagcttccctaggtttactctgggtgatcagattgattaccaaaccaggacaggggctgtttgaaagaagcattagaaattcaagacaatgagagaaattgaaataggtcttgtctcccattcttttgcccaaatgaatgcttgttcttttagctcattaggaaagcccttagccttggaggtacacaagaccagtcttctgtcctacccaaatttcccacttagcttggatgcatgttagctttgggtcgaagcagactatgcaatttctaagacagctgaaaagagagctttgaacttttccccaagttgctgcagggtcattgctaccaccacgcctacaccaatgatgcctgacttcaggatccagaggccagaaacggacagctttctggaagagggtgtgtatctacaaggattgcttgctgtatgagcaataatcacctctctggggctagagggagtacaatttgagaggtgggacaaagtggggaatgtgccaaggcaaaagcaggagtatggaaattcactcctgacacttgtagccaatgcaaagggccttagaaaaatccactcttccttccacacccaggctttgccctctccccctgcttccacttcggaaagtctgaagcaggcctggaaagctgttttctgctttctttccctctcttcctccccctttcctgagctcccagctgctcgacctcttgcgtaactgtgagagagcgctgagttttttgatgggctccagatgtggagcagggcggagatggagagtgggggcggtaggtctttagtcccctgagtgctctaactgtgggaacatagaggcctgacacagcaggggagaggacacattgcacagcgcctttatcatagggtcagctggtccctgtgttgggaggtcagtgagagaagttgggtgctgtttcgaccctctgcctcagcatccactgcctccatggcaggcttgattattccctgaaattcctcctgcccagtacagtaaagaggagctgggggccgtgaaacagaatgaagtgaaaagcctctgaggtactgcaatctggacccctcccctcagtgctgggtcttggcacatgggatacaacagtttgggttttttccttcttcctttttttacatacccaaatagcctgaatattactgttgtgatctgcctcatgaaggttcatcagaattactttcatgacttcaaacagtatgaagagaggaaaaactagagtctcgctcctcaaatcctaggacttcctggtacccacagcatattctggatcttgagtgttccacctccattagctatagcaggtggcagcaaagggcggcctctcccctccccctccttgtctgctgcttggccccggtcagcttcagtctccagccgtggggggtcccctgctaaggccagccctgtcaatgagtgaccagagattcctgtagttcagcctcctgctgttcctgggttagggagagacggcacaaactaaactcattgaattagaacagcacttgtccatctcaaagaggataaattattttttgctatccaccccagctggaatttagaccagacttacaggctttctgctccttccttcagtgaagaagagtctccagggtccctctagtgcaggtcaaagaagtccagtccagctgagttcagctccctagggcctccccagccagtctcctggrccaagagctggctttgcaaggtaaggatccactgtcagcgttggatttcggagtggaggttgagatggagaatgacttcaacctagctcaatttgggggctgcttttaggtgtttagtgcctccttctcttccttattaactcccactcctactacaggttggtgtgctcaattgtatgtctatagcctgcctccatctcccaatctgtaatccagcaagtctgtcggggtggaggggtgtggagctccatgggggcaagatgataattccattcggttttcctgtgctttggagtttgcatgacactttaacgagtcttcttgtgcctatccttaagaaagtctgtgaagcctgatgtgcgtggctatcaatgtcatttacagctcttcatggtggggcttggaatagggcgaggggaggaggtgacagggagaagacctgggtaccctcagtagatgttctggagatgttgagagcatgttgtaggggcttcgatttgggaggttcagtgggagcccgtggaggtttcaggcatctaaggcaaaaagaaagaggggagagtttgggggagggagaacggattgtcaaaaacaccctctcaaaagcgtgttaaagcctgggagtggagggtggtctaggagagtcgggagggcagggtgggaggagagggggatgtgttggtggtggtggtggtggtggtggtggtggtggtggtggtggtggtggtgatggtggagagcccagctgcaaagatgaacaaagcgggcgctgtgcaggctgggggaggtgctgctgtgggaaagggtgggtggggggaccttgggctccagccccacaagggcgtcttctttggctggccaggcggacgggacgggggacgggggcggggactggcgggaggggggcgggacaggctcgctctcctcctacttagcgagctcccggggaaaagcaacggtgtcctcctaagcctgaggccaccgcgaccgagccgagccaggctaagggaccagtgtctccctgcccccccaccacctctaggtaagagcgccccgtcccactacacttgcgggtcccattcgctgcggtgctaggactggataaggggaagtccccggggcctggcgagagccctgagatcagctctaggctagggagctcggcagaaacccgtgggggagagagggcaccccaggtgagtgcgtgggggcgaaaggagcgttatggggagttttcctgtgagcctcttgcttttgccttcctcggccgctgccaacgccaccgccagagggggccgtgacgctctcccccccttggagaaactctgatcctggccctatccagactctcccgccggcacccaggcggccgggcggacactcgcggggtatcgggcggcgagcgcgcgcgcgggttttcgtcctccagcgccccacacctccccctctccgcccacagcaggaccttggggcgggggtatctcctgtgacgtctccccgcctgtccccaggccggccgccttgatggaccaggaagggattcggagtccggctcagagtcttgagcgtctaggagggctgcctgggggtgtccaggagatgggaagcccgcctggggcctcccaggcactccccaaggccccacgtcctcgggggccggggaggccgcctggggcgccttgccacgcccgcgcggtccctattggaatccctagcggagttccccgagcggaggctgacccaagtcatccgggctcccccgggatagggaagtgcgggcgggcggctgggtaggggcgccggcgcagggtggccgagtcgcccgctagcgcttccgccgaggcaggctcgagtggggacttggccgggcgaccgcacagccctgccggggacccacggctctggggcggggctgcattctgggccgttagctcagcggtcctggagcctcccgaggctgactcatcgggcggcgggctcaccccccagccgtcaaacgcaaacgcaggcgccccaccacgccgggctcccacgcggcacacacgcacgcctccgcgacacttcgcacacctacgtccctgcgtcacgccacccagacacacccggacccgcccacacgccgaggccttcccacgcactccatgccttacgcctcacaggaaagcgccccgcgctcacgcagcccctcacacccgcagccccgcttacacgcgccccagctcacacatgcaccccagtcacacagcctacctcacacacgcaccccagtcacacacacaacccagctcacacacgtacccgtcacacatgaggccccagctcacacacgaagcccagctcacacacgcagccccagctctcacacacacaccccagtcaaacacgaggccccagctcacacacgaagcccagctcacacacactgccccagttacacagcccagctcatgcaagcagcccgtcacacacacagcccagctcacacacacagcccagctcacacaagcagcccgtcacacacacagcccagctcacacacacagccccagttatacacacacagcccagctcacacacgcagcccgtcacacacacagctcagctcaatacacagcccagctcacacacacagccccagttacacacacagcccagcttacacacacagcccagctcacacacacagcccatcacacacacagcctatcacacacacagctcagctcaatacacagcccagctgacacacgcagcccagctcacacatacactccagctcacacacgcagcccgtcacacagccccagccacacacacagcccagctcacacacgcagcccagctcacacatgcagccccctcacacatgcagccccagtcacacacacagcccagctcacaccgcagccccagctcacacacgcggcccctcacacacattcagccgcccttcccgcagctgccaggctcggaacgggcggtgtctgtgggggccgccccgtttcccggccgcgcaaacaagcggctccttctctctgccccgccaaagaaaggccgcttgtcaggggcgggcgggcaggcggcagcggcaggcgcccaacactgcggccttgtcccacgcgggcagcctgggcaggagcaggccgaggggtgcaaggggccgctaccttgcggaaacctccctccctcggccctgcggaccgcggagaggcacctttccaccaccggacacccaagcaacagccctcgctccatccgcgctctcccggctccccctctcctcgggccgcccatctctcctctcttccgcctttggggtcccsgtgggccccagcctccctctccttcgccccatctccccgcccgtcagcctcccctccgctgccctcgcgcatccccagtgttcccgtctgtcgtcgcctccacttgaggacccgcctgtcctttcttcccccgacccctccacctctgtgttcttcagtctccccgcatcctctgccctcggtcttcccctccccagcttgcattttttcccatctcttagtctgcctttcattttccccttcacatcccggtggctccccttccccgccccgtccctctgcacacccccattcatctctgtcaggtttttctcatccttaagttctctcgtccccctccccactcgggcgtcccccgctgggctccccgcctcagtttccttcccttcctgactccttcctctgacggcggccctttctcgagggcggatgtgcgcctggagggcgaaggcggcggccgagaggaccccagctcggcctggcgggcctctggccacagccatgcaccgcttgggccgaggccgaggccgacccccagggacacaggtgaggccgggcgacccgcggggctccggggagcgcccgagcagtggccccgcgaagggccgggtctggtgctctggggctggctttggacctctcgtcctgggactccgtgggagcccgggagctgtgtcagtgcccgttggtgctggagccagtcggcccttccttggcctccttcaggcgggggccragacccccgagagttcactctgggtgctccactcggcggagagggcttcagactggtgtcccgcgtggctggggtgtcggcgcattcccgcgggggaggaggccgagggcccgggccggggtcacctgccggcgccccggccttgcgcacagagggccttgcctgtcgctcgtcaaatccagacacctgggcctccgccactcggctgccggggcggcactggggcgtctgtacccagcgtgcgggagggcacccagggccggacgcgcaccgcaggggtctttttttggccgcggggccgggcgggcgggtaatgacagccgggttgctggggagccgcgggccagatggaagcggggccgcaggtgagggacgtccctcgcgtagcgccactcagccgccggggccagagcgggagtcaaggtgagggcgcccccaggtggccgctctcggccgcggcgatcgccctttgggaaagcaccgcctgagtgcagggcaggttggcctggtgtctctttccacttctcttggatcaggttactgtgctggggccacagcctcgcacctcccaatctctccatcttttcttatcttctccccacacctctctccttatctctccctttactttcgcctccttattctcttctctcctctaatcactcttgttctccatcggccttactcctttacaatctttatctccacttgaagttcttgggtgtaaataaatgagcacaccacagctgccccacacggcgatagtgaccaatactccaatatgacagataaataaactaacgcccagacaggtgaactgccttgctccaggtcacacagctcataataataaacggggccaggcgcggtggctcacgcctgtaatcccagcacttcgggaggtcgaggcgggcggatcacctgaggtcgggagttcgagaccagcctgaccaacatggagaaaccccgtctctactaaaaatacaaaattagctgggcttggtggcaggagaatcgcttgaacccgggaggtggaggttgcggtaagccgagatagcaccgctgcactccagcctgggcaacaagagtgaaactccgtctcaaaawaaaaaaaawaataataataataataataaatggcattaagtgctttgctttcacagaatgccatttaatataatacctgaatttcagacagtcctttttaaaaaactgacagctttattgaggtataatttatatactataacatccacccaatttaagtatgcaattaaaagatttttagtatatttacagagccatgcaatcatcacaatttaatttgaaaacattccccccaccccacccccaccaaacttgtgcccttttacagtcactcctcattccacccctagccccaggcaagcactgatccagacagtcttttttatttttttccattactctagttttatagaagaataacttgataatcagagaagttaaataacttgtctaggatcttatagctaataaataaataaagtcagggtagaatttaaggctttatatatcccagtctaaagttctttctaccaaaggatgatgtttctccttcaccattatttattattttgtttttcttaaccccttttttacataaactccccattcccaacccactctcttgcccctcctccctcagaaaatgctgagggatttccctgagtctaaggaagcagtacagcaatctttgtccttggaaattcttctccatggccaggaattctggggaggtgccaggccagcttggggctttgcataggttaatggcgttttccctcccctcttccctggcagtcttggggtgggccccagcctgggttccggcctctcttccgccagcttgggtggaaatggtgacggagatgatgcagtccaggtccggaagggtggaagctgggagggtaaatttagtaacaccatagctaaggtcctcgggacccactgccagggtcagacactccttggaatgcgggctgctgcccctacttcctttccaagtcccctggtagatggcttgaagagagagtggaaggaaaccctgtttccctgggtctgcctccttacccctcagccacactcttagctttccccagtaacatttcagcagcaagtgggaagtttctcagcttagctagttggccaagggatgggcatgggggcatacattagtacacaaaggtcctcacatctcagataccaaaaacatgagccagggagagagggatgcatggtgggtgaggggcagtggggtggtggtggggagtattcaagttctggctctggaatctgtcttactcctggttctaatggtttaagcttcctatagcacctagccaattaagaacccaagagttgagcccaatattcccagtattagttatcactaaagttttttgtttttaattaaaaaaaatttttttagctgattgtgttgggttgaggttgctttctggggaagaaaaggtgtaggagttgagacatctggagatagcaggaatggctgagtttttcttttgtgtctcctttaagaaaacatcctactaaagccctgggaaaagagacaaatggtgaagaggagaatgaaaggttgcaggagggagctcctgttttagccctgccacctacctgggggccctctggctaccagtgtccttggaggggcttccttgctgcttctcccactaaggtagattttccccaccctgcttaaggctccacagggccaagggtcttcagctgtcaaaacccgggttctgagtagcatagggcaagaaagcacagaagtatagattgggccctatgggactgtttgtgcttacagtggcagggggcaggactggtatccatgctgtggctggctggagacttggcactgctcccagacaactcccacccaagctctttagctgcctctatttcccttcagcatgagcatttggggaatgatggtgactggtgacacctctgccctgagaaccctgccacagaacctacttctttccctctcctgccctggcctccccactcaccacctttctgctgtgtccctaggagctctggagccttaggaccatggacgctctcaataggaaccaaataggccctggatgccagacccagaccatggtgcaggtgagtgggatcagggctgtgaggcaagagagatataatagggatgggatcagctcttctacccccttgtggtcccagcccaaggatgaaaggagcaattctgttcctctctgcccttccccaggtcccaagcctattaacagctcagtctttatctgaatcaggttaattggttcacccagaaactacccatcgaaagtccgaaagcagtttacagattgaccctgggctgtatcactctccttgatccatgcctctatcttccctgtacttgagcttagcaggggcaagcaatggccacgtggatagccatggacaagtctgcagggagcttgattggccttcctctacagtacccctgctgcttatccaatgccacccccaccccccacccctttctccttgcttctgttttaatagacaaaaggcacagttaagccaagacttgcgataaatccagtgggatgagttagtggcctagattcagatctaattacaatttagtggaatcatgctctgtgtaagattttgtgctaagcctttcagcaccctcagagcccttcggagaggggcgagggctggagagagtgctggtgtgactggtttagggtggtaaggtgctgaatctaatgatgcttgtcctccacccgtactacctacagaaaggacccttggacctgatcgagacaggcaaagggctgaaagtgcaaacggacaaaccccacctggtgagcctgggcagtgggcgactcagcacagccatcaccctcctgccgctggaggaaggtaagtgtgaacagggcatctcactcaccacccctctatccttataggcattcctgccctggaggcccacctcctgcatgtgttggggcccttctactgtctgctggtgctcgcctccccacaccaccagcttgcttcccttgtctctgcctccccagactgcctgccttccttggtagatgatctggttccacgactgggcttaaagatcagcttagaaacaaggaggagaggccaggtgtggtggctcacgcctgttatcccagcactttgggaggctgaggcaggcggatcacgaggtcaggagttctagaccagcctggccaatatggtgaaaccccatctccactacaaatacaaaaattagccaggcgtggtggcacgggcctgtagtcccagctactcaggaggctgaggcagaagaatcgcttgaacccaggagacagaggttgcagtgagccgagatcgtgccactgcactccagcctgggcaacagagcgagactctatctcaaaaaaaaaaaaaaaaaaaaaaagaagaagaaaagaaaccatgaagaaagcactgagagaaacaggagaacacattgctcttagcaaccaatgtggccaagaagaaaaagggccccgctccagggcattgtcttgcatgggagggtataccatagatggagaatggagagatgggagtcagggcaagatctcccaagatgaggccctggcacagcccccttcacctttcagcttctgcccgccctctctactctcctggctgcacttgttgcctgggtgatactacattctccacattctccaaataccagtcccaggggctctgtcagcgggaggggctgttcttgctgcagttaggggagagcctgcactgaagagagaggttgcactgaagagagaggttagcaagggagacgaagtgttgcaggtagcagaagcgggggagagaagaaggagagaaagggagatttagaagaaatgaggagtaggatgaaggggaaaaaggataaaggacaatagggagaggcagttgggggaataagggaagatctgcagaaaagcagtcttccttctccatctgtggagtctaggtcctactgtgtgctgtctgggtcttcccatctctgggcctcccattctcaggcagagttttctctgtttgagaacagcgtccatcacttactgtatagaccaggctcaggggcctagtaggggtggccagtggtgggcagagattctccctggagtaggaggtggaaatatgtttccactgtggccctccttgccctgtcactgcctcctcagcctggacaacccctctgattcagtttgcctcttgtctccagggaggacggtgattggctctgcagccagagacatctcactacagggcccaggcctggctccagagcactgctacatcgagaacctgcggggcaccctcaccctctacccctgtggcaatgcctgcactattgatgggctccctgtccggcagcctacccggctcactcagggtaaggctggacacctccagatggagggggcctctgtttaaaggcttgtgtgtattaggcacaggggaggctggctgtggtggttsccatggtaactgcctgagtgaccatactgggaatggagtactcaggtgcatctggatgtgcctaaacaacatcccaaaccctttcagcatccagacatgttttcaacctgcttttcttctctggtcacccccaacctgtctccacatactatggggagagaagaggttctgattcccgccatcagagggcctggggcatgatggcgttgttaatggttgttggggaagagcaattggagcagcagtgagagggtatcaatggcattgttccatgatgccaagaggaagttgttttgagaagctggagaggaggacaatacttcctgatggggatggggcaagggtaaatctcaggacatgcctgctcctgttacaagactgctgacagtaacttttgggtcacgaatataacccaaagcaataggccattctgttgtgtaaggtagctctaaaaactaggcccctggctaggcatggtggctcacgcctacaatcccagcactttggtaggccgaggtgggtggatcacttgaggacaggagttcgagatcagcctggacaacatggtgaaaccctgtctctacccaaaatacaaaaattagccacacgtggtggcacacgcctgtagtcctagctactcgggaagctgagataggagaaycgcttgaacctgggaggcagaggttgtagtgagctgagatggcaccattgcactccagcctgggcaacagagcaagactccgtctcaaaaaataaataaataaaaaataaaaataaataaaaactaggcccataattactatggttagcaggcaggtaagcggttggcccaggtagcactttgacagaccaggtgtgctcaccctggaaacagggttctgggcatcagttcatacagtgagttgtcagattaggagaatgagaaaaacagatttgggtggaggttagaggtgaagttaaaggctaacagcaggacaggaactttgggctaagcctggctctgagcaggctctgatggtctggcattgttttctgggggctcttactgcctagaagccccttggaagtggccatcctactcactccactgtctccttctctcctcttcatcctccttaaggcctttcaatgtcacttccttcacagctgatccaggagacctgacatttcccccgtctttttttttgatacggagtctcacgctgttgcccaggctggagtgcagtggcatgatctcggctcactacaacctccacctcctaggctcaagcgattctcctgcctcagcctcccaagtagctgggattacaggcacctgccaccgcccggctaattttttttttttgaccccagtcttttcttcctgccctcgggtagggggcagggcatggacaattgacttcagggaggcaggtccaccagcagcagtacgtaggcccttgccttctccagggattcaaggtctctgactttggatgagaggaggaacccccaaaaattggggcttggctatgatggcagtgggttcctaacagtcctgttcagtctcagagagagcatcttctctaagatttgggagcatggagatgagacaatagagcagcaaggagaggcagggcaaagttcaaagaaggcccagcacttaccacccccgccccaaacccatcacattcatcggtaagaacattgttcccctgcatgttgtgagcagggtatgcttctgttgtccagtctttccaatgcatcatttagctccctgagaaggggagagcctagggctaagatggaattytgaagcatttcctgtggccccagtgacccttcccgactcttctccagccagaggcctacccagccaagtatgtaccctcccactctcttctgaccctaaaccccttcccattttccctccccaacccccatagccttcttgtctgggctcgcctgtctcagaagcttggcagcctgtggaggggtaggcagaggcacaaaggaatgggtgttcttctccccagtcctccccctcccctgggctccaggagctgagggtttccttgtctcatctctggagcaaggcaccaagcccagccctgcctggccccactccggacattcttgggagtgtgtttccctggaaactgggtggctcgggggtgcatgtgctatctctgtgtgtctgtgtaaccggagtgtgtttatgtagctccggatgtgtttgtgactctgggcttacgaatcctgtgtttgtgtctttccttgtgtttatcgatcagtgtgttcaagtgggcggcaggggtgaactcaggactgatggtaccaaaatgtctgtgtgtgtactcctatgtgtatatgagaccccactagtcatatgcctatctgtgagcatatatacaagacgatcattttccctaccttgttcccctaatctggccttgtagacgggaccctcctctttcaaaaacaagggctactctgggaataacaaggagtgtgctttggccttagatgcatcattctgggcactgtgcccagccataggcaacttggagagacacacttcatgacaagcagagatggcagtgacaggctcttccagcaggaatatgcctgggccaggggaaaggggaggcaggcagaaaacagatgccaacctttagcacagagctatgaacataggagcatgaagtgagggagccaggaaggtcctgattccaccccctgtacccaggcatctcggcacatcccacattgccctcttctctacagagcaaggggtggagctgggaataggaccaagggaatgaggaggaatctcaatctgggtctaggctgccccaccctgggaccacagcgccagaccacatgaaagatctgggagggaaccaagcaggggaggacccagaaagccaccagctcagggcccaggctgtctagacagtaggtccccatccactcctagcatttcctccgagccctggtctccagtctccttcattccctaagcctctcactggtgggtaggggcttgtgtgagggccagcagaggagtgtggctggggagccggatctctgggttatccagctgcctctctctgggatctaggacattcagcctcttttttttcccacccagttattccatctgtaaattgggagtgaagccttcaacctttttctgttatgagactgataacgatcttgactaataaagctcaaaagaaggagggcagagcaaggctcccagcttcccacttctttgtgtctgcctcctgccctatttctcattggcgggcatcctctgtgtctgcctaggtctatccagctggccctcacagtttccagaccgatgaatcactcttcctgaggagattttttttaaagcctcccttcattttgcatttgaccctatatggttcttcctttttcctcagaagggaataagatacgtgtgcacatgtgagcgtgtgcatgtgtatgcatatagttggcagcatgggtgagtgggctagtgggctgtttagcaagaatggaaaacttgcctgattattcatctaagaggttgattttatttcagagtttctccagggactaagtgaaaggaaagctatgcctgggtgagtgtgtaactaaaaggagttgtctgggggatgtgtgcatgagaataaaggtgtgtgagagacagtgtgtttaatgagggtgtctgtgtgactcagagcatgcagagatgaagtagtgtcagtgtgactgagcaagtgttggtgtgtatctgagagacactgtgtcaggctgtgtgagctgctgagagcataaaacattgtgtcccgtaaggctctggtgtgcaggggccaggtccctggaacaagaggaactctctgggggacctggctggatggtaggtattaatacctgactgggccgggtgcagtggctcacgcctgtaatcccaacactttgggaggccgaggcgggcagatcacctgaggtcgggagttcgagaccagcctgaccaacatggagaaaccccatctctactaaaaatacaaaatttgctgggtgtgtggtggcgcatgcctgtagtcccagctatgggaggctgaggcaggagaatcgcttgaaccccggaggcggaggttgcagtgagccgagatcgcaccattgcactccagcctgggcaacaagaatgaaactccatctcaaaaaaacagaacaaaacaaaacaaaacacctgcctgactcagaatctcagcctgactttgcgggctccagatatctgtttcccaagtaggatgggtaccttattggggtcggagggctctttgctgggtctagcacaactggatgttgtggctggggtgcgggctggctcccaggggcccaggaagtgggctggccggaaagggcagtgccttggtccactctgggtcatgagttgagctatggggagtggggccggaagaggaggtgtttagggtggagacaggaggtgggctgagtgcttgcattgtacagagcactgctttggcctgaactcccagcccagggtgaccttgttacagtggcagcctgagggccagagcaggacccagtgacctagctggatcctgtagagcccctgctcttttcctctccctctctctctcagatatggacccatggaatgtcagagttgactttctgtagataaggaagccgaggccagagggtgtgactggcccaaggtactacagccagtcagggccggccagcccagctgccactgacctcttaccacagggggctgggaatgagaccctgtcctttgcttggcctcactcctgcctcctggctcttcactctggcctctgtacttacctctcacctttccttcactcagtcacctcccttgaacctttccttcccgcccacttttcttcctgccctcgatgcaggatcccaagccggctccctttctgcatcctcccgccccgccctctccatccagctctccactcgtctcctccatcacttcctcttcccctcctcctctcctttgtccctccctccctggctcccttcccccgccgctggtggccggcccgcccctccccgggcattggcggctgctcgctgcctcgctgctcgctccgagcctagagccggcagctcgggaggtcggcccgccccctcaaaggctccgggcgggcccgggacctggagggcccgagctagcgggggcgagcggtccggaggtccggtttcggcggtgagtcctcagccccgggccagccacagtccccaagcagccaagcttggagaagctcagactgggaggggcgtcttgaggagggtgggcgggaggaggtgcatggggtcctctgaccttctttgggagcttgaggctgagagactcgattgtgtgtgttccctgaacatttctaaatggggattctgggcttgggggcacttctcagccggtagaccttatcttctccagcgctccggcagtcccctccttaggacccacctccctcagatggggttaaagagtcctggttagaatgaggggagtctaccttatggccaaggagggtctctgatagraaggaccaaggcccttcctcccatattcccttcactcggtctccctttggacaatccattctatttgtgtgaccaggagggcagtgacagtagctctgagagtgtgtgagcatgtacgcccataagtctgttgtgttactatgagtgtgtatgagtgtgagcctgtttgtgttggtgtttctcctctgcatctctcacagataggattcaccctctccttcgcccagtttttcccctccagatgtgcagctcctccacccacctgcacacagctggaccctgatcccccctgggcatgggggacactgatcatgactttggcaggatgggcagggattcctgggctccctgaaagggctggcctttgcgggttggggtgggagtgggcagagaggaggcttcttcccagaaacaggctggccagacccctgggggctgtaggggccagcatcagggcaatgcctgaagcttctgcatgcaaatagaaagttaatttgggcaggagctgggctgctctcagtcctgctgccctcctgcccgctctattaatacggatccagctctgctgcctggcatcactatttatagcccagaggcagcatggccacacccccttatgccggggagggtgaagggctgaggagggggcagaaaacacacagctataggggcccaggcagaggatccctagatgcctacatcctacttgggtgggcctgggactgctgggctggaatccactcagactccctgcctccttcccagcctggactgtgtggtcaggctcctgatccctaccacccacgaccctgggttgagtggctctgtctagaccctgtgaactcatcaccagtaggcttgttaaatggctaaatggagggggaggggcttgacagggctctttctgaaacagctgtggttgtaattaggtggacagtgtggttggctattatttattccagttttgaatactctgggatcctcttctctgattggtgacttggcagggaaggctccctctctctcctttagaattgttggtgtctggctgcctgggagggcctttgtgtatgccaggatagtgagtggctttatccactatggttatctgccatgggcttctcagcctactaaacccccaacccaagcaatgcccaggatcccaggaacaggctcctgagcttctcagtaagggacctgccaaggtactcacgtggcctgggatgcctcttgcccttgcggcctgcctgagctgaactgtctcagcgtccaggaatgtagacttctctgccagtcttagctcagactggcgtgaagcttggggtgccaagtggcaccagattgggtagacaggaggctgaggccgggggccaggggtgtggacaaattggaaggattggtggtagagagcaacagggctctggcttctcccaacatagtatcttctgcagtagccctccagcacctggtgtggctgggaggtggagttctgctagctacagttaggcgcctgtgggcacatctgccactgtgcacactccaggtgcccctggctacattttccagctcccacatgccctccccctccaggtactcacacttcccgggcaggactgggcttgtgtctactgcctgggaatgtgcttggctgaggccgggcctggtggcctagtcttggcctgatgccaggggagaccagggagcatgcagagggtgcttagtcagaaagaaaggtggtggtcgctccctagacttgcagtgcacagctctcctaaggtcacaaaacaagaaagagtgggagcaaattcaggacccccccggttcatctgactgatccatggtttttccccttgttccctatctcagtttttttttgtgaccctggaagttgctgcctctcagactgactcttctacccttctacccaaggggcagatagatggatcatggatacaggctggggttgggggacaggtgtgtctgtgttctctgaacatttgtgtgtgtgtgtgtgtgtgtgtgtgtgtgtgtgtgtgtgagacggagtttcgctctgttgcccaggctggagtgcagtggtgtgatctcggctcactgcagcctctgcctcctggattcaagcaattctcttgcctcagcctcccaagtagctaggactacaggcgcacgccaccacccccagctaagttttgyattttgagtagagacggagtttcaccatgttggccaggctggtctcgaactgctgacctcaggtgatccgcccgccttggcctcccaaaatgctggaattacaggtgtgagccaccatgcctggcctctctgaatatatttttacagagtactttcacatacactgtcttattaaccctacaagatcagtggtattgtccccatttttctgattaagagaactagattcagaggtgaagttacttcacccagagatctcacagctagtaagaagaggaattaggacgaggactcagatcttgggactcactcaccagtgctttttctactctgtcttgtgctgcggagccctggaggtgcccatctcaagcacaggcaaggtcaggtgtggaytgtgtggactctgagagcagatgaggatgggtctttagagctgaggtgagcctgctagtgctgtgaggtggggtaacttcagtcctgcctgcccttccaagtgttttctctctttcttcctttcttttttttttttttttttttttttttttgagacagagtttagctcttgtcatgtaggctggagtgcagtggcatgatctcagctcactgcaacctccgcttcctgggttcaagctattctctgatctcagtctcctgagtagctgggattatgggattacaggcgtccaccaccacacccggctaatttttgtatttttagtagagacgggacttcaccacattggccaggctggtctccaactcccgacctcaggtgatccaccctcctccgcctccaaaagtgttgggattacaggtgtgagccaccacacctggtcttcaagtgtttgctttctctgcaggctgcatgttgtgcctgggtcagtccaccttccttcgctttaaccacccggctgaagccaagtggatgaaaagcatgattccagcagggggccgagcccctgggcccccctacagccctgttcctggtaggtaccgacgggggcagggtgctgggttgatggtgttcctgcagcagtcctcctccttgctcacttcagccacacttggagtgttagggcaagacaatacctaaggtctgggctcactgccacctgccatgggcgggtggagaatgccaggcagtggggccactgagagctaaccaaggcagtgctgcttagctaaaattgggaaattatgtgcctcgagggatggcaagctctgccagcttgtaccccactgccctggaggatgccactcagtgtctggaactctgrcccacttgtgtcaccacagggagcctcaccctctagggtaccctgaggggcaraaggaagcattaggttgaactccctgtaagctgtggtggggatcatgtccttgggcctcgcccaaccctcactccatgccctgcccgctgatgactcagtggagcagctgtattttgtgtgtgaattattgatccccagaagagaattggtgattgttctggggaaccaacacaggccccctcagcccagctgcacaggggggcaggaggggtgcagaccaggaggctattatgggtttaccatctcagactttgcactggcatttagatggctatggggtgacaggtgctgggacagatggacatggatgtcaggtacacctagtggggtggtatcagcagcctaagtggatagcctggggacctgaagaaaggtgagtgatcactgggattatcagtatccayggcatcccctctgactatatcccacacagtctccataattttggacccaaactcagtcttgcaaaggctttcccttctcttttccctaccctcgatcttttccagtcctctgggggctcagaagcctgggttcccagtctactccctagttaattttaccctgcccccaccccagccttgtcatgtcactcccttagctgtttggggcagtggttccagggactcctatatggttgactagtgctggggcatggcaaaagcaggctcttgctggcatggcttaatgggataattggaggcactgagcttcacctccttgctggcagcctggcttccaggaaccagccattagcactagctccctcccctgcctctgattggacgaagtggtgcagcacacacccctcacccagccctgcaggcttttttctttttctttttttttttttacccctgggcctctggttcctacatkgggaggccctgacatcctattagactaggagcccctggaacttctggccagctctgcagcaggcgcccatcttcttkgtataatgccttctgttttcttttttctttttttttgttttgagatggagtctcactctgtcgcccaggctgcagtgcagtggcgcgatctcggctcactgcaacctccgcctcctgggttcaagtgattttcctgcctcagcctcccgagtagctgggactacaggtgcatgccaccacacccggctaattttttatttttagtagagatggggtttcaccatgttggccaggctggtctcgaactcctgacctcaggtgatacatccatttcggcttcacaaagtgctgggattacaggcgtgagccaccacgcctggcctcttttttttttgagacagtcttgctgtgtcacccaggcagttctcagctcactgcaacttcctgggttcaagcgattctcatacctcagcctcctgagtagttgggattacagacatgtgccaccatacccagctaattttttgtatttttattagaggtggggtttcaccatgttggccaggctggtcttgaactcctgtcctcaagtgatctgcccgccttggcctccccaagtgttgggattacaggcgtgagccaccgtgcctggcctacgtgcccttcttgaggagggatataggatatagattggaggagtctagtcttggggtgaattgacaacaatagtcttagaagtgcctatcattgttaactgttttaagtcacaggcaggaaggccctgccgattcccttcctttacagaaggagaaactgaggacaagtgacttggctaaggttgcatagcaggtcagtggcagagctagctggtaccagaaccacatctcctggcttcttctccagagccttgttagcctcactgtgctaggaggaggggggctagtgctctggcttttatgcatatgcagctccctaaagtcaaagacctttgcatttccctccagcagaatcagaaagtytggtaaatgggaaccacaccccacagactgcaacacggggaccctctgcctgtgccagccacagttccctggtgagctctattgagaaggacctgcaagagatcatggactcactggtgctagaggagcctggagctgctggcaagaagcctgccgcaacctctccactgtcaccgatggctaatggtgggcgctacctgctgtctcccccaaccagccccggcgccatgtctgtgggctccagctatgagaacacctctccagccttctctccactctcttcaccagccagcagtggaagctgtgccagtcactcacccagtgggcaagagccaggaccttctgtgcccccgctggtacctgcccgttcctccagctaccatctggccctacagcccccacagtcccgcccaagtggtgctygctccgagagtcctcggctgagcaggaaagggggccatgagaggcctcccagccctggcctccggggtctgctgacagacagccctgcagctactgtcttggcggaggcccggagagccactgagagcccccggctgggtgggcagctgcctgtggtggccatcagcctgagtgaatacccagcttctggtgctctcagtcaacccaccagcattcctggcagccccaagtttcagcctccagtccctgctccccgaaacaagattggcacactccaggaccgccctcccagccctttccgtgagcctccaggcagtgagcgggtgctaacaaccagcccctcacgccaactggtgggccgaacattttcagatgggttagccacccgtaccctgcagcctcctgagagtccccgcctgggccggcggggcctggacagtatgcgagaactaccccccttaagtccatctctgtcccggcgagctctctccccgctgcccacccggaccaycccagatcccaagctaaacagggaagtggcagagagtcctcggccccggcgctgggcagcccatggggcttcaccagaggacttctccctgacgctgggggcacggggccgtaggacacggagcccctcacccacactgggtgagtctctggcaccccacaagggcagcttcagtggcaggctgagcccagcctacagtctgggctctcttactggggcttcaccctgccagagtccctgtgtccagaggaagctctccagcggggacttgcgggtgcctgtcacaagggagcggaaaaatagcatcacagagatcagtgacaatgaggacgacctcctggagtaccaccggcgacagcgccaagagcggctccgggagcaggagatggagaggctggtgagcgggtgccagggaggcttgccastgtccatggcagagtctctgccagggctcgagcaggccagctggcagagcaggagaggccctcaaacagggcttsggcttctcaaggttccccacctccaggatacactttagtgatcaatatcttatggttctggtgccgtgaagaagaaattcctttgaaatctctaagactttattttaaattcttgctaattttgcatttattcaacatagcatttgttttaatgttaaattaaatttcacattgtttacctgagcacagtgaagctctaggaaaacataccacaggtatggtaagacctcgaacctcccagtttgagaagcagttggtgatcatgagtaggctgaagctcagagaggggaatggctttgtccaaggtcacacagcaagttctggcagagctagaattggaacccaggtcccctgtctgactctttctgagacttgttctttagaaaagtaccttgtccttcttttttgcttgtctttggcctctacaagtgggtgggagctgctcatcctggcccaggcagtatcatctaggagtgcaggtggcagggtagagggacagagcaggataggcaaccctggcctgaccgttagccagcctgtgtaattgtgactgtgtgtgtccatgtgcatgcacgtgggtgcatgcaggggctgggtgtggctctaggcagctgtcctggagatggcatctgagctgggtgggggccaggattccccagatagctcagggagcttaaggggctctggctggtgtgtacacagtygagcccatgtacagaagaayggattctgccctctgtcccttacgagcagaacagggttctttggaaggtgggcaggaaccctgggattggtttgaggaagagaaccagaactgatgagaaccagaactgaagcatctggagatgcttttggaagaggttgggacagttttggatgagggtataggattgtgtgtttgtgttggatgggggtgagatgaggcggatcccatcttttcctttgctgcatcttctcttcactgtttttgcattggtctagacgggaatgcatggccattctaagctggggtctcatcctggagagggggcagtgagcctggcacaggcagagtggcaggcacagcctcccccaactcctccatcagttttcccacccccattcccacacataagcacacatcttaccactagtcctgacctgcctcacctgccactttaagtcttggaggctgcccgccctgcccctcccacctcaaccaggctgcttatctgggtcctggggcaggggtggaggcactggcccagcctcccaggtgccgaggctctgttccggtttttttttttttttttgccatggaactgggcaagcaacaggagggaagctgggtaagtgtatgagaacacctctccagccttctctccacttcctgcggtttgggttcatggccaaactgtaagtgatgasagacacttgaggaggtctagggaccctagagagccatggaagcctcacaaaccaggcttcaggcctataggtaggcctgcgggaraaggcaacaaagaccaggaatgtgattgtgtcatccctcctttacctcctaggcccctgagaggtgactgtatctgggtgggtgtgtatgtggagaggggtggatgaagtggtagggccatgggagtactcactcatgggcctgggcattcaaggactggcagcagcccatcctgctgataaacagccaagggctgcctgagggtaacttggagctgaggtggggacaaagagggccgtgtccttggtctacctcttctccatgtatgtctgtggttgggtgtctggtccctgtgggctcatgggtctgttttccagcactgtctgtctgcatacatgcccacctgtctgtatgctagactgtgtttatctgtgagtgtgcatcagtgtgcatttgtgcatgtcagggctggtgtctctgtacttgcctattaatgcagggccagggcacatgttgtatccttgtgtgcctgtgcatcagtgctggtgtgtcagtatgtgtccttgtgtctgtagatctgtgtgtacctgcgtcaggacgagcaactgagtttatctgtgtctcattgtggtctgtagtctgcttaacagtgtgtttctgtatgtgtttagtgtgttactgtgggtccatttggtgtgttcctgtgtgtcctggggtagactgaaaaaagaaaggaacaggaagatggaaggggctgtcccagaagtgggcaggaagaaccaggctgttatgccatgtgggcatgtggcacaacagcctcgttcttcctgcccacttctggggcaccttgtttccctctgcctcccctaggtcttggggtcaggcctctcctgacttgacactgatgtcctagccccctgtaacmctgctctccctcctgacaggatactgaacctggctctatccccaccagggctcagcttcctccccttcatgtcctgctctgtccatcctccccaggaacgccagcgcctggagaccatcctgaacctgtgtgccgaatacagccgggctgatgggggacctgaggctggggagcttcccagcattggggaggccaccgcagcattggcactggcaggccggaggccctcacgaggccttgcaggggcctctgggcggagcagcgaggagcctggcgttgccacccaacgcctrtgggagagtatggagsgctcagatgaggaaaatctcaaggaggagtgcagyagcactgagagcacccagcaggaggtgagatggaggggtaggcaagacaaagaggctgaagttggacctgctgggggcagaggaggctggtgtatccaatgccaaggtccagtgaggggaaggatcaagtttgggaagagattagagagcagaggtgcagaaatgagacaaggaagagaagggaggtgttgatgagcttcccaagctgtaaatatgctttatgacctgcctttccatggggccccacccaggcctggcactcagtggtaaatattctcttccgcagagcccttattgctcccctcaaaggtgggggttgsgggggggcagggaattagcctcctgtctcagtccagctattcctcagcaagtgcctggaggaacaggtgatccattttcttagtctgattccaaaaggctctaggcttcctcagttgatagcttccctcccctccagcacgaagatgcacctagcaccaagctccagggagaggtgctagccctggaagaagagcgggctcaggtgctggggcacgtggagcagctcaaggtccgtgtgaaggagctagagcagcagctgcaggagtcagcccgagaggtgagccgtgaagtccctagctggactcttccctaggccaactgaaggccccagagaggggccacagtcagctgctttgatggggaccctggtgtctgcccccaggccgaaatggagcgggcactgctgcagggagagagggaggcagagcgggcactgctgcagaaggagcagaaggcagtggatcagctgcaggagaagctggtggccttggagacaggcatccagaaggagagggacaaggtaacccacacctggcccagcttagtgctgggtaccagtggcctgggagagaaggagaaatgtcttctctggggccctgtacccttcacctcatcatccattctgcagtacaagtggtctctgtggctttccagagacagagtgacttctcctcctctgtggaaggaaccagcttggagggcactgccaggggctgggctggtgtctggggtctcctctgtctgggtctgtgtgctacctctgggtgcctgccatcctaggccctttatggcccttctaggaagtgccaaagccccttcttgggcagtgagcacagcccaagggactgacattggggagtgattcaagttcgggtcccaccatctggagaacatctccctccaagcatgccacaagtgcttacgttgtgatctttgggagatggccctcgggcctctgcttcccttgagccttcaggatctgcagcctcccatcccaggtgatcctagctcctgcccctgcccctttcagatttcgtgccagcctgcaggggccactcccagatgcccaacaccgtgccaaaagctctgaagtggagaggggtcatctatttctggatctgacagtatttttccaataatttaattttccttctggattttttgagtttcttcctcctgccctcaattttgagaatcttaaaaattctttgaccyttttttttttttttggagctttggctctggcccccaaaaccacactcccaaattctgtgccaaattaactccacgcttgccaactaggcctacactaacgtcccttctaatcactgacttgggctttccgcatgcccctaactgccagtgccacccaggtagggctgagccatgcccgcttttgcactaactcagtgggtgcctctgtgcccctggcctctctcctctaatgctgcctccttcttttcttggtgtgggaccccagagtttttatatgaaaggaattggcaggaggattggtagctcaactttactcaagggggcattggcaggaggggtatgagggtgggggaaatgcttggctgtggagctgctcagactgaagagttctttccattggaaatgcctaggctgctgtcttaggctactgtctgaggacagcatgagataacccaaggaagcttcctggcagcttcctgcacagcagagtaggctgtcttccacctattcccctgcctgccctctggagccaaggagtaaggaggcccagttgtgggcgtggtcttggagggcttgaacaggacctctctgccaacatagtggctacccttcctagctttcccttggggcttcccaaattcagatacccatcagaggttggtaatgggtagcccctactcttctcctcactcctgagccacctataacacagggtattttaaaggctgagtccaaggatgaggaagcacctagaccccaggaactggcctgattaggtcctcctctctggggatgggtagatgagttgggtagagggatgggagtgactgggttcagcatagggcctcactcccagggataaagctcagcatttcagaaggaacctgcctaacctcatttcccactgacctggagttttttggaggcctagacttcgctttctctgtggggaagagaggttattcgaggctgtggtagtgatggtggtggtggtgatggtggtagtgatggcaatggtgtggagggttcactyggcttccctcccctgccctcagcccatggctccactctggctttggaatcagtaaccacagtttctcctctgcctgtcctttgaggggtgactcaccaaaccctcccctcgtcccccttcccaccctcagaggtgtcatctcaccccagaaagaaccgtccaccccctctgtacccactcctgggactcattaccatggaaacagcccgaactaattgcaaccctcatccctgaagttcagcctgcagggccaacaccccaccccgaccctgggcaggaggggagggaggccaagggtgttgggttggggtcccctctgccacactgctttaacatcctcagctcctrattgacgcccaaccctggatttaaccctcaccatcactaccctttttccctgggttaaattttggtctctgggctgtagtagaaggggagggatgagagctggaggctctgtgatgcagaaccagccttgactggtttggagagaaaacagagggccttttctcgagacctacccaacaatttcagttcaagggacttcaggagaccaaaatctgtgccctgcccccacacctctgcctgtgttacctcatcccctgcacctctgactgccgtgttaccttcagctcctggccttgggccctctccctcttcacctctttccctcctcactttccctttctgcccttttctttctcctcgcctggttattctcctctttgattctagcctttttttctcctctctcaacccccattgccgacccccattctgtcccgccctggccgccctcccgcgctcccctcccgccgctgccgggccggagttgaggagtgtgtgttctgtttctcccctgtgccccgccctctccctcgccctcccgccgaccaggagagggcggagctggccgcgggacggaggcacctggaggcccgccaggcgctctacgccgagctccagacgcagctcgataactgccccgagtcagtgcgggaacagttacaggagcagctgagaagggtcagttccaccgccccccctcccccggccccgcgggccacgccccagaaggaagagaggagagcggtgggacgggaccacctggcctctgcagtacctgccggacaccagggtcggtgctgcggtttggagggaaccgggaaggttggggaatcagcgctccaggccatgatgcccgcaaaagggcaaggccaagtacagcgggagctggggggaggcaggtttcttacccaatttccccgggtccagccccatacaacgcatgcccctgtggcctggtcttccaggcccagagtggcattgcaagcaccacccaaccccctttgtcactgtcgttgaaggaggcagaggccctggagactgagacaaagctctttgaggacttrgagttccagcagttggagcgggagagccgcgtggaggaggagcgcgagctggccggccaggggctgctccggagcaaggctgagctgctccgcagcatcgccaagaggaaggtgtgccccacctcgttccctgctgcgtgctgttggaggccagtgacctgggtttgaatcccaatgacctcacaaaagttaacttcgtcttttgtgcctggatttccttgtctgtaaaatgagaattacaacaggytgttgtgagaattaaacaagatgtaaagacagaatargatgtgattgtaatgagcactcggtgaagaataactattattaagctctgactcccctcagtcttccagtggaaagtggattctgctcccattcagagcttggcactggcccagcagkaaggtgaaagatggaggaggaggaggcttgcccctgtgcttgcagagctcttgtctggtggaagtgctgggacacacagaaagatttgagatctggatattagagccagctaggggccctagaaagggcattcatttcggttccagccatggctcagccctgccttggctgagctataaaacaagggttattgrgtattgtggcctggccagctgtgacacgctagctagatactgtgatcacctgctcttgatctcagccagaccacaggatggtggcacaggtgactgtgtatgtttggggagtaaagctgggaggaggtatgtgttagtaagggttgggaagaggtgagggagggattggagaggatggctcaagcagcttccacccttatggctgaagcttgtggccatgcacatgcacacatgcatgtacattttgcttggctggagttagtgtgggggaagtgagggtggtgagattggggaggggtgtctaaaattggtgacgtaggggatttgctggttagcctggggttggtggtaagtggggagctgctggactttccttgagtccagatcccatgcttctctccctgagctgctgtcttacaaacgcactttctggatgtaagactgactgatgaaaggagggaagaaaattgacacacctaagcacatgggtgtgtgtcaggcaccttgctgggagccttccttggattacctcaatgctgtccttaggacggtatcacaagacaagtgctgttattcccattttatagacaaggaaactaggagtaggagaagctacacattttgcccaaagcctcccattatataagcttcagagtcagaattggaacccaggcctgttggcccaaatcccacgttccttcgactgtactgcactgaggctaggggcgggcacttctctagcctcttcctctttctttctggagggaatgcggtagggagctgtagatcagctaatctcatccctttggggttctggtgagtataagctccagggagtttgggagggcttggcagtagtggattcctcttcccacacccaccctgcctcctgggaaaccggagctcagcccctaggacctggggtgtcacattcttccccatgctcctccttaggaaccttatccagctttcatcctcagaccctagtgtcccaccctaggctctgtctgccctggtgccctgtgctcccctgccctttccactctgattcagagtgactcagagtactggtctgggagtccaatagatgattctaatccgtgctctaccacttagctggctaagagatcttagctcctaaatatgttggtgttctcacctataaaatgggtataaatgcacctgcctcataaaggagcttattaaattacgtaacaaatgcaaaacatttagcagagttcctggctcctaatgggttcttagtagatggcagctcttgcggtgaggattactgcctagcctactttgttgttgttgttgattttgagacagagtctcgctgttgtcgcccaggctgggttgcaatggtgtgatctcacctcactgcaacctccacctcccaggttcaagcgattctcctgcctcagcctctcaagtagctgggattacaggtgcccccccaaccccacacctggctaatttttgtatttttggaagaggtgggatttcactctgttggccaggctggtctcaaactcctaacctcaggtgatccagcctcctcagcctcccaaagtgctaagattacaggcatgagccacagcgcccggccagcctactttggtcttttcttggactgaccccaaatttaggacatctcccttctttaactcttcctttcccatgatttgttcctaaagatggtggtttaaggccgccttcttcaggaagccctcctgggattaacccagcccatttttcccatctctcatccttcccccttacttactatcttttcatttccttttagcacatgattgttgagccaggtactgttctaaaagccctattgggggtataaagacagaaaagacaatgtggatcttacgtttggggcaggctggtggtggtggtaacagatatattcacaaataacaataataaaggcagatggtgatacagaagaatgtgagcacagaggaaggagcaaagaaatcggcaatcaaggaaggctttggagaggagatagcatttggtctagtcttagatgataagtaagctcttgataggtagagaagattggaacagctctcctggcctaaggaagcgacataagaaaggcctgagagtttacagctacacagctgagtgtacagtgtggctgagctgaaaggacatggaggctgtaagagggaggggagctgcaaagggttcgggagccccgaatgcctggtaaggagtttgtgctttatcctgtgtgtaatgaggagccactgaaagattttgaggagaggcatgatctgaccttacttgtggatttttaaaaaattattcaagtaatattcctttttagaaagtaatttttctttttagaaagattagaaaattcagataagcaaacaaacctcaaagtcatcttaggaagatatttgtgacagtgtggagtggatcaggaagttgagagagtggaagcaaaggctggtgagaaggtccagaccagggaagcagagggcctggatttgggtggtggcaagtggggttgggacagggagaatgaggcagatggagtgtctctaggctttgggacccattggttgtagggtaagggaagggagatttgaggatctgagtggtgtgcctaatggcacaggggtcattggtcaagggagggagggaggcccgagggaaggagcccacatggcagcctgttttcttagggtgagttgaggccaagcagaagagctggttgatccccttcacctgagccttgagtgtctgggcaggagagccagctagttctcaccttgggctcagccctgtctccccagggcctgatcaaccaccccatctcctttaggagcgcctggccatcctggacagtcaggctgggcagatccgggctcaggcygtgcaggartcagaacrcctggcccgggacaagaatgcctccttacagctgctgcaaaaggtagggtccctgaggttgggccgggagatttggagtagggtaagtgggaggggagtgcagaaggactggggtgtaaatgtgctggggtggagcacagggcccccctcacacagtctcctggctcccactcctctttgactctgccattctgggctcgcaggagaaggagaagctgactgtgctggaaaggagataccactcactcacagggggcaggcctttcccgaagaccacatcgaccctcaaagaggtatcatgattggattagccccagcttcaggcccaaggcgtgtcctgggaggctctgagtaacacatggcactttcaccccagtagctgaggttgtgtgggggcatcttcctgaatgggagagatttgaggaggaatggccccaagctctgggatttgattttccatggctgccagctgcctctgtttagttgcctctggggttcccaggagccyacagatttcactgtttttggtggctgaatatatgtggggggactcaggggcctgggttgggtgggtagacagctcagaggcttggtaggggccgggctggatggactcaccttgaaggggagcatagggatataggggtgctgatcctggggctcttgggcttcagtcctgagttaggcatttgtctcagaagaggatattgaggccccttaagtggttcttccccaagtctgtatgtctggtgtgtgaattccaaatagaacatatctggtttaccaacttcgttccctccctccctccctccctgcctcactacacaaacaatttaggcctgcggtggggaactgggccaagtgtgagggatgcagcccctcaccrtgtcccctctctgtaggccgagctgctcatctccgagtcctcagagatggggctggggactaaggctctgggccttttcccagggtcttctcaggctggggcctcctctgtctctttaaccccacctgcttccactcttctctgccccaaagcacaagaggtaatcacagctaactgcgtgctctgctttgcccactgcctgtctgcctgcccgctgagcccctgcctacagctcctcccagggcttagctgaagggcatgtggtgatagtttcttggctggccagagtttgggagagtgtgtgcgagcatgccatgccgccattccatagagtgcctgtgcagcccattgaattgcatatttatttgccatgcagaatataattctgcatgccattcattagttctcacaacatgctggaccctctgactgactttccttttccatgaccccagaggacaacctggttctagagctaggcctggatgggccccttgggtagagcaggcttatgatcctgcgctttgattcagcatgcattgtggaggtctaccatgctcccagcacccagataagctcagtttctaaggacaggtgatgaatacgacagtccctatcctcccgacccacagttgaatgtgttggcatctttccaaggactcaccttgggcagtgggcccatttttctgctaggcttttagctgttcttgctaaggcctctttctcacagcccatcttgctcaggccctggtgatgtctccaccttcccccacctgtttctagctcctgyccaggctgatggggtgtgaggggaccctggggaatggtgtgactggtgctcaatgctgcatgtgtgtgccccactggggactgccaggttgttggggacggggagggggtctctggaagctgggttctgatcctcagtgaactcttagaaggccttctgtgggcttctttgcctgcccccagcccagggcgaattcaggcatgggccttcagggtctgcttggggcaggactggatgccaaagtggctctttaagagtggagggcaggaggagccttcagacagttggttctgctgcccttttctggtctctgtcactccctgcagccatctatgggcatagcaggcaccctacccctgccttggattttgtattgacatggagtgatggccctgtggcctggcrtggagtttggggtgttgggcaccttattgaaccctgttaaccccttctttgcccacccctaccccttctactgggcaccccaggaatatgtgaccctggcagaagttttccagctgtgttcccgcttggacccctatgcttctgccacttcccccagtgtgctcgcccagcccctgcctgacagtgaggtaccagccaccgagggtgcccaccaatgcccaaggacctctttatggatggcctagattcccccttgggcctgggtggagctagggggacagaagggtctgtgttcgacagtgagggagaagggcagcctgcataaggggaggttgggagtgktttytttttttccctggggccttgggagctttctttagctcctatggcctggggaggggcacrccttctgctctaggatgagggtgtcgagttgagaggactctggctttcctaggctgcaggctctgtactttctgccctttccctcccttcccctgtgggtagggccatctcatgtgttctggttccattaacctcttatattccctcctgcgtctggccttgctccaagtacgtgatgcttgagcagctaaaggtgatgcggggcacctcgcccatgcccccagcccctgtgccaggcctttctccctgggcctccgcctcccgggacctggttcccaccacctgccttcctcccatgctgccctcctcctcgttcgcttccatcacgccttcacctaaggttggtggtttgtgagttcttgctacccccacccatgactggtgtgctctgtgtgtgttttgctcctgctcacctggcctcttggctctgggccagcccaaggggagtgcccagtgcctgcaggctctgtctggtggctggtttcatggctggtgtagcacatgtctgtggtctggaagttgtaccctgactgtttctytttgcccttagtacattcagggcaactgttgtctcactgtttttctcttctttttcttgatgctctcctttctcccttccttcctccccttcttccttcaccttcctgtccatttccctgatgtggccttcctttttaaccttccccttccttcttcctcttctttcttctttctcccttctcctgccttttcctttccctttatttcctggcctttcctctccatcctcccctcctgtccccttttcccctccccattcccacctccagatggagaagctgctgctccctgctgtagacttagagcagtggtaccaggagctgatggccgggctggggactggccccgctgcagcctcccctcactcttctcccccgcctctgcccgccaaagcttcccgtcagctgcaggtaacccctccttcactgcccgtcctccccagcctttgcacctgtccactctgatacctcctgccaatccatcagccacacagtaccaccttgagtggaggcgtcagcccagtcagggcaatgagggcacctctgggccctgagagggtcactccttgggcagccatcctggcatgtgggcaaccggggggccagcctccatagtctaaaactatctgattgagtgtctggtggaagaggattctggagctgtggtcagtttgggatctgtttggtgccctgtgctgagctaggctgtgggtctggcctatgcttggcagcccccaacacctggagcttctcacccagtctgggggcctgacaggctcttgggcctgtggcaactggaactagtgtgtcctgggaagaactgccagtattttgttctcctggtctctccagcagtgacacttggaagcagaaaacaaagggcaaagactctgaagtgacagcctaagcctcctcagagttgccatggagggcgtgggcctacctgaacctgcagcaagcaactgaccatggggtgggaaagggggctgggctagtcttctcctcaggtttcctccactgaccagctgcagtgcctaagattgaccatttaagatcaccccttgagtgaaggcactgcatctgtaagactgtgacctcagctaaaatttcatgtttccttggggaggagtttgatcatgtaagacttctactgtgtacccagctggttagagattttaacgtgttttgattctctgatcatcatcataggcctttgaggtagatgaagttaactcattttatagatgaaacactggggcctagagaagataagtaatctctccaaggccacacagctaggaagtagcagagcttatgccasgtcagggtttgtgacactaaaggccatattcaccacatgctagtgctgcaggggagcttggccattatttagtctagtcctacccccttcttttgcagataaggaagccaaggcccagagtagggaggtgtgtggcccaaggtcacacagcctgttagtggcagagctaggaccagagggaacccagcttctagttggtctcctgcacaactgcctgactgacattaaatccttgcatgggtctgtttacaggtcttttcttagacccagggttgggctagggattggcccagggaggaacagcctggaaaggagaattggcagctgccaatagcatctggccattgggctggctcaggaggcttgttgtcagagccagaaggcctcagaggcctagtgccagggcggtacgtcagatcacagcagactaggtgacatgggggaggtggccaatgggggagccaggaatcactgggcactatcttttctttccaggtttaccgctccaagatggatggcgaggccaccagcccccttccccggacccgcagcggccccctcccctcctcctctggctcttcctcctcctcctcccagctcagcgtggctaccctggggcgtagcccctccccaaaggtctgaggacagtgggtggggctgcacatgtggctggggatggagacttccaccctggggagaggccaagaccttgggaatgggggtaagggccttctgagcccaggtccgaactctccattcctctgcagagcgctctactcacccagaatggcacgggcagccttcctcgcaacctggcagccacactgcaggacatcgagaccaagcgccaactagctctgcagcagaagggtgagtgactgccccgccagcccacctgctctcctgaggggaccctgggtagttgccatgcctcctctatgctcacacctttcacaggatgtttttcctttaattgggatctaggcaagaccagaaaggatttagagtgggtacctaaagaagagcttcctggatatttatctaaagccttcagggcaggagactaagggcttagggggctgtgacatctttcctagagagcctagccaataagggaactgcttgttgacctgagtcgggttagacattgccctctctggagggaggggatggatttgatgacttctagaaatggttgcctgagatattggctctggggacccaggagtccttgttgcttgtgtgcaatttggttgttttgaaagcccatgtctgtgcctctctctcctcttaccccctctgtgtctctaccgtaccctctgcctggggtcccccacgccagtcgagtcgcttcccgccgagcccctcccaaccgacgacccagcaggtagaacgttggtcatagagggcattgctttggccaggcagcccctgccctggcatcagcatgatgtgtcctgcccaggtccccactgcctgcaggcagggtcccaggctgagctgggttggggtgtctgctggcctcacccctccagctggcctctcttctgccctcatctgtgctctaccgtgtctcccctgccttctttcttgygtttgttgcttttgcttctgcattgcaggggggtctgcattggcagtctgggtgctcatggggtttctgccatctcttccttctcccttctccagcaggcagggtgggtgcatgtatcctgcctagacctacttaggccttggttgtgagctggagccaactggctgtcgtgctgccccagcactacttgggtaggtttggtgtcctatatggactcagggtgygaaagagcactgaagccagactgtgcatctgtggcyggttgtgcaggcgactgaagcattggcagagcagccaggcctggagctgcaggggccttagggaagctgyggggagagggggctgctctgtgttaacctctccctgcttgcccctccctctgtgtgttgtgctgccagtggcctgctccttagctgcgtggggagcccacygtgactcccatctgtctctccttcaggacaacaagtgattgaagagcagcggcggcgactggctgagctgaagcagaaagcggcagctgaggcacagtgccagtgggatgcccttcacggggcagcacccttcccagcgggcccctcgggcttcccccctctcatgcaccactctatcctacaccacctgcctgcggggcgggagcgtggggaggagggtgagcacgcctatgatacgctgagtctggagagctctgacagcatggagaccagcatctccaccgggggcaactcggcctgctcccctgacaacatgtccaggtacacccgacgcctgggcccgcagcctccctcagccaccgcctcagctccttgatgcacttcctcttccccttctctccccagcgcgagtggtctggacatggggaagatcgaggagatggagaagatgctgaaagaggctcatgcagagaagaaccggctcatggagtcgagggtgagtctgacctggatcggggaggcagaaggtgttggggcacagagctacctactgcatgtcaagggcctgtgctccaccccaagcccttccacccacattagccttgccacattcccttggggtagaaaatgttttaaaaggttgtattctggccgggcgcggtggctcatgcccgtaatcccagcacttcaggtggccgaggcaggcggatcacgaggtcaggagatcgaaaccatcctggctaacacggtgaaaccccgtctctactgaaaatacaaaaaattagctgggcgtggtggcaggcgcctgtagtcccagctgcgcgggaggctgaggcaggagaatggcgtgaacccgggaggcggaggttgcagtaagccgagatcgcaccactgcactccagcctgggagacagagcgagactccgtctcaaaaaaaaaaaaaaaaaaaaaaaaaaaaggttgtattcctcaaacaggcttagggaggcttggtttgattacaacttcatagctcttaggaacagagaaggcagcatagtaaccattctctaaccaataatttcctgtatggaaacttccagtttttgcatgtttacttctgtagactttttggcaactacaggaattttgattcctgtctacccgtatggcaggccatycctctkggggctgattaggaaaagcaggaactatgagtgaagtatagaccagaagaggaggcagatgtccaagtcagtgtagaggtgttggcaggggaaccttgggagcagagagggctgacagctccttcacttgggcacggagctgggattcagcaaagagggacccatggtttatcctgggcataggcaggctgatgaaatgtgtgcctaggaaggaggataaataaaggatctgcagaagctgttctgtgtccaccattggaggcactctgcatatttgagatgagagtgggacgcagagagtaaggtcagcagtttgagggatttaataaaaaacagatactgacagtctgaatggaggaccagccagaaaagaatgcctcctatcttatttatgtctgaatatggcaaatgtataagcatctcctggcaaatgtggggaaaggagattctgctaagttttgagctgggaagaaatagtaaatgggagttaatggtataggaggtctttattagtaattaagacatataaagcatcactgacatgctctgtatttaattatttgttttaatgacttctaaaatccttttatagtggcttttataagttcagttctgaccttagtctctagtcacttttttcccataaagtttgaagttcaatagcaaatgtttctaatttgaagtttcagaaggccttcagttagtgattgggaaaggactatatattagctgtcaaaaaaagttgtctagataacccatgttgcgaggattcagatacaattgtaagagccccatttattttttgagtgctttccaactggaatcagtgatgggcatttatctacatgatctaatttcattttcactataattccaggaatgggcattcttaacttcatttcacagatgaggcaactgaggcttaaaaagtttaaatggctgggtgcgatgactcacgcctgtaattccagcactttgggaggccgaggcaggcggatcgcctgaggtcaggagttcaagactagcctggccaacctggtgaaaccctgtctactaaaaatacaaaaaagttagctgggcatggtggcaggcacctgtaatcccagctacttgggaggctgaggcaggagaatcacttgaacctgggaggcgaaggttgcagtgagcgagataaaaaaaaaagtttaaatgattttatcaggatcacagagcccatagtggtagcggggccagggtttgaagtcaggacagtcatgcttaaagcatttctctttaaccagccagggctcttggagagggtgggctttgaagatgatgcctcctcatgccagactaccctgaggtggattcctcctgcagccctgcccaggtgtgaagagggccagtggggggaagaggatggccataggtgctgaccccttggctttgggggcaggagcgggagatggagctgcggcggcaggccctggaggaggagcggcggaggcgtgagcaggtagaayggaggctgcagagtgagagtgcccggaggcagcagctggtcgagaaggaggtcaagatgcgggagaaacaattttcccaggtgaatgggcagtggggcacagtggtggttggtttgacggtgagggctgtagagaagtggggagatcccagggtttctgtgttgggctgtaaaacctgttctactccagaaaagattgctgttggcttaatactagcagaattctacctgggactcattgaccccaaaacagacccaccaggactattcaagtgtgtgtgtgtgtgtgtgtgtgtgtgtgtgtgtgtgtgtgtgtgtgtgtgtttgtgtgctggggtagtgggttgtaaggatgtggcaggccaccttgcagacatccggggtcagagaagagggtctggacaggcatcccagagatgggagctggtagtcaagaatcagagtggctccccttggcctctctccagggcctcagatccgcttcatgagcctgcgctgcaccttcccktctgcttcccctgctgcccctcctgcatgtggaacttcagggtgtgctggcccacaccccacaggacctttcagctccagtccccaccatcagtggatgacctcactctgacttttggtttacatctccaagacagaattgtactagtttctcttcgggacagaaatccttccttgcccaaaagccagccctaccctttctccttaaacaggagacttgagcagaacaattgaaagcagaaggagaaattggtttgggctgggaaatctgcccatgtctctggtcccaaatcctaactcccacaaccccccatgagaatctgtaggacttagatagsctgtcccttctgattagtaggcttccccaggttgggagtcccctggaatctttcccaagcagtgatcacagttccctcatttcctacagtgcaacaaaataaatcctaagggataggtcatctggattgggtttgggaaataatgagaaggggctgggcacagtggctcacgtctgtaatcccagcactttgggaggccgaggtacacagatcacttgagtccaggagttcagagaccagcctggccaacatggcaaaaccccatctctacaaaaaatacaaaaattagctgggcgtggtttcacacacctgtaatcctagcttactctgatggctgaggcatgagaatcgcttgaatccaggaggtggaggttgcagtgagccgagatcatgccactgcactccagtctggatgatggagtgaaaytctgtctcaggaaaaaaaaaaaagaaaaaagaagctctgtgaattttacccccgtggttggaatatttgtaaaatgcttggcttccctttcctgcttcagtcagtgactgttctgggagtctctcttctagcccctgtcctggggctcaggcattgctgcagtggccactggtgtctggtgtgggagatgggtagaatcagctatctgtggggtcgtgtgttttgtttttttctttaaataatatatgatgtttcctggccattttaatgttcttctgggacaggaagagtagaaaaatattccggttgactgagaattctagttagtatcagaggtagagtagaccttagtaattatctagttcaaagccggcgttttacatggaaggaaactgaggcccagagaagggatgtgacccaaacaaggtcccatgcgaagtcagaaactagatttcttattgggcttttcttcccagaccacgttcatatctggcctcttgctktattctctttggctcaggagggaaaggaggggcagggcaagacaaagatgccgtgtcttggtcataggtgggaaaactgaggcacagagtgacttcgcagtttgcccggccctaggtagagtcaacataggcatggtaggtctccacttttgccataagccctgtggagccacagtgaccgccatgggttagggaggtgtgatgtcaggctgttggggtttagaagtgaagccaaggggcctggacaggggaataatgagggaagagaggagactctcctgaccctccctcttgctcccaggcacgacccctgacccgctacctgccaatccggaaggaggactttgacctgaagacacatattgagtcatcgggccatggtgttgatacctgcctgcacgtggtgctcagcagcaaggtacaaggcgtgtgtggccctggggtgctggggagagggagaatcccgtggtgagaggcacctcctgggtcgttggaatagtggcgtcagtctctaccctcacctaaccagatctctgtcccaggacctggtgtgctggcctgaggagatgttggggacaatcccccatgaatacaggcacaggcgatggcacacacttaaggcttaagggctgcatatttgggtccttccttactcctgcttcctaccaggtctgccgtggctacttggtcaagatgggcggcaagattaaatcatggaagaagcgctggtttgtcttcgaccggctcaagcgcaccctttcctattatgtgggtgagttcccacaaggccaccctgggggccagccaggatccctgggctctgttacccaggacggctggtcttctagaaggaggccaagcttccaagtaggggaccagagtcttgggctaggctttgccctccttccctgaaaatgtacacaatgtacctggttcacctccatttttgtgttcattcattcattccttcattcagcaatgttactaagcatctagtaagttctaggcactgttctaggctctggtgatgagtaagatggccacagcgctctcatggagcttataatcrgggaagcagacaagagtgataaccacgcacaatgggtatgctgataggagacatccaggcactgcaggagcatggggtcttatggtcagagttgggctgggaactcccccttggacaaattccatcagagattccaagacaagcagttgaacagtgccaaagagtgctcaggatagcccaggaacaggccgactagaccctcttgctctctcagctctctccgttccagcatctagcctagtttcccatccctggaactcccttgtacttttcccacttggagcgtgggatgctgtgttataccctagtcaggaggaggtaaggtatgctgcagtaacaagaagtcataaaatcccagtggctggacaggtgcagtggctcacacctgtgatcccaaaactttgggaggccaaggtgggcagatagcttgaggctaagagattgagaccagcctgggcaacatggtgaaactttgtctctactaaaaatacaaaaattagctgggcgtggtggcatgcacctgtagtcccagctactcgggaggctgagcacgagaattgcttgaacccaagagacagaggttgcagtgagccgagactgcgccactgcactccagcctggacaacagcrtgagactctgtctcaaaaaaataaattaaaaggccgggcatggtgtctcatgcctgtaatcccagcacttttgagaggccgaagcgggcagatcacgaggtcaagagattgagaccatcctggccaacgtggtgaaaccccgtctctactaaaaatacaaaaattagctgggcatggtggcacgcgcctgtagtcccagctactcgggaggctgaggcaggagaattgcttaaacccaggaggcagaggttactgtgagctgagatcgtgccactgcactctagcctggcgatagagcaagacgccgtctcaaaaaaaaaaaaaaaaggaaatctcagtggcttacaagtactaggyttccttatgcccaatacatgtcgactgcacattgtgagttggtgggggctttgctgtgcatcagcgttgtctttgcttcagcatggcttttgggaacatttctggccacagtggcagagggaaagagaggcttaagtgagcccggccttggtattaaatgtcctagttgggaagtgacacacatcatttctgtccagaagtcatagatggggctgtctgccagtcacacagcctcacctagccacacagctgggaagagcaatcctgctaggagctcagaagaggggaaagggctgcagagtttggtgccagagatgctcaggtctggagtgcccayttcccccctaacctggtccctgatcacctgctggcccctctaagaaaccttccctgaccaccctgggtcttgggtgttttgaggaggcaggaggaccagaagcacaggtgtcccatgtttctctctgggccaggaaggtagagggactagggactttggagaggaagaaacatgcctggggaaaggagttccattttaggcatgttgagattgaagtgcctctgggacatctaggtttaggaggatggtcaggattagaggtggagtaatagttgaatcaggtggaataatagtaatagcagatcacctttatcaagcacttgcatgagccaggcgctgtgctaagcactctgcatgcatcatctcattaatctttgaaataatcctatgagggaaacactatttttatgccattttaccgatgaggaaaatgatgctcagagaggttaagtaaattgcccaaggtcccacagctcctaagagacagagataagactgaacctgggcagtcagactgcagagcagagaagaggggagggagagggccgaaccctggggcaggcctacccgtgtggggaaggagaaagaggagagaccagcagagggagaaggggcaggagacaggaagccagcactaaccacatgccaggtgctgggctggtgcttggcatatgtggccttagttagcgcctgtggaacaaaaggagactaagttcagatggcaggaatagaaatgggagcagaaacagggaaggaagccagccaaaggagcagacattcacaagcaggaggtgtcaccagcagtgatggatgctgcaggaaggccaagaaagatgtggcccaaaggctgttagactcagggatgggagcttgtcaagagaaggctttctgctgtgcatggggccaggagccagactgcacaagattgaggataggtgggtggtaaggaagcggaggcaggagtgtgttactatttcctgtgaaggaagggatgggagagaacaggagctggagggctgagcaggcccagagccaggcagggctggtcctttaccaaggaggaaatgtcagaaatgggcctgtggctggataagggccatgggtgccttgcctattccgcttggaccctcttcctgccaactcgatagaaaccccctcattgcatggagtccagattacgtattatatctaggaagcctttcctgaccccaccttactaggagtgattcccaccctcctctgaacccctgcattatccagcatctgtttttccatgtgacatcaatccaggagtgtaatgatataataacagtgccacgttatgtgccacacactgtgctgaataccttaaatgtgttctttcatttaatactcatgacaacctgtgatgcgtaggtggtctcatggggttcctagccatgcctttagtagctatttacatagctgtgtgtctgtattttcctcactgtgagattgtagtttcctaagagaagggtctctgacttctctctgaatcccagtgtctaggactcattccttcagtattgggtacctactgtgtgccaggcacatagttgtttgtgttgggggaggtagaccatggaatggataaaggaggattcagattcagcataagttctatacagaggagcatctgtgctttgggaacacaggagagcacaactgtgcactgtcgtggtgacattttgcaatgggtcttgaagatcatttaggagtttgctaaggaaatgggctggaggagatagttccagcatacagggtgtattattaagggaacagtgagaagctcagataggacttgggactcatgcaggggaaggttatgatacaaggctggagggacatgttggcagcagtccgtaagttgcctttaccaagctgcagaggtcggggagaggaggagcactcgggaaggaacttacttccagccggcaccattgaatttagtgattcgcgtgacctctcctgtaggacgcaggctcactgttaaggatgtcagctgtagcatctgagcagtgccacagacaagttggcccaggccctgtgctttcccttgacagggatcctgccccttctcactgaatggtcacctctgctcaggtagtttgcccctttcctgccacctctgacctccagaggctatatgctatatgtatatgctaactgctctgtacacatcaagggagtgtgcttcctatctttttttttaaaaaataggtaaaagtattcatatagttcaaaaataaaaaatatataaaaaggtttaaattgagaattatgccccacccactacagtaactaattttataaatctcttgtgtatccttatagagtttctataggagaatataaacaaatactttttcttgcacaaaaggtggcatacagtacattctttttacctcctaatgtgtcttagagatcattttatatcaaatttatctatatctagacattatatctcgatataaattatagacttatttctgagtctgtatctgtatcagatatttctttctttctcttttttttttttttttttttttgagacagagttttgctctttttgcccaggctgaagtgcagtggcgtgatctcagctcactgcaacctccgcctcccggattcaagtgattctcctgcctcaggctcccgaatagctgggattataggcatgcaccaccacactcggcttatttttgtattttgagtagagacggggtttcaccatgttggccaggctggtctcgaactcctgacctcaggtgatccaccctcctcggcctcccaaaatgctggaattataggcatgagccaccatgcctggcctatatcattttacttaacagctgtatttagtcttccatgatgtgacacacactaacttattaaccagtctccacttgattgatattttggttgtttccaatcttctgtgactgcagacaatactatacttaataatcttgtgtgtgttactttgtatatgtgaaagagaaattctcctaaatgtaagcattggatcaaaagataaatgcctttctaattttgatagacatggccaaattgttcataagggttttaccaatttatactcccacatgtcattagactgcctccttcaccatagacttgccaaaagtgtgctgtatatttgttgtatgtttttgtcattggggtaggtgagaagtggtatctcagtggagttctgatttgtatttctctgtgattatgagtgaggctgagcattatccatatctttaggattctgtattgggttctgtttgggggtcttgggagactaggatcttcaccccatttcccagatttggaagctcaggccatggagctccacgtaaatggagctagacctgaagtgtgaccggctccatagcccacccttacttgctttgcagacaagcatgagacgaagctgaagggagtcatctatttccaggccattgaggaagtgtactacgaccacctgcgcagtgcagccaaggtcaggggtggagggcaccagaggggggccagagggacagccatggggaaggggtggcctggtggggctctgggagcaaaggcctccagcctgccctctacagaggctccaacccagtccttgttctctttgtcaactttctcttcctttctccctctccccttcccagaagaggtttttccgcttcactatggtgactgaggtacccctccccacttagctgtaaccagcacattaacacctcctgtaccccactcatccctgacccttgacctccccttcatccccctcccttcccccaggcccaagggaggagcagaaagcaggttgcaaagagcaagaagctcctgtgggcttgggtgcctctctctccttgttgcctccctctcctggaaatgacagcagaccccatgggggtctggtgatagagaagggatggccggaaggggtggaggggacccttaaagactagatttaatagggagaaattgataaacaggagatattggaggctggggcctgcttccctagtgcaagtcagccttcctgcccccagccctctggtgcccaccccagtcctgatctctgctcctctggggtcccagggcctggcatcctacttgttgctttttctgtctgccgctgttttgctgagaggaaactctggtcctcactggaaaagcctttgtgtttgatcctcttgatactcacttttgaacctggggcgccaaggaccagtgccccccttgtcaggktatagctctgtcaggktccagggagtttagagagcccaggactgctgtggtgtgagaagggaacatttcagcctggggctcacatggactggtagggtctaggctctggacctatttaggactaagctccagggctttctaggggctgggaggggaaagggcagatagggaggcaggtgagaatattcctgggcatgggtgagccccatcttagaccttcctstcttcctttggcagagcccgaacccagccctcaccttctgcgtaaagacccatgaccggctgtactacatggtggccccatctgcagaggccatgcgtatctggatggatgtcattgtcacaggggctgagggctacactcagttcatgaactaactgccgtgggcctcctggcagagcacaactggggcttttgtataagaagactttaatattctgtaaggagcttggtcctgtgagtttctgggctctggcctcctgaagaaccagccagaagaagaaaagtagaggtggctttgctgcctcctgggagcccagaacttgcagtaaccctttagggtcctgccccaggcccagccagggctgaggagctgtcacagagagggcctcagctctgacctgacacctgctctccccagcctgttttctcttttctaaaagacaaattatggtaccataagctgccaaagatcccctcctgcctcagacccctttgccaggggctttgggggctgagcagagccacatccagagtggggtaatagctcaggcggcccgcttcccatttctcaaaccccgctctgccccattgttctcctttcccttatactttttattaccttgctcaagggccagagatctcaagtgtcaaccttgaggtcccagctccatcccctagttgcagactcatcaccatggttaccatagtgactgcttcattgccatggttacatactaattgctgcagctctgtggcccagcccactgcttcagctgtgggccatctgagggtacgtgccatcatctctccagcccaggcccctgggcatctcatgctggggggaagggactgaatacctttttccttccccctgcctgtgtcttcagccctgatgcacaggctgccagccccccagtccagccctctcccttccactggtgccttgcttagagccagaagggatgaagccgggggatctatggaacagaggaggagcgatgcagttgggagaggaagctagaagggttatggttggagttctgtayagtgttgagtttccgacagggaaagaggattcctccaatgckcctagagagaaagcctgagcaggagatgatgcagcagaggggaagggccctgtggtgccgccgcccttccttcagcctccgaagggtgatggaaatggagagtggaggaccaggcctccagctgtctggcctcgcccttcacgccttaayactaagcccacctcccctgctctccttcccagcattgagcccttggttgcctgggcccaggctgggggttttcagtatttgtaagcatttcagcagaacaataaagcctttggactacggaagtgagtggaaggccggtgtggggcttggcgctgaggcacttggggataggtcttccctccagagcaggatttccaccctattcaaggttccaggagggagctaggcccctacccatgacctccaggtcgtgaccctgccctccacttcgctctgaggacaggctgggaggtaggagggcatgaagaggcaggggaaggcaggaactggtgcagaggtttaatggggcaggagctggggccaggtgaggagaggagggctgtcaccatggcaggaggctgagcaggaggctgggcagaagggtggccgccaggcagtggggctccaggaaagccagcttggcccctgaggtcagccggtcaccatagcggtccagcagcatcaggaccacgccattcgtccagccaaatccctcctgggagaggcagggcagtggggccagtttctggggaagcctcatacccttggtgggggctgtgggctctctccccaggggcactggccctgcctaaccccagcggtacaggaagcaccagtcagctcctcccccgggcccacatgcaggtgagcacactgaggcctggggcgggggtcatgagcagcagagttcaggagttccctggtgttggccagcccacccctggcctgctcacctgaacttcatattctcctcccccaccgggctgtccaccgttgctgacgtcatactggggacaagcgggtgggctgtatgtcaggtactgccccccagctccaggaacaacaaacaaccagagcccctggggagaagctgctctgcctgcccagcagcccctgcagtgctcaggagtggccactgggacagcctgggggtgcagggagggcttgggccagctcaccttctcatacatggctgacttctgcgagtagacatcaaaattggttcggatccaattctgagccagctggaaagccacttcctgggcccgacgtaaaggtgccttggccaggcctagaccccattgcaggcaggactcaacctccaggtctcccatcccagacagagcagtggctgcaccctactctccccaaggagggaaagaggcctgggccctaagacttccttcctgagaccacaggccaaactgcccttaatcgacggccctggtttgaagggcgaacaggactgattgcactggacaggctgggtggacataagtgtcaagtggaggccaggagagcagaggagcgagagaaaggatacggggcctcttgtgtcttttgttcatgcctccccagcaccagggaggcccacctctacaccctgggaagggtccttggctgtgtcagccctgcctccctacctctgatgaccaggtcctgcaggggggcccaggcattggggaaatcccactgctggcctgtcttctggagagaggtcgggatcccatactggtaagtcaggatccggttgtcctagaaggtcccagacattcccatgactgtgggtggggctggactgggagccaggacaggacgctggaccccgcgggaagccagacgtccccttcctggctcttcttttctcggctcacagctgccccccggtggctctggtgggacccgcaggctgggacaaggggcatagccggaggaagcgccctcccctgcaggtcctgttcagggtcgggagggggcggtgctgcctgcagtggacccgagccacctgctgtgccctcacctccaggtatttcagagccttgtccgccacgccagggtcagagaaacacccggcccagagtggagtgaggttggatgggtaaaactcccggtttttcttcttcttctcaaggtcgtaatcgaaccaggctccggtctgctcatcccacaggactgtgttcagggcggccaagcgctgcgaccgcaggattctgtacttcgtggcctgggagtcgttccctggggcagtgctgcctttagagccagcagccagtgccctgcctgctgccccaggcttttttcgtggttctactttagcctccccgctttgtgtttctctgcaaaggctgagacaccctgatgaccaaggggatgtgccgatctggagcccaccacatttctggcctatggccccgcactgctcccagggaaccactggagctgatctgtccccagggtctccagggtctatcctcccaagggtactggctgggtggattcccctagctcttagggggtcaagggcagctgtctgagggagagggagtggaaggattttggatgcgtggactagggttcccctcacagaccctagagaccctcacagtaagaaagggaggaagagaggattagggttggctccgtttgttctcttgtctggtacgcaaatgtgagtgcaggcttccactagggcggggctcgacaggctaagttgctgaaggcctgtcacacaagggtcctacttccagttctattgccaagcctgagcaggaaaccaagctccctgctttcccttccctactggggtgctcacccagcctggaatagaagttgctcatcagctcctctgcttggcataggaaggcattcaggtcaacaggcaccagtttgcttgttcggatgccgctaagcgagttggggtttgggcctccaatgagccagcgtgaagagaagtcccagccagactcagccccagccttgagctcagcccacagagcctcccggtctcctgtgaggacagagcagggaaccagccagtcccggctgcaggataggcagccattgacaggagaccagagcctgacacagcaggtgtgcagctgccctgcccccagccctccctcaccctcctgctgctcaccttctggcaaggtgtcagccaactccacatctttgctgtaggactcaggcctggcaaagaggagaggtgggcagcctggcactagtagctactaagcccctctgtggtcaagaagaggctgagccatcttgatccagctgcccttgggccccacagcccaggattgcagagggctctcggtgtcaccatctgagaggccaggctaagtcactcctcctcctgcccggggcattgtgatgctctaaccagagtgagcaggtaagagattgaggggtgggctgcccagttcctcacctgggtcccccataagggacataatagcgattcaggaggtagttctttccctccaagctcacagagacagtcctgttcttggtccaaaagtccaattccaaggctagtgtttcaatgttttccctggagtgaagcagacaacacctcagcccaggcgtgctgcccatccccagccctgagaggtctgagggatgggtgggtctgcagagcagcacagggagggtggtacccactgtagaaaggcggtgtcattggtgtgagtcaagtagcaatccatcatgagggtcaagagtgggggctggctccgctgcaggtagtacacgcgcccaccattggggacatgcccatagctgccaaggggaaggcctgctgagatgccctctccccagcaactggcaccaaggcaatccagctgcatgcccgtggcacacctgcctctcctccccacctaggctggaggtgcctggcccccctcacgttttcaccaggtccaagaagttctgcagcatgcccttcaccgtctcagccatctctgagaggagcagaccctccatgacccagtaggagtccctggggaaggggcagcttaggcaccaccctgctgcctccctctgccctgcacaccagccagtggggcactctgccctgctgaagacaccctgctggccctgggtttctccaccactgccagtcctgcaggccccttggtctcttgggcctgggcgctcaccagtagtagaactcaacaaagcgaccgccaggcacaatgaagggatgttctgagtagatgagagagaaccgctcagggtggctgagaacctctggcttcatctggagtcgggagagagggcaaggggagcctagaatccccacggaagcagaggctacaggcagctgggggatctgaggccccgggagtcacagctttggagccaggcagttgggttcagcgctggctccactgctactcagccatgtaatcaaggcctggccgctgggagccttggggtcctcatccctcacctgccggccttgggagtcccagctcaacttggtgccgggtagaagacccgaccactgagccaggcactgggcaggtatccaccaagcagtggccattacgaagacccagggtgggctgggtgggtgaggggggtgccagccccccatttccgctctactccccatccttgctgccaccacccagccgggcccagaggattggcccatcacccccattctctgagccaggtggggataaaaccccaaaccctttccccaggtgaggggatgtggatgagcaaagtagctcaggacagggctgaacacagggcctggccccacgcagcagtagcactgattcctcctgagacggaggcctggcccaggagctcagggaaggagagagcccagcaggcagtgaacatctacccagtggtgccagaggcagtgctgggcagcctggaggtggcagggcaggctagggtttcctggggaggctagggagccttcctggaggaggcgagatgttagaagtagatgctgcccttctgacctcagaagttctttctagagggcctctatttggggacccaggggccagggactggtttctcaggaaaggaaacctgatctgtgctccgaagacactgtgggccccaggcacattcctctcttcagttcccttggtcaggccttgggcaggcccaggacgctgataccttcttccccagcttcttccagagctgatgcagctgccctgcccaggcacgcagtttggcatctgaaatcttctgcaggaactgggggctgaaagaacacaggccccacagggttcaaggaggcagctcagttggaaggaaccctctcttgttccccttccagagtcatacctgtctttccagtctgcaggggtccagggctgcagctcctgccccttggcctggaagtgttcgtggacaaacgcctgcagctgctccctggggatgctgtgattgtggtccctggacagctcagtgaaggtctgcaggacttgttctggagagcaggcagcagggaggggtcagcagggtgtcacaagccactccctaatcacaggggcctctctacttggtcttgccccctgccttctttggagagaaggttctctggagaggacgttcagccctaggtgcttcacctggagctatagacagtggcatgtccacaaactgcttgtcatcctggtagagcttggccatttgaacttggtttaggagctccccgtggcagtaaatctcactgcagagacagggataggagcaggtcaggtcaccaccaccaccccattaggacagaagagaaggctagagtctgtggtagactggtcaaggcatgttccctgggactggacaagggctgtgtgtgcgtgcgtgtgtgtgtgtgtgttaggagtttgtgggttggagtgacatacagggctgagggaacaagtagggtctttgggcagtaaagtacctgtccgactgcctgagcccacactggttgctaatttgagatggtgtagaatagctggtggacaaagggaggttagcactttaatcatactggtgtggccaattctctgtacaatggccctgtgtagactcgatcggaagggcttatggcagaaacctgggaggtgcactcagtggtgatggctgagattgggccagaacatttccaggcggtgtatggtataggccatttgagagacaattactagctggctcttgggtgtttcctgaaactgcctccatgacggcaggacacaaaataatcctgaaacctgaaatacccataatgtcttgggtgatgtcagaggaacactttgtaacgaaggcagtgcccagaagag

SEQ ID NO: 98161 - DNA, 54253 bp, Homo sapiens
aggaaggatttccttaaaaagaaccagtgaggcaacaaatgctgttattaaaaatccctaagcatattctatccacaaaattttcttcaaccactattctattaagtcaacttttactgtggaatcatatttttcaagctttctttgccgttattgagtccaagcatataaggatcatgatgtcattatttcctaaacatattcttacaatttgaatgtggaactacatatatctgtgcaattttagcagcctcatcaagatgctgaatttttaagaaatcttctcagttttggtgctggaaagtacatcagctccctttgaagcaattatataattttaaaaatttaatatgttctcctaaaacattgtaaagatattgatcccaatatgtaaacacaattacagaaattcgtgggaggtgaatatttacatttgagactgcaacaagtcataaaacaattctcacccatgcccctcccccactcgaagttttctctgtgaagttaaaaatggatggatgttttcactatgtagtctattaatacattgttaactaatttatgaaatacgaaataaaattaatttggtaataatacaactcaatgctttcatattctaaattctttgatatgttttttctttccaacagaaatcagtgaagaaaccaatgacatttccataaagcactggcttaccaacacaattgtacagtttaatgaaaatgttttcttccctttataataaccttagatagctatttaaatataatggtgatttttttaacccagcagagttcaactctcagataaaagtaaatcaggaggcaaaacctgtatgttaaaaaagaattttaaagaaccagtttcccacaaaaagttaatgtcttaacccaatgaatatttattgtcacattgacatagctaatttcttattcatacttttttttttgcagatgaaattcttatctttcctaatttgccagacaatacaatgttcctggggagattgacttgggtgctcaacttcatgttgggagaactggactgttcttaggtggactagtcatggcatctctggttcttctgtgtaaatggaaggtgtgtggagtctccaggactacagatgcattgtgttctgaactggccagggatgaaacatgcatctctctttagctgttcagcttgattattaagacactatggaaatgtttatatgatcactttcgttcccagagttcatgactgcctaaattgatgggtgtgccaagttgtaacttagttataactaagatgtaacaatgccaaattgtaacttagcatcctaaaagaggagcaaggcagtacaggggtacccccttaccattaaggattgctttattataatgattgataaaatggcatatatttattgctgaaactctagtatttagaatagtcccttgtatacagtagacattcttctttccttccttcctttcttccttccttccctccctccctccctccctccctccctcctttctttctttctttctctttctttctttctttctttctttctttctttctttctttctttctttctttctttctttctttctttctttttctttctctctttcttattagatggagtctcgctctgtcaccagggtggagtgcagtggcgccatctcagctcactgcaagctccgcctcccaggttcatgccattctcctgcctcagcctcccgagtaactgggactacaggctcccaccaccacacccagctaatttttttgtatttttagtagagacggagttttaccgtgttagccaggatggtctccatctcctgacctcgagagccaccctcctcggcctcccaaagtgctgggattacaggcgtaagccaccatgactggcctacagtagacattcttttatcaacactaattaacactacaacacaacttcacgaaaggacaaaacagtctctgtgtttttctcctatcttttcaccactagcatggcatccggcacaaagatgccactcaataaattcaaactgaatgaatgagtgaatgaatgaataagtttttgggtacttgctggacacaaacctatgtataaagtcattttcagaaggcctgctgtaattacgggcaggggctaggaaatggggtgggaatcctaaattaaaataatagatcaagtagaaaatgtctatggggaaacagaaaaagaatgaaaatacaagaccattttatagaagtcttgattacttagttaaatgctattttaagccttcaaaaaagcaaatttggaaatcttattttcatcattcatccattctctaacgcctggcaacacaattcaatacgtcatgtgttttcaacgcttattccagacactttcagaaataaattcaattagtctatcaatcaagtaatcaatgcttactaaacaccaaccctatacctaatcctagttaggttctgggatgaaagaggtaatttctttttcaaatcagtataatctagggactttaagaagtatatctcaattgcgacatggggaatttacctcaatctctcaaacttaaatttacacagaaatgtaaccagatgaatggttacaaaagtcaacaccattatcatatcaaatagctctgatttataagctttttcataaacactatttctgatttgatgttgactaaaatactgtgagaaattttatgatgtccattttcacaggtaaatgtagcatcagggaacttcagtaatttggcccaaagtaacgcatatagtaagaagccaagatggacctcaaatccatgtgttccccttctacagtcttatcacactttgctgctgtaagataaacatttgtcaatgaccaccacctcaatatagattattctaccaaacttaatgcttccgtctcattgtccaccatatcttagttttggaactgataatacatgtaaatgatgcacacaaaaattattccacactctcacagagaaactattgcttcctagagagcctcaaatttatagctgctcagtcttttggggcctcctttgaaatgtgaatcagagggagaatttgggttgttttggccttaactgctaccagtacacaaaagtcccgttactctatatcttctttgtgtcaaatcccttgcattactgctagctgcctccaagcttgccagaatcaagaacttggataaaatctagctggcggaaattcaatccaggcaagacaaaagtgatgctgataggcagaagtatttagagtaaatagggagaagtgctgtttcgctggcaatcgggacatcatacccaccaaacataaacagctttgtggtgttactggactctgttgcttctggacttctaacagctactgtggctggaaatgccatcttccatctccagctggcttgaaggctgcatactttcttccaaattaagattctgccacagtgatgtacacatttgtcatatccagctggactactataatgcgttctagctggttctcaatacacaaaacgacataaacattacagacaacagtgcaaagtaatttacttgttgggaaaactggccatcaaaattagatgcatgtttgggtctttggacaggccctgtgtctgtcaagtctacaaaagatcactaactttattcactaaagactaaattgcatcataggctatagcaaatcaatcaaatgcccagaagtttgtatgaatatacaaacaatggatgacccaaaagagagagagagaaaaaaaccatgtgaaaatcatagagtggtgtagacaaagcctttgacttttagtcatggctttatttgtctacatgtcttccaaaacaagacttttgacttacgagcctgaataagtcacattcaaacaggtcagcatttatacacatcacagtacatcttcacttatcaaaaaataattcatatcacattcaatgtaaagtcatcagtaaaattcgccctgtcaaaatgctaccttaagaaaaatgagtttcttcactaacatgaaaaactgaaactagcaacacattctttcaatgaattgtttctaaattttgattctcaaagaatgttgaaactttgattaaagaaaaagggtgtgtgtgtgtgtgtgtgtgtgtgtgtgtgtgtgattgcaatttacccatttgggctaagactaaatggcacaaagtgtaatgtagggcaaagattggaaaactttttctctaaaatgccagataataaatatttttggctttaagggcacacagtctccatccaattgcctttggagtagaaaagcagccacaagcaatatgtaaacaaacgagcatgactgtgttccaataaaactttatgaacactgaaaattaaaaattgaaaaatctgaagaccattcttagcctgtgggcctgaaaaaaacagtagcaggcttgatttagcccatgggccgtagtttactaacccctgctccatggaactacattaaataagaaaaacattcaacactatcacaagctaaattcttagctctgccactgtttttcctgggagaccttggacaaattatttaacctgcctcaggtttctcatctgtaaaatggagttaataacattaggagcctcagtgggttactctgaacatgaactgtagtaatacattttgaaaatgataccaactgcacatagtaagtgttcaataaaagttacctgttaatacacattacgattctagagttaactcctttttacttcagtgaaaacattagaaaagtagttcttttgtgtttaaatttttaaaattgtcttaaagtgcctagatgttgtcttctcaaaggaagaaactagatttgcccaaagaggtcaagcacatttggaaaggggcaaacgcacaaggaagcctgctttgcaaaatctgcctaaaaggctagctccatctgaacagacacctacccggtttctgtcttcaattgtcaacagttcctcctccatgcacttatccaagacgtctctaactagaagcttgtccaccagagtgggctgaaggaggttcagcagttggagatattcatcatgagcgttctcaaacgatggagagggcaagtccgtgagctcagggttcatgtagcgggcggccagagggctgccggttctccggagggcctccacgaattcccgagtccaaccaaggtgccagactcccttctccaaggtgctcagcagcagttcaactgcctgcatgttcccggaggtggcgactgtcctctgaatctgctccttcacctctgcaggcagaaaggtcaggtagtccagcacaggctccacctggatgtacattttcaccctggccctgaagcacgagatgagatagcggaaattctcgtctgtggaatacccattcgacatctttctttctcagagaagggagagggttctcccaagcagatggtgctgttgtctgcgggacaggtgaaatgtgcgtgccgctgtccgctgcccacttagagaagcagggtctaccgctctgtgcctgacaatgacgaggttgtccacagggctctcaggccggcgcgcggggctgcactcgcacctgggcaggtgggcaggcgggcaggtgggcagcggggcggcgcgcggggccgcggcaggcaggtgcggccggcaggcgcggcactttggactctgcggtgtgcgcctggggtcccggaccggggcgatcctgctgcacactcgggtaggagctttgagtccagctttctgtcaggcagttcttacagagtttgcctgactttggtttctgtttcgattctcttctcaggactttgtaaacgtaatctgcctggcggggagggagtttcctcagggagacgccaccttttggtcggggcgggtgaagagaggaggcctttggttaaggacaccgcgggaaacagaaaaggaaagcgaattctctctgacaccaagaccaacgctctagcaaagctcctccggcggatattttgttttcccagcaggttctgccttaacaataaggtcctttgtaggccaaaatgtgcagggcataaaagcatgtgatttgggactttccaaaggggaagtgaacagaaactgccacagacccggacgtgaacagggagttaccctcggctggtgaatgtaggcaggcctggctgagggtggtgagactgcgagggacaggtgagagatgaagctcagaagacatctttgcagagatgtggagaagmcaggaggaagtccttcctaaaataaacctgacctcctgtgggttcccaaacactaacttgtttccctgggaatttggaggtgggttcgaaaaagtgagtaacaataaacagttaactttactgcctcatatttagattgctggtatttatgcagctttgaccaggacctggtaacagatgtggatggacttgaaccaccaactcagcttagaaggaagccaagacttaaagtttcctagatcccagcttgtaagttccctatattctttaatatacaactttcctttaataaaacaaaacaaaaaaatcccccaacaacttatttttgatatagctgccattcttttcttggattcaatacagcaagttttggctggagcagctaggaacttaattagcaactaatgtaccaacttgtagtaaacatcaacatttgtctatgtcatgagagaaaaaaaacatattcacactgaaaaatggcagcttcattttggtacagaagccacataaatgtgagtccttaaggttactactcattctgaaggcattctgtagccacatgtgactgtgggtggtaggcacatacgcaccataactagaatctcatggtccagaattatataaaggatggagagatcatttaggttatcaaagagacatatttaggaaaaataatctgttagcaaagtacattcaataaagtctgtgtaggccaggaaaacctgatagtgctttgaacaggataatagaagtacagagtcttggtgagtgtttactaggggcatacaaaatatccaaatgagcactttatggtaacatgtcttattttattctctaattatcttatgtagcaaggctttttctacccctgaaggattgtaagctgcttgaagaagggatatatttacatagtaactagtacactactcacaactggtgggctcttgatgacatctctcctgggagttgtatttgagttgaccatagcagctggcataatgttaaatacactgaaagttgaagtaaatgaaaccttgggcttgcaggtaggcctgatttatactgttcttttctgtttcttcacagaaccctactcctttttcacttaattttgggagatgaccttgtacccagatagaggataatccaattagatgtttctacaaaagcactcaaattattaattttaagtattgggtctatgaaaatatcttttaaggctgttgcaaaaacatactcctatcccccagctgccagtgggttttattcaacatgttaaagcacaaactaacaaaccaaaaaacattctttttcctggcacttatccttctgtttcttggtttcaaacatgggggaatgagaaggggttgctgactgaatatggggaaccagttaatgttattttcttcataccacttaattgttgctctggaagagaaaggatcaaatgtttggtatttgacctgttctcaaataataaacatttaaaccaaagatatttaaatatttggcattcaaattatatcattcattgtatcatctagtcatttaaaatatgtttattaagtatctattacatgaccagcactgatctaggtgcagttaataaaattaacaaagctcctacttttatggagttcacattctaatgggagtgggaagatagatggtaagtaatgactaaaaaatatgcaatgtgcaggtgaggataaatgccctgaagaccatagtaaatctacataataatgtatattacagtttcacaggttgatttcccaaatagtcatcctcctctaaccctattagcatcacataatacccaacaataacaattcatattttctcacaagtaggagtctctctgctggatgaggtctgagtgatgaggattaggtgtgggtggaagggacttcttttttaggaatctcccatagtcttgatgggaccctttttggagaaaggaggttaaggaaacaaaagccaagacacaatctctcacaatgtatccttttttcatctatattttttgcatcatgatttagtttattttctgtttttcacttgagtaattaattgttttcctctgtcaagtttcttctactaggtttcattttaatccttttcaccagttcccaaatgtaagtttctttttcctttctcttttgaggcaggagatcctgctgaactatgtattttcccattgttatgcaacttttcatttgagtttttaagaagtagtaacaatatgagctgccactacaatttaacgaccatgcatagcaataatgtctttttcaaagaaaatgacaataattttagtttagtgagaaaccctggaattgttgttctgttcctttacttgtttgctcatttgtatcaataatgagcctgctttgtgtaatttaaagtgttagatgctcttaacctggcagtgtggggtatggttaagcacagagactctgagttcaggctgtctgagttcacatctcaatactatttcttaattgctgtgctttgaaaaatcacctcaaatacatcagttgtaaaatggaaagattctggtatcatgtcagaagtttgttctaaggatagactgtaacacactagcaccagcctggcatgtttatgtgcccaatatgtgactccagcccactacgcttatataaaaattaaagaagagatggtgcggtgctagtcttcaaagaatgcacaatttataaaggaaaaatttagttacatatatatatatatatatatatatatatatatatatatatatatatacacacatacatataaacactatataatagctagccatttaactgagactttaagcaagactttcagccatttaactgaaactgataggctgatttagcaggaaagtttattaaaaggatactgtcgtagctttttatttcaaaaatagtagtaagcctaaaatagaaaaaaaattatggctaagttcactaaatcttgataataatttcctaatcactttcaccaattcaattaaaattctggtttttaagttttcacatataaaaacttttctacatagcagttttggcaaaaaatgaaagtcacgtatcaatagataagttttggaacattcatttttcaagtactccttccatagcttaaagtcttttcaaaaacagttacctgcaaatgtttttgtgaaaaacagtacttttacctcaaaggctagattgtaattgttttattttactttatttatttatttatttatttatttatttattattatactttaagttttagggtacatgtgcacaatgtgcaggttggttacatatgtatacatgtgtcatgctggtgcgctgcacccactaactcgtcatctagcattaggtatatctaccaatgctatccctcccccctccccccaccccacaacagtccccagagtgtgatgttctccttcctgtgtccatgtgttcgcattgttcaattcccacctatgagtgagaatatgcggtgtttggttttttgttcttgcgatagtttactgagaatgatgatttccaatttcatccatgtccctacaaaggacatgaactcatcattttttatggctgcatagtattccatggtgtatgtgtgccacattttcttaatccagtctatcactgttggacatttgggttggttccaagtctttgctattgtgaataatgccacaataaacatacatgtgcatgtgtctttatagcagcaagatttatagtcctttgagtatatacccagtaatgggatggctgggtcaaatggtatttctagttctagatccctgaggaatcaccacactgacttccacaatggttgaactagtttacagtcccaccaacagtgcaaaagtgttcctatttctccacatcctctccatcacctgttgtttcctgactttttaatgattgccattctaactggtgtgagatggtatctcattgtggttttgatttgcatttctctgatggccagtgatggtgagcattttttcatgtgttttttggctgcataaatgtcttcttttgacaagtgtctgttcatgtccttcacccactttttgatggggttgtttgtttttttcttgtaaatttgtttgagttcattgtagattctggatattagccctttgtcggatgagtaggttgcgaaaattttctcccattttgtaggttgcctgttcactctaatggtagtttcttttgctgtgcagaagctctttagtttaattagataccgtttgtcaattttggcttttgttgccattgcttttggtgttttagacatgaagtccttgcccatgcgtatgtcctgaatggtaatgcctaggttttcttctagggtttttatggttttaggtctaacgtttaagtctttaatccatcttgaattgatttttgtataaggtgtaaggaaggaacccagtttcagctttctacatatggctagccagttttcccagcaccatttattaaatagggaatactttccccattgcttgtttttctcaggtttgtcaaagatcagatagttgtagatatgtggcattatttctgagggctctgttctgttccattgatctatatctctgttttggtaccagtaccatgctgttttggttactgtagccttgtagtattgtttgaagtcaggtagggtgatgcctccagctttgttcttttggcttaggattgacttggcgatgcgggctcttttttggttccatatgaactttaaagtagttttttccaattctgtgaagaaagtcattggtagcttgatggggatggcattgaatctgtaaattaccttgggcagtatgggggtgtggctcgcttcttcagtgccccactgctcaaacctctaggggagcctgcagatgggcaggctgtggggctccgacccacggcagtgtctaggggtggatgtttacagcttctgaagcctcagtgggcgtgtgttacagggtgatcttttagttttgctgtctataggtggcttgtgttaacaagctcagttagaccctctacattgtctcaaggacagagggctttctgtatcccaggttcttgacttggtatactggaagaatcggatcacacctgggcttggagaatgagtgcaagctttatattgagtggaggtagctcaggggaagtcagaaggggatggagtggaaaggttttcccctggaatcaggccactcagcggcctgggctcccctcaactgccccagccaaactctgcgacgttctacttctgccagatggtggcctgccagtgtgctggtgccttttggtgtgttcctctcaaccttcagcctcctatgtgtttttctactgatgtgctccccttgagtccagctgcctctgtgtctgcctgctggggtcttggaggtttttataggtacaggatgggggcatggcaggctacggtggtcttgggaaatgcaacatttggcaggaaatgcctgtcctcacctaggtctgtgagggtaaagccctagctagggatcacaccctcctctacccagcacttccctttcccctttctgtatcatttacagggaccacgctcttcccttctcagcacttccatatcatttatcccctctgaagaggtacaactaactgctgttagaatatggacgatgaccggttttaactgcttcctgctgacagggggcattgttttggtaaaaatggcacagactcctcccagaggtttatctaagggttcctggcaaaggagagccatcgtccgaggctccgattgcctgaccatttggagtttgatggcttctaggcatgggagaaaaaaaaaacaagttctataaggttaagtatgcatgggttaaatgtgtattacacaaagaaagaatttggtgccaaagactacagagataagaaatgaaatatactaacaacaacaacattgtaccctgacctgtttcagcctggtgaaagaaattaaacctcttatgggagcagttaaactttagaagggaggtaactgttgttgccatatccttagcaattaacaggtgcaccctgggaattctggggtttgtgagcttgcctggtggccactaaagcttctgtctctttcctgtgttttctctctccttcctgggcttccctgtctctattataaaagaccaaggtgtccattttcaggaggtcctctaacatactgtctgctcctggggcccatttctgcaacttcctcctgatatcaggagctgactgagtaataaatttatccattaggattagttgccccttgactgaatcaggagatagagaggtgtgttttatcaaggcctctccaggaaggcagtgggattttcatcaaattcctgtcctacacaagccctccattatgcacacctgaaagtgtttcctcttccagtttcccatgtcatcactgggatcccatttagggtcatccattggtactgcttctcttccggttggataatgtttgcccccttccctgacactatatgtgatacaaaactcatccccaaatctgtctgcacttgctgaacggcgtgtttctcagtgtctgtcagggtctgattcaaaagtaatataacatctctccaggagagttcaaatatttaggtgaaattctggaaagcctctatatatctatcagggtcatctgaaaacttgccaaggtcccccttcatttgcgttaagtcctgtagggagacggggacctggaccttactgggcccaaattcacttggcatctattggagaggcaagagtaagacgggtttgtttagggtgaggatttctaggagggggcaagtgagaggctgaaactggatggggaggtcggggtggacccagaggagcagggcttgagggagttggctcctctgctgggtgtgcctctgagacttgtgtctttagtttgctgggcttgccccttgcagccttccctgagacaggaaacagaagggttggatcaatcctacattgtcagcaaaggtctggattgccttacaaggtatagaaagcttgcacatatgggacctcagaccatctgtcctcaagtctacagaaaagttccaattgccagatggtattgaaatgaatggtcccttccagaggccaagccagtccttcctgtaaatcataatttggccaaacttttgtgcagagggctacaaggcatttttcctccagattctgagggtcaaagtagtcccaatggttcagcatacactccagaggagtataagctgagggtggtgaagagaactagttgcccattctgaaagacagggaatagaggcatccctcatttcccttctttcttttttcttttctttttttttgagatggaatcttgttctgtcacccaggctggagtgcaatggcacgatcttggttcactgtagtctccgcctcctgggttccagcaattttcctgcctccacctcccaagtagctgggactacaggcaagccccaccatgcccaactaattttttgtatttttagtagacatgaggtttcaccatgttggccaggctggtctcaaactcctgacctcaggtgatctgcctgccttggcctcccaaagtgctgggattacaggcatgagccaccacacctggccttcctttccttctttccacaaaaaactcagggtatgatggagagagaaagcaagcgtcctccctycactctccaccccttatccctgagccccagagaccttggcaggtgccagccataggtaaaaatgaggtatgtacccatgaggtagggaaaacctggagaatgggaattaactgccctcacctatgcctccctttctccttgctattggcaaactttgagttccctgggcctgtttattccaggaaccatggcctccttctgtggggtggcaggaattggttctgcccaattggtcggcaggaattggttctgcccatttacactgtgcctgtcacctggctttggattccttaggcccagtttttctttctggggcctcagtctgaagcttaaatcgagtttgggaccaaaaaggtatgttagtggctatttgtatctgtttagagtatctcaaacgtgccttgctgaatttgcagttatcagccagcaggggtcgctcctctgttaacttccctatcagaaacattgtggggggcagggggagccctctcacttggtaaaaaacagaaaaaacagtaaaaggggcaaaaaaggggggatgctaggagaagaacctctcacttagtgcaagtgggcccttttaatccttataattatctttcccatccttcccctagttcagaccaggttgaattccctggccaggggaggttctgttgacatattaagcaagaagcaccctgtagggtcctggatattgcctgtttgctcctgctccccctattggcttttggggtcagcctttggctgctgcaggcacgcctaggcagctgagctgagaggggaaagggtaaggagagattccctgagccatgcatgcctgtggctgtcgaggtggaggcatacctggcacctccaggaacagttggtctgatttgcacctttggtggctgggccaaatactcattttacttagtaacattgacgcagcctgtagcaaaacacttaacattataaagagattagagccatttcaaactgcgcgagagaaaaagtgacaaaaagacaacagaggcttgctgggcatggtggctccacctgtaattccaatgagaggggaccgcgtgctggcagtcctcacagccctcgctggctcttggcgcctcgtctgcctgggctcccactttggcggcacttgaggagccctttagcccgtcgctgcactgtgggagcccctttctgggctggccaaggccggagctgtctccctcagcttgcaaggaggtgtggagggagtccggacacaccagtactttggtaggccgaggtgagtggatcacctgaagtcaggagttcgagatcagcctggccaacatggtgaaaccctgtttctaccaaaaaaaaaaaaaaaaaaaaaaaattagccgagaatggtggcatgtgcctgtaatcacagctactcgggaggctgaggcaggagaattgcttgaacctggtaggtggaggttgtagtgagcaagattgtgccactgcactccagcctgggtgacagagcaagatcctgtctcaaaaaagaaaagaaaacagagcctcttactcataggaaagagagagagatggcagggttttggaagaaaggcaaacctgacagcattcactcacactcaccttctaagatcccgggtgagcccccagttgagacaggaaaagttgccccactgctcaaacctctaggggagcatacacacgggcaggctgtggggctccgacctcatggcggtgtctagggctgaatatttacagctcctgaagcctcggtgggagtgtattacagggtactcttttagttttgcttttagttttgctatctatagatggcttgtgttaaccagctcaattaaaccctctaccttgttgcaaggacagagggctttctgtatcttgcgttcttgccttggtgtactggaaaaatcggaatcaatcacatctgggcttggagaatgagtgcaaggttttattgagtggaggtggcttggaggaagtcagaagggaattgaatgggaaggtttacccctggagttgggcctctcagtggcctgggctctccactgactatcccagccaaactccgcatcattctgcttctgctggtcagtggcctggcagcattctggtgcctgtcagtgcattcctctccacatccagccgcctgtgtattcttctgctgatgttctcctcttgatgtccagctccttctatgtctgcctgctacggtctcgggggtttttttataggcacaggatgggggcgtggcaggccagtgtggtcttgggaaatgcaacatttgggcaggaaatgcctgtcctcacctaggtccatggggatggagccctagctagggatcatgccctcctctacttaacactttcctatcatttaaagggaccagattcttcccttcccagcacttctatatctatattataattgaaaaagtcttaaagtaagagagtaggaaggctgtagaattaattattgaaatattgagataaattgaatcaaacttttgagctgctaaatcacgaagggttaaactaagattttaaaatataagcattatcaactacaaatttttttattatcagtgcactgagttatataaattacattttaaaatcttaattagctcatctcattcctttttagtttttgttgtattttatgataaattattatagttgtacatgtgaagattttctaaatgaatacccatatatttactggggtccatcttcaaatatttttaatgatagggatcaaaattttttatttttattttattataataataataattattgttatttttaacttttaagttcaggggtacatgtgcaggtttattacataggtaaacttgtgtcatgggggtttgttgtacagattatttcatcacccagatattaagcctagtacccattcgttatttttcatgatcttttccctcctcgcacccttcactatccagtaggccacagcgtgtgtcgttcccccatgtgttctcatcatttagctccgacttataagtgagaacatgcagtatttggttttttgttcctgtgttagtttgctaaaaataatggcctctagctccatccacgtccgtgcacaggatatgatctcattcttttttatggctgcatggttttcaatggtatatatgtactatattttctttatccagtctgtcactgatgggcatttaggttgattccatatctttgctattgtgaatagtgctgcaatgaatgcatgcacacaggtgtctttacaatagaacaacttttattcctttgggtatatacccagtaatgggattgctgggtcaaatggtatttctgtctttaggtcttggaggaatcaccacactgtcttccacaatagctgaactaatttacactcccaccaacagtatgtaagcattcctttttctccgtaaccttgccagcatgcgttactttttgactttttagtaatagccaataattttgatttttaatagtaaggcaacgctgcagtaggtcaaaccattttgtatgaatattaaaataaaagaatgacccaaaggatgctacaaacttgctttccagttgttttatgtacctgaatacacacattggccttgacgaatatctccaataggtagtgctgatgtggccaattcagtccctttttgtgagccaagtgaccacttaggaagttgttctgaacctatgtccagattagacttacatggaaacctgtgtaaaattatccattgcctcacagtctccatggttagaactttagtgtcagttatttttcttttcaaacccacttgtaatttcattcttccatcagaggtgagaactagggattagggcttctgttagcctagggccaactgaggataccatcaattctcatttttggtggcagttatattctataaagtcactataagcactgaattagtgaatactgagccattgcttctagagaaaatgcagggttaggttcctatgagccccagtcacatttttgtcaactgatcaatacataactttgttttgaatgtatttctgtttaaagacattttatttagtatatattgttgattcatcaacattgaattcacaaccaattgcactatgactcatacctgaacaaagcttacctaacatacttattttcttttgtgctcaggagtattagaccgcacttcagcactgtgctgggaggccattttaaacagtgaaatcactaacaaagaacacaaaaatgtgaaaaatgtggcactaaatatactacaaaaaggatacttatttatagtataacagctgcaacaagaaggcagagcactgccttgtttgacctcagttaggaatctgtgcatcaggtgattcaaatgtttcactgttctgcactttgcaaatgactgtgaaagggccacaagtattgattatttaggggttacaaataagtatcagcaagtaactgaattcacacatatgaaacccatgaatagtgagtatcaactatcctatggtttgaattattgtgtccccttcaatatttatgctgagatatcatccccaatgcaacagtgttaagaggtggggcctttaggaggaggttagaccatgagggctgtggcctagtgggcaggattagcacccttttaaaagtgagtgagttgagcacattttgcccttctgacccactatgtcaagaaatagcattcatggtgccatcttggaagcagaggctggggacctcaccagatgctgaacctatctgtacccttgatcttggacttcccatccttcagaactgtgaggaaataaatttctgttctttatattacccagtctcaggtattttgttgtagcagaactaacagactgagacaaactgtatatatatagcttgctggcctgagcaggagaatttggaaactggattatgttttttagatatcttcctgaatcattcataattcattttggctaaagctgtgatataagtggacacatattttcagcaatttatgaaaggacaygtagtctggaasattcatctgctaaattcattggcctgggcattgtcacataattgcttagaacaaataaaacctattaggcattatataaaatacacaacttctgctgggtgtggtggctcacgcctgtaatcccagcactttggcaggccgaggcaggcagatcatgaggtcaggagatygagaccatcctggctaacatggtgaaaccctgtctctactaaaaatacaaaaaattagccgagcatggtggcgggcacctgtagtcccagctactcgggaggctgaggcagaaaaatggcatgaacccaggaggcggagcttgcagtgagccaagatcgcatcactgcactccagcctgggcgacagagcaagactccatctcaaaaaaaaaaaaaaaatatatatatatawaatatataatattatttatatattatatgatatataaattatataatatatataaaaatatataacttcatggcagtagccccctggacactttggagcataaatccttagctaatatttggaagaatcaaattacatatgaattcaactgaaaagtccacaatgtctttaaactggagacaaagtaacaagtgcaggaaatctgaatcagaattacttcgaaggatttttgcataactcatgcctactaacaaggcccatagcagggcttcaacttgtggttcaggaaagagaatgagggactgaagaaggaagtcctagatcattgaaaaaactgtcttgcttatagtaactggagtttcttatacttttaccaaaaaggaagagggaagttatggagaacataaggaaattcaacttccacacaaaaataatacacagtcacatttattgcaagtttatcatggcctaggtgactaatatttaaactgagaagatttaatgtgacttagtgatacatccctaagatgtgatggagagaggctcaatgggtggatcactgggccccatctgtactccaaaaagagtacactttttttaaaaagttcatattttgtgattatgcatttttggaaaggcgtttgaaagtctctgctgggggatcaaaacatgacgtacaaagaactctcacaaaaatagaaatatggtatcagggctttcttagactgcctcatatttatatacacccaaaaagttgcaagattaattcagagccagcagctgcctttaccaacagtttttcatagaatcaaatgctaaaaaagttgagcaagttctggaacctgtataccattttgttgaaggtgggaaagggacttcaattatattatgctagtactgttataaatgaaagaatggatgagtaaagccagtaacgaagagatgagacacctatttattaagatcacaaattataccatattttataatgtaaatgtatactgcatattaaaatacattttctgattattccttaaataattaactttttttccctctgaattcccaataaataggctgtgtgtttcatttatctatctgagtatttgtgttgagggtatatagatttagcagctttggggagcttgcagagtccctcttcatccttagaactcattcagaattttagaacttatttagcatagatgatttcatttcattcatcctttctccctgaaaggcagtaagagtctcaagggacatattcatactatgtgagagatttttaaattatcaagtgattcaaattattttgatactacaaataatctatataaaaatactttaagatgaaggatttatgatttttaatagagaaaaataaataaggcagcatgcatggactgtgagtgatccctgatagacatctcagaaatgtttcattcatctcaggaacagactgcttatgtgctcacaaatgtgctgcatgctgttaattaccaattaagcataatgttaacatttaataattgtggaacacccacagtgaaccctagagatagcctgaaacttatctcgaaaaaggaattctggaggttgaccaaagttctcagatgaggccaattactgcctaaggctcatcttattccctggaaccttgatgatatggtgtctcctttgaagaggtggcagggacaaagcagcccaggccaaatcctagacatcgtcttatccatgcctttctcagaaaggtgtaagtgggaaagccttcccttgcttccttcctgagacttctccacactgcgactcacagatgatgtttcctctgccgccaccttgtggggctttaactgtgagatcttaactgcattggaacaaattaagctgattcagttaaacaaaattgtaactatgtacaattatagatttttttttttgctggttaacagaaaagggagataatctatatttcccactagggaggtaaaatcatggctataatttcaacttaaaaaacatgttataaaggcagagaagataaccttctacttcattacctctactgctaatgttctctccaatcttcagaaaaaaatcatttaaaattaagctgctcagggcccaagatacttctgctacagaatcagggaaaagggtataaatatctataggtaagggacaaggtaacatgtattgaggatatttatagggatcgttttcatgactgtgcctatgttacacctccctgcacctttcttttgtgattctatggcatcctgagctaacctctagccacagcactcatctcactttgttacaattgcattttgacttatctgccattcctagtaagctataagcttcacaaggacaggcaacatgtcttcattatttttgaatcctcaatagtagtgtagagcttggcacacaggaggtactcgatgcatatttagtgaataaatgaacatcaaatgcctaccatgtgctaggaggtgtgaggaaaacaaagatctagacctatgcttttcctgagctttctatatgttaccacatttaatcttcacaactccatgagtttatgagtgggcctattgttttctctcgctcagtattcattccttctgtttttggtaaaactgctcctagattttcttctggagaaaccacccatttcctcatcctcaaactatctttgggtaggactgacccctttcccagctattgagctggagccttattagtttaacctactcaacatatcccactccctagctatagtgattaagtgtgaacacggaacccaattaaaaccagagaaatcctagcactttgggaggccaaggtgggtggatcacttgaggtcaggagttcaaggccaccctggccaacacagtgaaacctcgtctctactaaaaatacaaaaaaatttagccagacatggtggcaggcacctgtaatcccagctactggggaggctgaggcaggagaatctcttgaacccaggaggtgaaggttgcagtgagctgagatcacaccgctgcactccagcctggatgacagagtgagactctgtctcaaaaaaaaaaaaaaaaaaaggaccagagaaataaaagtggagattccctgtagctatttgtaacagtgagttaaggttgggttaagggttgggagggggcatccctctatgtcctaagaatggaggcagaagggacagctggagaaatgtgggtccttggagaaactgtctatatgccagatgaaacttaatctaaagctagcccaggactttgaattacatgagccaataaattctcttgtttagatatattgagttggattttctgtcataatattaagaggacttattgatcttctaatagggagtatccccattttgcaaaggagaaactgagatttaaagaagttgcattatatattccaatgtcatactgtcaacaaatgaacttggagtcaattgtcaaccccttcgttatttattgcacagtttcttccagagttagcatggatgataatgactagaaccaattaacctagtctcttgaaatcagaatgtgtgtgtgaattaatgaaatcagtattaacaaagttaaaaaaataaaatgttaataaagagaaattgtcccaactctgacattggtattaacttattatctgcataatgtgcttagctgataggtagtttcctacatggatgtttcctacatattaatgagggaaaatatcaaaatttaagaactgaatatcagctgattttttttygttattgtaatactacgatagacttataggctgaagctacatgttttgcttagttaacagttgaaagttgagttcaataataatttagtttttcaaatttatacatgaaaagctatattttaggcaatgctttccaagggaaattagttttgtttccttctaaacatgtatttattgatgtgtagatttatttaaaataatgtacagaaagatatttcacataggaaatcaaatacataattatttgatctttgttatctatatgctcaaatggtttctatgtcctcactcagacattttttgtatcttcttttcattttatttttttgatatcagtaacaaccattttcttagacactttatgagcaaactctagcctaaagattctgttgctaggtaacatcctcctttctcctcccatctcctctccctttcttttctgctggttgccatagtgcctctcttaatgggtggctcaagtccttactataatcctggaagttgaataaaaacctaagtatatctctctctctytttctgtcttctatatagcctagttgctcagtgaaatatttggatttaattaagtatcaattaatcattcagtataattactctataaatatgtactttacaatttatctggatttttggtttaccttacagaacaatttcatgggttgaaactctaattgaagagttgtttaatttgggcagggttgggaatttaagttctggaatttcatttggatttaattaaatacagattaatcattcaatataattactctataaatatctattttatgcaatttatctggatttttggtttaccttacagaacaatttcatgggttgaaacgctaactgagatttgtttaatttgagcagggttgggaatttaagttctggaatttctttttcttcagagtgcttgacattttccacctgcccataaagatctacttttcactcttctctacattgctctgtgccagggagcctaacctctgtggactgcgtcaatgagctctcttttcctctagcttctgatcagattcagccaatggaagcaatagcaggaaagcagaggtagggagaagagtgaggttttggtatttattccctaggctaatcttaatgcaggtcatggtgcatccgtgtgctaaaagtcatgtgtcaggggaccctcttcatacaataattctatccatgttttgataactgctttcttgcctcgcaccttctgcctaagggtggtaatgggtcctcaacactgcttgcactgggacgctgtatcaggcctgattggtttatcttacctatgtcaacacttttgtaaatagtgactttattacaatccctcaattactgtgtctgaatgtgccatctgcttttttctggtggaagtggcagcagcagcaactgagctttatggctaaaagacagaaaacaaggaaagcgtttaaggtaaggtgagctgagaagatcttgggtggtgcattaattgggctcattatacccacccataactgatcatgggtcgtcatctacattagtacctatcacaattcttacccctctttgtaccaggagagtactaagtttttttctctttcttttacttcagttcctaattttggataactcaagcaatgaagtgttttatagcttgattcttaggttttaagtaacattaaaggctctaagaatgggactttattctctcacactcattcaaaactacacaagcactggtgattgtgtagtgaaaggtgacagcacaacagtgaacattatgatcggggtctcctgttttcagctttcagattttgtgtgctatttcctgaacatgaaaaataatcagttcatgttttattttaaaaatattttgcaactgctttgatctgtgtctacatccacaatgcaagttattactacgtttcctctgaagatgtaattggtgctacttatttcacaagattgttgtgaaagtcaaatgtgataatgtgcaaaatagctgtgaaaaatatcaagtgytatataaaagaataaattgtaatttttaaatttttattaccaggttttatttccaccaataattgtacataaatatgaaggggggcactcttattttacacatacacaaaacacctgaggattaatgtggaaatgagatgatctcagcttttagttggccaakaatatatttaagaattgggccacttttatgtttttgatgaaacgatttttaattttttgtaacaggactactctaacttaactgacactacacagaagcgagttactaaccaatgggataagcatcaacataaaagaatttaactgacatatttaatttatatatttctagagagtcagctttgtgggtgtatcaaacccatgttattacagaagcgggttactaaccagtgggataaacaccaacataacagaatttaactgacatatttaatttatatatttctagaaaggcagctttgtgggtatatcatcccatgttatctaggtagaatctaaatgatattcataagcacgcaacttggatttaaaatttaaggtaggtatttttctgatcttacctgaaaagcagatgactttattgaggattttaatcatactgttgctgttcttattcagcattagttgtggacacatactgtgatcaacattatctacatatatataatttctcaagaagytttcattgagtccaaattgcttaatagacttaataatcaaagtgaggatgtatatatgcagaaagtataccaatcatcacctttctgaagagccttgttaacaattttatgctaaaatgcactattattaaattgctttagagtttgtactcctgccaaaagagtactagtattttcagaattaaaaacagaaaactgtgttattgagagcttagctgaagaaaggtcagtttgccaagtggctgcttgaggtaataaatggtaaataatatttatttttgtcttatttggcatgcttattatttttcttctgtcctcactggtgggcagtaacccttagaaagatactgaaaggaacaacttcgggcttaaaataaaattatgactggatggcttcacttgatagtgtcatatttttatgtcttatgcaaataacacatatatatcttcattattccatattaaaaaaatgaataatttctggaaaagtatgataattattgcatgtagatcaattaaggaaatctatgttaaggaatattggaaatccaattaaggaatacattttagcataaaatagataaatactagggtagatcaatgtgacagaacaacagtgaacattatgatcaagtgtctcttttttcaactttcagattttgtgtgctatgaatgaaatgcttccctctccaaatttgcatgctgcaaccccaaccaccaatgggatgatatttggagatagatctttaggagacaattcagttaggtgaggtcatgagagtggggtcctcatgatgggaattgtgcccttataaaaagagaccccagaaagtttgccccctctctggctatcctcatgcaccaagcaaaggtcatgtgaggacacagggagaaggcagccatctgtaaccaaggagagaggcctcaccaggcactgaccttgtgggcagcttgatcttggacttctagtcttcagaactgtatgaaataaattccttttgtttaagccacacagcctatggtattttgttatggcagcctgagctaacagacactgtgtacgtactttcttaagtgttatatggatttagaagtcgtcagaattattttccatatgcaattggctatacctttaatcctctaagtcataaaactatttatattattaattaatttttataatcaatgatgcccaaagaggccttaatttcttagtcccctttcactttcattatcagcatcagcaatttgttagggccattttggaggaatcctccctctctaaaaataaattctttgccacttgtcatcagtgtatcaattggagaaaggtctgttaagatgcaaatgctgagtggttggtaggcaccctcaccagaagctgttcactctaggcaacctcttagataaacagcctgacatagtcacttagtatcacaggcgtctcaaatttaacatctccaatattaattcttgatttggcactatcccaaactgctccttccccagtcttcmccatgtaatttaagggcaaatccaaaacaccagtaaaccctgctggctataccttaaaaacagaataatcatctcactacttctcaccatctcaactgctataccctagtaggtcaccatcatctctagattaccaacagattgctaacagatcttgtttctacactaacctccttctgtctgttgtcaacagctgaaagagtgagccttcctaaatcgtatcatgtcccacttagatttcaaactcttcggtggctccgtatcacaaccagagtataaaagcaagtacttaaaatggtctgtgaagccctgcatgatctgctccaatgtccccgcttctgcaaccacttccactactctccctcttgctcaatctattccaggctcactggcctccttgttattcttcaaataggtcaggcagggttttgctttaggaccttaactctagttcttcatggaaatgtcttcctacagatacctccagaatgtctaactcattcatgacctctaagtttttgctcaaatcttgccttttcaataaagctacccaagtactccatttagagctacaacctactctgtcatctccctaccccttaaccttgacttaggtttccttatttttcaatagcatttatcatcttctcacatggtttataatttacttactcatcatttttacttactattgtctgttctccctgctagaatgtaagctccaaaaaagcaaggacattcctcccctcctattgatgtatgttttccacatctaaaatagtgttacattatacatgctcaataaataattattgagtaaatgaattgttctatctaaatgaaatttcttagtgatataaaataaactccattaatgttggtttccattagctggtatgtcttatttattttatatatatatatatatatatatatatatatatatgatttatatgaggcaagtaggctctgggtttgtgattgaaatttgctgaggagctgtgactcttttctctccctcattcatatagtgggaaagagaaaatgaggtggcaacagataggaaaaagaactgcagttaatttattgtttacattttactggtaaatgtgctggttaattgaatatctaaacttatgataagaccaatgccaccaagattcagaagaaattccatagttagacataatcctgtaagctttatagtcaccagaaaggatgtaccctgtgtaagagaagtaattaaattggctaatcttggtcaaaacaatgtgtttccttggctatttctctagttatattttctactgccatttaaaaacttttaaagccttttttcttttatggtgtaaacaattttattatattctgaaatacagcactatggttggggatggagagaaaaggggacatacaatgtttaagaaaccacattctgcagccatactctcagatttgctagtcactatgcaactgcatttgtgggtagtgaaatacaattatccaccttacttttcacatttgtaaagtgggaataataacatatacctgatggagttgttttgagaaataacacttcacaacacacaatgcctagtacgtcgtattcactctataactatttttataaagtaaagaaggattttattaaaagaaaaatatttaaaaagcaaattttttaaatagacatgacattttcataaaatgctattgttcatacagtattaacttgactcatggaggcaaattaacattactgttatttaaaaaaaactctatggccttatttgaatttttatactagaatatttaaaatttgaaacactagttttagagagagagatgctgtgttgttcaaagtcctcctctgcatcttcatggtaggaactttctttggtagccctttctctaagttaagagatatattggcaggaactatgaaggatctgatattttaccctagttataagcaaacaagtagagtgccacagtttcatggaagttggcagaatgtgtgagattcctgagtctgagacaaataactttattactcaaagcacaacaggcaccatgagcttcatacttccatagattcccctcgttctgaagtcccacaaggcgaagaggagctgccagatgggtgttgtacatgcactgtgtttgttatgcaactggaagaactccaagcttaggaaagtcctaagaaggctgctagcaaacgtacccaaactttgccctggcaggaaatactatctttgcaattaaatgtgcagaaaggcaagaaacccatggggccttaactcccaactgcacaaatgcagctgcatcaataaggctattttgatgaaaacaagatgcacaaaaattttgaccacagaatcagactaacattgtaaatgtaaacactcaatccttcctaagcakttctttgaatatgtagttaatccgttggaataaaattttgcaatggtttgttctttctagcgctttatcatttgataccttcataagccatgcatttttcccttttgccacgtaggttttacccttcccctctatttatttatgccaataatttaaccttagtggcttaagtatttcttacagcattgaaggaacttacagacactttcccaagagtagctaggacatcggcaatcttcctttctctctgctgtttcctctgagaattgtttcacaaggtccaacatcctcttctgtagcatagctgaacaacagatactcagctctgcaaggctgatttcctttgtgaatagttaacatttttttgatagccttatttttaagaaacatgttagcccttctcttgttcttcagagataactcaaaataatatcatttggttttttcatttgttcataagccaaagctacagctgccttgtccttttaaagtcagagctacaaaattcatttgagttccagagataaatcagacttgtccattgctattacttaataagccaaagtaattgaacatttaacaagagtttgcccaaaggctgagtcagattatatacaggacaccgtctatattatcagtgtataaacagcaaataagtttttagtgtatgttcacgtcctgtgcaatatttgggacatacttacactaaaaaagtttatttggaaatcaactttaactagatatcctgtttatttgccaacatgccacaattcaggtcaccatttatctaccaaacagaatcaataacctgttcgtccaatgtggcctcaagtgggttttggcgcagaagcactcctcctggaccacaggtgtggtcctggttgcaaagttttgatgtgacatcaacactacacaaaagtaaatgtaactgcaaaattttgaaattcacagatgggtctttgaagtccagctcaaaagcgtggagggctggttaaaataagtcacagacttgccggtttggggtttctagaaagaaaagtaacttgaggagttgaaggcttgtagaagacctttccacagagagtgggaattccgttgcagcagccaaggcttcttcgggatttagaaggagagcgcgcgagaacctgagggagccagtaagagtcgagcagggactggagggctcccgatggggtgtagccaatcagggcagagatgggtggggctaggctgcgggaaggggcggactgcagctgagttggctccaaagtgtgggactcagccaatcggaaccgtgcagggcggggctggcctgcggaagggggcgggttcggaggagtgaactgtgcggttagtgcgcctttcagcctcacctgcagctgcgcctccytgcacctgcgcctgtgctttttctcccagcactgcggacgcgactcgagggtgacgctcgctccgctcgtcccgctcgtcatggcctacccgggatacggaggaggggtgagtcccagccgcttggtcgtgtccctcttcctcgcggggtgtggcgcccccgggggcggtgccaacgtgcgggtccgcccttggctcctgctccctgcgtccgcgcctggtactcggcggcgcsggattccggggctgttgggggccagggcctgggcgagcattgatcctgggctgacttggagccgcaggttttctggtcgttgaggaccctcgaggagcgtcctggtggagccgagggagtaatgtgtgtttggaaatttatttcctggaatggaggaacaagccaccctcttcttgttccagtaatcgtttgtggtacttccctcccccgccccccactcagtgttgctagagatcctctttttgaatttcctgaccacttcttgttctttaagttccttatgaataaattaaggtgtacggtaaataactcctaatctttactgttatacgaagggcaatctgttctagactcccccgctcgcccccaggcggggggaagttactctttgttataacttttatcctgcatcacctttgggagttgcaagttataatcgtagagtcctggtggctagccccttcttttcagaaaggagcccaaacctttagtatcgatgtcagtgatctacacgctgtgttaacagagttaacagtagtttgatccattgcggtgtgggtagaatataatatattttctatttgttttttacctaaaaagagaaattgtgttttactgattttaatataggacttgactttgggctatggttgtggtcttcaaaagagttactcctaccccttggagttcatggtggtggtggtggtggtggtggtggtggtggtggtggtggtggtggttgkggttgtggttgtggttgtggttgttgttgttgttttaggatatgaatttccaggtcctcaacttccacacatacttgttcctaaaattgatttgctttccttaagacttgcctcaatcccctctggcaccgtccactttgtaatgcctatgcctcctcagtccttaaatttaggaaggaagtttaaggtacctaaggaaagtaaagccccttcgaagattaatcaagatagcataaacctgtgggtctttaaaaacgtccctagcgtatacgtattttcatttggttgaagctatctgttagaagtttgtatatttactcctcttggtatgctctgaattcatatatgtatggtagagtgaggtggcaagagtaatacattttcattcaaataatttggtgcttccttacccacttttgtcagagtgcttgaatttgatggagagttccacgacacaataaagagaacgtctgtatgtgttttgaatatttaaatccccttttccatgaatttaaaataaacaactcttttcagctgttgtcatgctcattattaatcgccggaaagagaagtaccctcaatagctgaagcaatatatagattagaggcactgattttaaaaaatgtaattgaaatattttaagatacattggataaaattttgggataaaacttacatgatttctttagtaggagaatattaataagatagttgagacgtttataaatcctgttaaaggaaacccatgccttattaatgtttcttatattcttttaacaaaatataaaatgtcagctgctagacctaattgttttgatagtatacttttatctaattaagtgcatgatttatctctgtaggagatgcatttccaatagatttttactttcttcttttaagaattgtttataaaaattgtattattttcttttttttactaattgtatacgaataaaaattataactcaatgtaaaggacttttttctttgtttctcactttggtcacaggaaatgaaacaatctaaaacttcgttacatgtttttgtttgtacatgttgtattatacaagcttcagtgttttcaataataaaaaaacattttaagcacagaaaacttaaacagattagattttcacacaagaaatagcatacaaaatcaattcaaagatgaagaatctgtccttaggaataacttttaatctgttttcccttcccaatttgcagcattagctttccccagtcccataatttgagaacctggtggtcagattaatgatggttaccaattctttaccactccccttatcgaaaggcacagactatttctccactttcttcaatctggattgggcctgtttcaccttcatctggtagaatacagtagaaaagacaccatggcagttccagactcaatattttaagaggactggcagcttctctttctctctcttagaagctgactgccaagctatgaaaaagtggaagagccatgtgaaagggcccatgtggaggagaactggggcccctggccaacaaggttcatccctaaacacggtttacataaatttatatttcaagttgtcctcttgacagtttcaaatgagtcaaaattgatcattattattattactacataatgtgggtaaggaaaggcttagacaatattttcatgtccaagcctttcatgttgctttgcatgtttttgaatctttactattgccattttgttatggctttagttaaaactagatcacataatctgtaacatcagagaatcccacatatataaactgtaataagtcacaataggctgaaaagaaacaagtgggaggccagcatacagaactctatgtcatccctcaggatactaccagaaccacagcagtttctttaaacattttgcttcccgccccttaaaagatttttgaaaaactatatacccttttcccatattttatattgacatataaagtttttattttaagtttaaatagttgtaaagaatacaatacccaacatattgtaaatgttgacacttaaagtttcattgtatttacacatatattcttctaagtatgtgtcttgaggtttasttcttagttttactttaggtaaaatcttgcattgttttactttttgtttacttcagtgatgttggtaaacattttttaaaattgtacatgttcctcttagattaagttcttagaggctagtaactttcttttttcttttatacttcttttaatgctgggtaatatatgttgatgaattgaattatgtcttaatgtaggacatctaacattttgtagttaaaatttttgtgataagattataagcttttggtaactgtttactttttgacggacttctaataatttcttttaatccaactttcatagataataggtagtatttatattactaaccttctcccctttcactattatagtttggaaattttagcattcaggtgccaggaatgcagatgggacagccagtgccagaaacaggcccagctatactcctcgatggatactctgggccagcatattcagacacttattcctcagctggtgactccgtgtatacttacttcagtgctgttgctggacaggtgagatgctaaatttattgcataaatatgtctttaaaattattgtttaagagaaatgtcagctatttagagtatcattttaaatgtatatgaaatttatattttatatgtatctagactaatttttttcctgagatcagagatgagcatagtcataattatttcattttaaaagtctgttgatgtgatgcttgatacattgttcatttgactaaaagaggaaacattgttttccatagtgcggaaatctgattctttcttacctagtatgcttgcgttactgaaattcttctacaaggggctcctcttactagtcactaaacaccccaccaaaacttagatatatcttcttatgagttataatttttctgtcacttaaatctttttatttccttcactctgtttgacatttaggagcatcatactctccctgagtgatagataacacaaagctaagtaggtttagcctgcacattcttttatagcatgcaaaaatgactattggaaattttaggaaagtaggaagcaytttaaaaaattataaggaacaatatttctaacttgggcctcactcccattttttaaaaaaaactcagttaaaacctaagtatgtcaaacaatatgattggaaatcacttcagagtctcgtaaatttattcaggttgagaaattacatttttttcacaggtgaagttatatcatttatagtaattttgatttgatatggctggtaaattttccaggttatcaaaataatcatgtcaggatttattaattaaaaattaaaggaaatagtatgttacgatgtggtatggttttaggatgttatttgtttccagtaaatttgagtgattatttaaaggactgactttattatgaccaatagggacgtgtgaaactgccagttcaagtacatgaattctgtgggtgaattgttactgaygatatgtgaatactgtggtcaacggaagcttttcttttactcctacataactgtaacaccataccacagtttattcttttccaagtgattttatatatatttttcatgtgaaatttcaaggaaaattaagcaaataggatatgtattatacccctttgtatcagttattagttgtatttgacagaagtattgagtaaatattcaagatcggaaggaatacaatattataagatgccaatgtcttccaaattaattgataaataatataatattatatgagtcaaattcctaaaggtttctttttcttttttctttttggcacttgctgcaatgattctaaagtctgtcttgtatactatgttgttgagaataaatattaaattataatatatcatataaatgtattattaataattgtgatagtgtggtcctaatgtaaaaacaaacataatactgaagagcccagaagcttacctgtgaattcagtatatggtagaggtagcatttcatatcagtggggaaagaatgattcctgaattaactatcctgaaataattaacagtttatctaaaagtaaatgtaaatcttcagcctgtaccatatagtagcatgaattccagatatattaaaggattgaaaagagggtgtattgatgtttatctcctgttgttgaaataaatgagcttgtctttttttttttgctgctgcttcagcatgtattgcagcacctgctatatttgtgtttttgtctacaaaacttcttagaagagtgatgaactaagatagttgcatgtgttaatgaaacatttgggaacatctttttaagatgtgtgtttttttttcttgatatgtttcattcacttgtttaacaatttggggggaaagttgaaagctcttctgtggttatggaatacagtggattggtgcatggagactgggggccagagaggatttggaaaaagagatctacatgaaaatcatcttgaaggagttggggcaatgtatcaaagaggagatttgtaaattgtggatggttctgggacaggctcgatgataaaacagattaggaaaaggcaaagaaactggcagaatggatgttctaataccatactaatgggcagaaacagaaattcactctagagtcttagctgtagtccatatctcttttcttttataatggtcaagaaagatttattgatgtaggtagaattttatagaactttaataacattttattcattcccttgagtgttcactaggtctaatgtgcttttctaggattagacaatatacacagaattaatatacgtggcagacattctgttttggctaccccaatttcatttamaacccccttttaccttttattatgtaatagaggctggggaactataatagtcaccatcccagatacctttgtagctattaaaggcagccatgtgccgtaggactgaccattgacatgtaggtgcagtatctttggaaaatctttctaccccaaatgaaaaaagccttactgggagcaagccttggctgtggctgtttttgccccttcattcttcctgcctggaaaggggacttgaggtatggaggtgcagtagccatctcgtgaccctgagacaacaggcttgagataaagacctatagatagggaatgtggaaaaatgtagagactgatgacatgtctaagttgccatacagccctgttctgcctagcctcagacctattgtatgaaacaataaacccctattggtttaagcatcttcaataatattttctcctgtttgcagctaaatggtaccttaactgttctactcattataccattgccattttaaaggattatactgggaataagtagtattatactgagaataattctattatctctgtttgactatataatacattcatcatataaaattacaacttaaagtatatgaactggacatatatttggaaactctttttgactgctgaactatttcagcattttaattgtcagcaataaattcgctatgtttgaactatttgatactttccttaaatttcccagtcttgtgcttttgaataaataaactccataaagacagggttctggtcatattttccctacttgacaggtagatattaggaatatataaacatttgataaatgtttcgtatggatgaattaactatcccattttcaatttttagtctaaatatttagactgtattttttcatatattgagttctacctagctttgagggatcaggtgcaacatctgacttaggtatacygctcctggaacccaactactgaacttacatctacagccatatccttttttgatgggcctcataattaataatgctctatgaaaaacacctgattaaaggtttctgcagtgttcttatttataggatgaagtattctaaacagtaaggattaaatcatcaattaatttggggaaattctggtttctgtcttcatacatacagacacatgcatcacagtaataccaacaactttaacttttgtatgcacactgcttctacttttccacacagcaactgtgatgtgggcatgacacagctacctttgtattatagataagtaagtggagactcaaattgagtaactgaacaaataggacttgaagttggatatcattttaaaatcttgctgcctaacgaagggcaattgatttttgttaattctctacctgatgctcttgtaatttaattaggacattcagctttctaccgctaatgctacctaattcagttaagggaagaatgctgcttagtattttgtaatttctattagaacagctgcagttttgtaaggggttcttttgccaaaaatccattagaatgtgagtgttaataatatttcttagaagtagtttagaaaagttttttgttttgttgtttcttggatctcttatgaagagtaggttttaaatttgcctccttgatccttcatcatagctacattttgcatttgtgccaatgtttgtgatggttccaaaggaattacttatttttgtcaaaaacaggatgaggtactaaatcataatgagaatactcaacctatttcatttccattgtgatttcttgtttgcattttaaaactttattttctgtagtaagttcaggcaagacttgtttgggcagtaatcagaagaatagcagcaagatacagggggactctagaattttgctaggggtaatggtgggggaaaatatattttccccttccagttaaagcttcagtattatttataaataatctcctcccaaaacagcatgagtggggatgttttcgagacttttctgaacacattttaggcatttttctaactgtttaactgtttttctaactgtttaaaatagaagtacaatgactcttatgagattgtcttgaaccattatagaacagggtaattgtgctattcttcagaagtggaagaaattatttctgtggtatgatattttgtaatatgcctttgttgtcagtaattatctctagaattttgtagttaattatagagtaatgtttcaaagaatgcatatgtcttgattggcctagaacagtcaattgacattttaatatgcttttatacaactgcacattaaattaggtcataattatttttaaacaggatggtgaagtggatgctgaagaacttcagagatgtttgacacagkctggaattaatggaacttactctcgtgagatcttttttccccttttgttgaaattataataggaagtttattttcttactttttttgtccctgtaattaaaatgtttaaaaaattatcacagttatacatgcacrtagtttaaggagtcaaataactgtaaaactcrttatgaaaataactgttcattgtgtattcctgtctccttaacattaactgctcatagaggacacttcttttgacttttaaaaatmtgattcttttgaaatttgcttccagatttcaagatagaatatttttttcacgattgatttttggattttatgattatctattgataycctgctatgaaagatgaggatttcactttattttaaccttaaastctcccctgtctctgcactccacagaggaacatttcccatcctcctgtccttccaatgtagttataatatatagtaacttttgttaggtatgttagtctttaccttatttttactatctgaatgctgcttatagctgtatcttatgataatgtatgattacttttcctttttatataatgttttgcttttcttgaaatcactagttgtcaggtattatcctagaactctgggatatgcagttttttatgtgtagctgtcatactgggattctttcaccatcattctgaagctggtttccccgtttctcttgagttagatctcctttttactccatctcttgttgtcctcttttaaaaaattcattatcttattttagtgaaatgtatagttaagcagcttcttaatataaaaaaaaaatacggccaggcgccgtggctcatgcctgcaatcccagcactttgggaggctgaggtgggcgaatcatgaggttaagagatcgagagcaccctggccaccatggtgaaaccccgtctctactaaaaatacaaaaattaactgggcgtggtggcacgcacctgtagtcccagctactcgggagactgaggcaggagaattacttgaacccaggaggcagaggttccagtgagctgagattgggccactgcactccagcctggtgacagagtgagacatcatctcaaaaacaaacaaaagaatatatgggagataaatttttgagagcttatgtatctaaaaatgctttcattctaccttcagaattgattggccaggtatagaattctaggttacaaatgattctcaagtagaattttaaaggtattgctccattgtttctagcgtcccttgttgcattatctttctctttcctgcctggatgtgatgtgatttgttattcctctctggaaacttgtgagatctttgtctttagtattctgcgatttgatggtaaagtacctagttgtgttgtgtggggaactcagatggtattctcagcctggaaactcctttgctttagatgtaggacgttttcttcaatgatattttctgtttcttggaatgctttttgttttcactgggttttctacttttatcatctttttcctcctatcatttttttttgctgaactttttgggaattttcctcaactttatttcctaaaccttctattgagtctttcatttctgcttttcattaatatccaagagcttctgttctattttcatgaatgtgatattgtcccttatctctctgagactattaatatatttttaaagttttttcttcctatataacctttgttttttccagattgttttttctcctcattttgcttgttttggttgtctttcatgttaggtgcttttctcagttatctgatgatactgctttgctcttattttaactaaattgctgattagaagccctgagatcatggttaggcattgattgtgggcttcactgtatggtgatttggctgggcagttttgtcttggaactctgggtgtcagtatctttagggattcccttttggactgggttttcagttgaccttctgcctggaaaggagaggtggactcagaagggttctcaaatcttttgtaaattgtcctttaattgccttgcttttagaagatagccctgtctcagctctggtatcttacatttcagagactcctccagagaataaaattccagatttctgctgggttggaagtaggtgtagcatccatccaactgaaccgaggcagggaggggatatgaggcttagaatgctccttaggtagacattcagccaattcttctgtttttatctccactttcacacccactttcagaagtactgccaattctttggcatttggggtcttctccaagggttgcttctcagcttttctcattacaagttcaggaatccattttctcagatctaggttggttaactcacatccatcagctcttcaacttgcaaaattttgttactttgtttcctgtctaattctctttttctctaaagttttatgccttaaatcagtttactctccattctaatgggctatggggaggaagtgaaaaatctgtcaactttcctgaaaagtctgtctctccactctttgtcctaaatatttcttcttatacatacacattcctattctgagattgaagatctgctcatttgctgattcagttttagcgatctattatcattaattcggattctcccactttatgaatgtgtgccaagttaattgtaaagcaaaatagatattatttacttgcccaaaagaggaaataccattccagaaatttctcatgtaatcccctcactctgacagttgtatagccttagctttgtaaacgtggggaactgcctttctgggtcccagtttcttccttttttacaattggaactattatacgtttagcatgtttatgtgaaatcatgtaacacacgccaccttactcatgctaagaacacattgagtatctattgagttgtcaatttgaaaatactacaaccaacaattctaacattgatactatattaaacatttaaagaaaatcagcaattttaactcttggaatgtcttataattttttctttagtgggtctaaaatttagctgaaataattttctgcttttataaaatgttaagatgttatggataaaataattttgaaaattttcattcattcatattaacaagctgctattaagcactttgtaaatttaaactgtactaacgtgatgttttctttatcagggcatgaaattagtcttgagatatgtcagcatacaaattgaatgtaattggattagaaaaattagaaaaggattagaaaaattgaattttatcaataggtcatcagttgtagttctataaatatgaaagtgttaatatttcaaatcacccctggttttaagatagcttgtattgattttttcttccttttttctccccccaacccccgagaaaaaccagttgcttcaattcagatgctcattttttcttacttggtctattacaataaaytaccaatggacttacctatttccaatatcatctcactttatattttattcattgtaaactaagtttctaaaatggaaattttagaatttcccttctgcttctgaaaacacttcagtggcttttcattggccyaaactttttgggggtagtattcaaaagtttcatgatttggccctcatttgcctttctgatgtcatcatatgtcactctctcccatatactttaatgcaagttttgtgatctctgagtacatgtcaaacttctactttaactccacttgtcatttgtgttatgaagactggaagccttccttttccccaggcttgggtgaagccaagtgctttacatacctggaatgtctttgtcacagtaattttcagttagtttgtaattgctcatttaattaacttagtcccctcactagatgtgagtactttgaaggcagtaattttttttaaacaatgggtgcttaacattcaataatagcttgttgattgtggtgattttatatattttggcagttttttaatgttttattttgaaactggagattgtcataattttacatagataaagttgggcatactctaatttaaatattgaatatgttttacagccttcagtttggaaacctgcagaattatgattgccatgttggatgtatccttgaatagaaatagaaaatactagaataaagagtaattgctttctgactatcaagccagtggttagatttcagtgcctgtagtaaactagtgaatttaaaaatactttgtaagatcctgtttaaattctaggctttctagtttttatgcagaagtctgttcatataatgagtttggctaagtctacagaagcatactcatgttttagtcaatgatttagagtcagataaactcaggtatcagaatttatttttgttaataaaactatcagagagatcacacaggaaaaatgggatttaatgcattcaaagagctatgggcagctcttaatgcctggaaggaaaacttcatgactgttgatcaagatggaagtggcacagtagaacatcatgagttgcgtcaagccattggtcttatgggtaagaacattaacattctttagaatctataaagctaatctttgttctttgattagatgaacttaattgcttcaatttactaactaataaagggatgtatttttttgccagcaagttcctttgtttgttttcaaggttgtaggtaaattctgaccaaagacctcaacaaaaccattttaattatgatttttttcaaaagatgatcttccatacatgcatacattctgaatttcttctgttgtgtttaaatttatttctttgttagtacttaccagttagattgtattcttttataacttggcaggatmtctaattgggagccaaagcttgcctcagtcagtcaaaagtctgtacaaaataggttttcagtggtagaaaccatgtttttgtcttttttttcttagatagtgcagaacacatagcaggtgccaaaatacatcaggatggaaaggttgcattttagagtaatttagaagtatataactttattcttatacctctgataagctgatgttcctagtgtacttttaaaatggataacatacaatggtgtttaatttgcttaaacttaatgcagttttaagtagctttatgaattgttcttatgcttgtgatttacactcttctaaacaaaatctatttgtatgaaaattaattttttggaagttaaaatctgaacccaatggaagtgggcttatctcaaattgcaatttaaataagtcaaattagtgatttgtttggttttgttttataaatagacattttaatttagtagtagggacagtccagcccatataaacatatgtagttcaattatagatccttaatacctaatggattaaacctggaccttaattcagcctaatgttgggaaattaatgtaatctttggcagaaaagaaaacctccagagttcccgttaggcagtggaatgtaaaaagggtattctggattatccaaatttaagatcttcatgtatattttaaaatattcaaattatttttctgagaatactatgggaaaatctaggaattttatcagtaccacatttagmtcataactctctaatatgaagttcaaaatatatttgcatataattacattagtttgcatgttttactgcttctttcaatttatacctttcccacattacattctattatagctgcatgtataattttctcctgttacatttattttggttgttttcacctttgaattgattagtgtcatttgttcaagtctacaaatccagtaatgtatgggcaataatactgggctaccattcttcttagtaaaatgtatacatctcattaaatgcataggaccatctataagggtacagcaagtagaatatattaatttatgtttttattcagttgtattcgttttaaattttagattttatgtattttttaaaataggagtaatcaaacaataatacatgtatagaatttaaaattaatttaaacatactgggagtgaatgatcaaaaacttctttctcattgatataagtaaaaatcaaagattttggacatcacaggactactgaacaaagaaccaaggaaatcagtgaaatagcgagaaagctgttattattattacagtgtatgaagaaacactaagaattccaggacaaaaaagaatgtttttctgtttttttcccctgtagagtaatcatgttgatcctcaaatttctcttagttataaaagatacttgcaagtaatatgttcagtgggaaatatcatttgaataacaaagatcattagtaatctttgcatttatattctttaagaactatacaaagttacatacttgaaatattgaagcattaaaacccatgaaattagacattatttcaaaataacaatatatgataaattcataagaagagaattattttcttttccttagctttgactttattacaaagttagaattgtgatatttatataccgattaacaggattaacagtgaagcctttgtctgatgaatttcaatattmatgtgttttgtttctaattatatttttgtggaatgaattttgaaagttattttatgacttaatgagaaagcaatcttgcagtgttcttatgttatttacatttagaagttttaatttatctcttttttaggttataggttgagtcctcaaacattaactactattgttaaacgttatrgcaagaatggcagaattttctttgatgattatgttgcttgctgtgtgaagcttcgagcattgacaggtattgactatttaaaactaagtgcacagtgttatgtagctatttttcttgaataatgtgtctcatttcctccagcaagtttataataatatgtgttttctccctttattcactgttaaatctaattagtttaaaggcttcaaatattaaggaatataaatgataaaaacgttatgttatttttggaagtttttctcatatctctgttgccagggctattcaatcacttaatatttaattgaatatgaaattattctttttgtgtacctgggtgcactaaatatttgaaactatgtattttaaattacaataaaaaagtaatttctttgtttaaagatttctttaggaaaagagaccacttgcaacaagggtctgcgaatttcatatatgacgatgtgagtatcctgcttttgatatttatactgcattctagatagttctyagttagtaaaaaaatttaagtgatcccaagtaccagtactggaaataatatatttggtatgccacatacttttccatatttttcagtgtaacacaaatataagattaatattggtataggtgccaaacaatttgacttcatgttaaattgtaaatatgcttttcaatttttatgacaggttttttgaattaaaaaaaaaatgatctttcaaatcacttttaagggccaaaaccaccattatttttaaaaagggtagtttactgtagtgatattttttctcagggagggaaaaattttaatccgtgacggattatgaagctgttcatttctcatttcaaatggttactattaacctgatattcagggttttttaaaattcaaggtataagacagttatatttacctgtgctttaatgtttcagggtttttgttttgtttttcttatatttactgatggaagttatggggtcaacattactgatatttattggcttgaattataagccttggaaacaaacttttctctcttaagaaaatgctcttatggaatataattagtcaaaaataattaaaaaccattttattcttaatagataataatttcacttatgtattagtttttgcagggcactatggcaatttgaatgcttagaattttaaacctgaagagacactgtgaattcttttgtttggaagaagtgaactggactactttaaaacttttaagggttttctatgttcttcctacctgttaaacctcttccctttctgtgtgtttttattttagcagatagttcaaagcaataaaagatttcttttttaatttgaggtattactgcttttggaaaagttattttataaatatgtgcatattgtcataaaatattgtatgattaattgatttaaataatgcttagccttaattttagataatgtaaatttagaggaatgtactttacaagatagattgtataagaagccaaataatgaaagcctagaaaaaactaatttatacttatctgaaggttacaaattagacttttaaattttctttgtagttggtggtgtttgagggttggctagaaatgaaagcctggattttgtgccatgtttgtaatatagtttgttccttgatcaaataatcagagaaaagaaacttaaagatctttgtctgtgaagaagaaaattatctccctagttcaatctgtagtgaaataagactacagaaggcattgttttttccttttttattttttgtattatatatttttcttaaatatgttttattgtcttctctaagcaaaaagttcttaataaacatagtatttctctctgcgtcctatttcattagtgaagacatagttcacctaaaatggcatcctgctctgaatctagactttttagaaatggcatatgtttttgatgatatgtcaacattcaaaattgtcctaattaaattgttgtttaaatgtaatgtcaactctttataaacttaaaaataaacaagtaattaaccactctaattgttcagaaattttacatttgacttatttgacaacattaacattagtggtggctttgccattaaaaacccagtaagtattttgagtgcatctatgtgatgtggtgttttgagcatagtaggcaccacagcaacttttctgcgtggtactaaaactgccgaaaatgcgacgtagaatcaccagatctttagtgtttaatatccctggtataagatgttataattaatgtaatttctttcttggcaaacacctcatgtctgtcttagtgaagatttaataaaccacttatttttcttatgctttaaatgtgtattttctaacctaacagtgagtgacataattttatgactgctgaccaaattaatttatagattttataaaatcccatgtttcttaatggatggaggatagatggcaatatcttgaacaaaatcttttataaacttacagaattttaaatcagccttcacttaaaaaaatcctggaaaggaagtaacgcatagtcacttgacactgataattttatataatttgctgtcaaattcacttggtcagttttataaaaatgtgtgaataggtaatacacataattttgttctctggcttttttatgaacatatatttgataatgtgagaggacattaactgagctgggaaattaaagaaacagaattctaattagaagtgttgtaggaaaaagcaaatgtgaaaacactaagtgtcgttcacatcgaatggtgataatgtcgctcagcaacctgtaatcttaacatccaggttatacagatggtcgttactgaactattctgcggtcgattatgattatctctcttacttggaggctcacagttgaggtaaaacttttaaaatgacaaatggtattattcatgtaagcttctgccaggtgacactctatattagaactctttaacacaattttcatttaaaaatgttcttatgacttttggtcatagaaggtctatgaaggagcttccatggccaaacatatttagaaactctcactttctaaagcttgacaaggtatattagcatctgaaaccccaaggttaataaaatcagtcatgtttaattttatttgacccagttttttccaaactttttgaccacagaacccctttctctagcaaaacctaacattctatgccgatccaacttaattgccaggcaactcttctgcactttacattaaacagacaaacttatgttaacaaaaacattaggcctagagaatattttaccagaatttttatactgaaatacagttcactttttcgatgctttaaaaataactgatatttttatgatgaacatgactgtaatatgaatatagtatagtagtttgcactggttaacttacaccccagttcttttacgatgatgtaaattattgaataatgtacactcttaatgtataagtgcttttatttatacagtaaacatgtttccatgtcattttgagaatttttttaataaacattcaaatagcttgctgtaaagttttgtatcatacaaaatctgttacatatatatatattatgagatgcttcagttcaaataacagtgcagtaattcacctatatctaaaagactgccaaattattaaatgtcaggtattgcacttctattctgagtggcagtttacacattttaaattacatcaagggtaaatcaatagtatggaaatcttaatttggtccactttaaatgtaatttcaaggatttctcatttgacctatttacacatgcatccagaaaaaagtaacaaaaaatgtagtcaagttatgtttatttccaaaaaaggcatttaccctagaagaaagtagaatctgttaatacagtttaaagtctgtggagttaaaaaaaataacaaaaaatcaatttgtgattatttctttaagtaaaatataagacattaagtttgcctgtaatcttatggcattactaaactggacaaacaaaataaatactctttgtcggaaatgtgctctttgtctttttacgtttgacaaactcttaaatgatatgttttcttctgcttttctagttttctgggtaattaatagaaataaatttgttaatatctggtgaattaaatctgatgagtaaattccaagatttctttcaggcaggcatattctgtcccataagctttaaaatgcaaccatgggtgttttattactttgaaacttgtgttagaagatcccaatttttgggttgcaattcaatcatttacatagtgaattaagcacatctgaataaatacataatgctaaaatatcatccaagaatatgtctagagtttatacataatactagatgatacaaattaaaatatttagaactggtaaatatttagaagttatgagtgcagacaggattttaaatgaatattgctcaggtaatttgaagtctagaatgaggtcatcatatagtacatatattaaacttttcctgtaatttagaattctgagcagaaaactactttccagcaaaacactgggaaacttaggaaaaatatttctgactcactatcagctcattatttgaatgctgggaaatctgtgcttttaatcatttcctgccatatctctttctacttgtttttaaaaatatgtttttctggcatataaagaaagagtcttatatacttagcattccttttttccaagtaggttggtaatatgcagctttgtgtattattttgcgagtattcaggactcaggtgtgcttctgtgtatctgaatagtgagtagacattggcaacacttctacatcactatgatgtgccatacagtaagaaaatgaggaagctgtttccctatgtgctaattatgttttcagatgtgccccttctgtaacatcagagatggtggcaatttgcaaagcttaccgggagtgagaattggcctagatcatcatttaatagcaatatttgggaacacttaggagtgattaggtcctaattctgacatattgtgagaggtaccccaatgttttcccttaaccataaaaatgtaagtatgtacagatacgtacatacagatatttgcattctagttgactgtattattgaatcaaatttcattttgttgtaattattgaattttcaaaggataacctgaagagtgctagtatgaatatcccagaaacatacttattaaatattcatttttttgaaaataataagccattttcaaatgattataagatttttctgaacttttggatgcatatttaatttcccatagctatctatttgtggtaccctcagatttatattatggcaagagataatttacggtaagttctaaaatatgtagtttcttcatatttagattctcattttctgatcagccttggttgtagataccaatacaattttttctgctatttgtgtttggtttttcttttgtcaaagggaaatgttctcttggtgttctaaacccttaagatgaaggttgggaaatctaagccactaaacagactcaatagtccttagcttacatgccacattatggccaacacattttatttacaagttttcttgaaggtagtttgatatttttccccttaaataatagagaagcaacagggggaggaattaagaaagtatgaaactcgggcaaaagaaaatatctggatattttcattcttgcttaaaaaaatgaagcaaacgtatgttataaaaagttatttgcacatgagttaaagcctgtttatccaccagaaattttaagtaaacaataaatgttttagtcaatcactgttgtggtcttaacaggcaataataggtgaaatattatgcttctttaattttagatttaatgctttttgccactcagtctatcttactagtgtcctgatggaactcagtaaaactgtagcactgttacatgtgatttcatgaaataacatcagcaccaccatgcctatatctagtactgttcctagtaaaatgttggaaaaagttggcttctctagtaaaagtatcctacttagctaatgagatttactttctttttccccaaaataatttcttttacaaattcttgaatttttcatgtataaatagatcagaaattatatgcttcattcttaaattatgtatatatactatattttcaatacaacttgtacatttctcttagctaccaaaaatttgcaaccattttttacatgaaatgtacatttttcttatttacagttatctgtagaagcttattgcaaaactagttgtgcaagtagattacactgtcaataccacataccaatctttgaagaaaatatttactaaaaaataaatatttctgcacagaatatttcaaaagcgttatgatttcatgctacattatgtgcataaaaactaggaaatagtatgtgttttggtagattgtttcattttgtttaaagcattccaaggtacttactacttagccagatgtaagtgagctgctttgtatcagatgactgacattttcaagtgactacacacattcttttttgaaatgtattattatttaactggtaaacattctggtgtaatacattttcccatcaaaattataaaatgcaaatttcagctaaaaagcgttaatgtgcctttaattgaaatcactaggtggctaggagataaaaactagagattcctcaatatttctaatcttatacaacatttggaagaaagatgccatatcatttcagtgctattataaataaaggggcatttgaggagactacgtgagggagttaattataagattactgatcctttaattttacccctaaataagaatgatgaaaatgtggaatttcttatatatccaaacaatatatgtcagtataaataatacagtttaaatgctaacagttgtgattactttcaatataaaaacattaaaatacacaagaggaaatacaaaggatagaggttaaacatagtgctttaaaaccacaggtataccaaattattttacatctttcaaaacataaattaatggaagtcacagatgtagtgactatcattcaggggattcatctaatttttgacattagcttttcaagaataactatgttaatattgccacttctcataataagtactattttactggcagtatttctttaatcttgctattctcatttaaaagtttgatcatgaatggtacagcaatgaaatttgtcaattgatatggttccgtgttcttaacattgcatttctatagatgttttgatgtattcgtagtaataacatgttttaaataacttgttagtcatctctcaatctccacttaatagtttatatacataagcctcacggtaatttcctttcatgcttttgcttattaataattcatgtctttctgttaattttctgtatttgacatttaaccgaagtgtgtttgtaccacaaatgcatgtgaggaattattctactgttgggcactgatcaatcacaacacctaatactttacatttgaaacatgatccttttagtttgtaaagtggtttaacatcacatcgtaagtagaaccacaagaaaaaactttgggaacatttgaggcatgagggagagagggatgagctattgcaaagctagaaaacaattgcaatgcaaatgtataagtttatgaatggtggacaaaagcaatatttaacaaatataaggatgctatctatactggctttcgcctgctctgagcaactagatctttgggaggcatgtgaaaatgacttcataagtttttgttatacagtatgaatgtgcatgttgggtaaaggaaagagcaacagaaagtgttttagaagaccttaagtagtgctactgcactaccccatattccactatctttatgatgatgcacaaatcacacacagatttactgtaagaaataacgtcctttatggtttacaaagcatttctacttatattttcagaggatcctcaacacaccccttcaagatatgttagatgctaa

SEQ ID NO: 98162 - DNA, 19404 bp, Homo sapiens
gtcccagggattacgcagggcacacacaccaaggggtgggaaatgtggggtgccctcctagaattttgcccactacatccctgagcttggtactggctcacctctgcctctctctgcagaggacatcctgggcgttcaggccgcgcggccctgggagttttaccccagcagctcctgccgctcggtgctcttccccctgctgatctctggttccaccttctggctgctcaggctctgggaggagctggggccgtggcctggcctggtgagcggctatgcgctgctggtggggcctcgactcctcctcactgccctttcctttgctctggacggggccgtgtaccacctggccccgccgatgggggcggatcgctggaacgccctggccctgctgtctggttcctacgtcaccctggtcttctacacaaggaccttctccaacaccattgagggactcctcttcacgtggctgctggtgctggtatcctcccatgtaacgtggggccctacacgcaaggagccggcgccgggtccacggtggcgcagctggcttcttggaggcattgtggctgctggcttcttcaaccggcccacctttctggcctttgctgtggtccccctctacctctggggcactcgtggagccacaaaccctggtttgaagtctctgacccgggaggccctggtgctgctccctggggcgaccctcacagcagcggtgtttgtggccacggacagctggtatttctccagccccgctacatccaggaaccttgtcctgacacctgtcaacttcttgcactacaacctgaatccccaaaacctggcgagacatggcacgcacgcgcggctcactcacctggcagtcaacggcttcctgctcttcggggtgctgcatgcccaggccctgcaggctgcgtggcaacggctgcaagtcggcctccaggcctctgcacaaatgggcctcctgagggcactgggtgcccggagcctgctgtccagccccaggtcctatctccttctcctctacttcatgcctctggccctgctatctgcctttagccaccaggaggctcggttcctgattcccctcctggtccccctggtcctgctttgtagtccacagacgcagcctgtgccttggaagggcactgtggtcctcttcaacgccctcggtgccctcctcttcggctgcctgcatcaggggggcctggtgcctggcctggagtacctggagcaggtggtccatgcccctgtgctcccaagcacacccacccactacacactcctcttcactcacacctacatgcccccccggcacctcctacacctcccaggcctgggggcaccagtggaggtggtggacatgggggggactgaggactgggccctgtgccaaaccctgaaaagcttcaccagacaaccagcctgccaagtggctggtgggccatggctctgccgcctctttgtggtaacccctggcaccaccaggcgtgccgtggagaagtgcagcttccccttcaagaatgaaacacttttatttccccatctgaccctggaggatccaccagccctgtcctccttgctgagtggggcttggagggaccacctcagtcttcacattgtggagctgggggaagaaacctgacaatatgacagagcacccactgcccaagactcagccatagaagatgccgccccaccttctacttgggtagctgggctgggacgctgggacaggaccccgtcctccttcatgactcccactgctgcctctcctgggcatggctgttagctgttctgccttctgggtgagctggcactcttctccctgagaccaaagatttgacctgtcggtcttgatgtcaaggtccccaaagaccaggttaagtgacgacacctgtctgttcctgccctgttgcttccagccactgtgatgtttgaaatatgtgatagtacctggttgtgaaaaaagacaatgaactgctagtgacattcctcaatgacctctcccaaacctcccatgatgccttacccttgctgtcatgacaaccctctggcttcctaagacccatctgcctatcgaaatatgtgcaagtcagtgagacgaagtatagagaacaggtggcccagatccaggggacccaacttctggccccttggtctgtcacctcctcgctgtgtgatcttgagaaagctccttccactcacccaccccacttcccagtctgttgggatcagaggaactttgaggtgtctgccggctaacattgtgtcattcctggagtccacagtacacgtcccctgcctcaacaggcacagctctcacaaagctcttcaagcatggaagtgggagttgtgttgtacttcatggcactctgatgcctgctgtctcagtgtttggttattatgcaaacaagtaatgtttgaaatatataatagcactggagattttctccctactttcttttactcctgttcctgagaggtggtgggaaactctccagccatttctgcaccttgtccttaagagtcattctcctggctgggcatggtggctcacacctgtaatctcagtactgagaggccaaggtaggcagatctcgaggtcaggagttcaaaaccagcctggccaacatggtgaaaccccatctctactaaaaatataaaaattagccaggcgtggtggcacgcacctgtaatcccagctactcaggaggctgaggcaggagaattgcttgaacccaggaggcagaggttgcagtgaaccgagagccactgcattccagcctgggagacagagcaagactccgtcttgggggaaaaaaaaaaaaagggggtcattttcccagattagggagccaggtgttcttcctccttagaactgtgggtctcaagccctcccatcctgccccagagggcagagaacacacaacactcagctagtgtctggttaccagcctcaatttttccgatggcttcaagctttctagattgcatgattaactgtgctgcctaactagaaatgatcagagctgggtgtggtggctcacaccagtaatcccagcactttgggaggcggaagcaggagaactgcttgaggccaggagttcaagaccagcctgggcaacaaagtgcaatgccatttcaaccaaaaacaaaacaaaacaaaattgtggctgggcgcggtggctcacacctgtaaccccagcactttgggaggccgaggtgggcagatcacaaggtcaggagatcgagaccatcctggccaacgtggtgaaactccgtttctactaaaatacaaaaaattagccaggcatggtggcacgcacctgtagtcccagctgctcaggaggatgaggcaggggaatcacttgaacccgggatgcagaggttgtggtgagccgagatcatgccactgcactccagcctggtgacagagtaaggctccgtctcaaaaaacaaaaaaaaacagaaaaaaagtttttaattagctgggcatagtgtcatgggcccgtaatcccagctacttgggagtcccagggaggaagatcgcttggcccaacgggtcgaggttgcagtgacagctagtattgtgccactgcactccagcctgggcaagagttaggtcctgtctcaaaaaaaaaatcagaaatttagctaggagcttcaaatgacaggacatttctatatacaatggatttcctaatcgcaggtctgctaactggctggatcgtagtctgtctgtatccctgaccctctaaaatgaggggtagtgaaggggtgggttgcccctccacacctgtgggtgtttctcgttaggtggaaggagagacttggaaaagaaagagacacaaagtatagagaaagaaaaaagggagcccagggggccggcattcagcagacgaggatcccgccggcctctgagttcccttagtatttattcatcattcttgggtgtttctcggagagggggatgtgtcagggtcataagataatagtggagagaaggtcagcagataaacacgtgaacaaaggtctctgtgtcatagacaaggtaaagaactaagtgctgtgctttagatatgcatacacataaacatctcaatgccttacagagcagtattgctgcccccatgtcccacctccagccctaaggcggttttcccctaactcagtagatggaacatacaatcgggttttacaccattgcccagggacgggcaggagacagatgccttcctcttgtttcaacggcaaagaggcgttccttcttctttcactaatccttctcagcacagaccctttacgggtgtcacgctgtgagggacggtcaggtctttcccttcccacgaggccatatttcagactatcacatggggagaaaccttggacaatacctggctttcctaggcagaggtccctgtgggcttccgcagtgtttgtgtccctcggtacttgagattagggagtggtgatgactcttaacgagcatgctgccttcaagcatctgtttaacaaagcacatcttgcaccgcccttaatccatttaaccctgagtggacacagcacatgtttcagagagcagggggttgggggtggggttacagattaacagcatctcaaggcagaagaatttttctcagtacagaacaaaatggagtctcctatgtctacttctttctacacagacacagtaacaatctgatctctcttttccccacaggataggagtccaggtaacttgttccatggcaggcagtagtcttttttttttttttttttttttttgagaaaggttctcgctatgctacccaggctggtctcatctcaggctcatgcgatcctcctgcctctgcagtggctgggataagacacaactgccaccaggccctgcccctaggcagtagtcttaatgcctgatggtggggggttggggaaggaaggggttgagtatcagggtaaatgctgcagagctgtgttaaggacttaggccctggagtcaaatgcctctgctcacatcccactctgcaagactttgggcaacttaagcagcagcctctgtttccatcgcagtggctcttgcctataatcccagcactttgggaggctgaggcgggaggatcacttgcgcccaagagttcgagaccaccccatctctacaaaaaaatccaaaaagtaatctgcttcctcatgtgaatgtcgttgtaaggagtgagataacacatagagtgcaatgagcaagtcccagcacagaagactcatttcataaaatacgtgtttattattaccataggcctacagtccccggtattcttaacacatcttgcctgagaagtatcacactcatgcctatcaaccagctcacacatttaatcaaaggaatttggcagctgtagggttgtcttttcatccatatcgtccctggaattaactgtcctgctataccagtcagattgagcagcatctgtcaagagtttcagtcccacttgcagaggaaaggctctctggcttcggtccgtggctctccgtaggtgccgtgtctggacccagcctaccttcatctctgttaggcttaggggtctttctccacactgtgtcttgtccaatcacaagacttcaacggagcgggcggtctggcctaggctcttatgcgtgggatgtctgcaggccaacaatcccagtcgggattcgaagccgcgcgcagtgcccggaatgacccctccacattgatgccactgtagagcccggaaggaaaagcaagcggcctcggccccgcacagcccaggattaaatgtttgcgccagggcccctctggctacctggtggtggccccgagcggcctcggaggccgcggcgtagctcctgggtgaaggcgtctctaaatcgctcagcgcggcggcacagggagcccacgggcccagccgcgaggtcctgcaggcggcgggccgcgtcctggccccgcagctgggcctgcagcagtgcgaaggccgtgagctgcgccgcacgtcggataggccgcgactctgacagacgttccaccagctgcgggctgtgcagcagggcggccagcagccgccgcagcaccatcttctccaagcgcccggaacccgacctcgccgccctcgtcttcmgccccgcggcgcccgacccggacgtctatgcccccgcgcagcttgatgacgacactgccgccctcggattgggtccaatgagatgctcgccyccgcgcgtttccgcttccgccatcgcggacgcagcctcgtgccgggagtcgccgyattgtggtccgcttctctgcactatgtcgggtggcctcctgaaggcgctgcgcagcgactcctacgtggagctgagccagtaccgggaccagcacttccgggtgagggargccgggccgcgagacgggaaggccctgggcaagaacgctgagaaacggtttgctcttgtctcattgtgtcgcctcccattcagctgaaatccgcaaacgccaagtggggcmccggtgcctgctggcgaggcagggaatgggtgctggaagggcgcttggatatcactgaagccacttgctctggaagacggggaactggaggctcgcttatcccattcgctcgcagccgctccctgtaccccagccagtgccgagaggtttgagcggtggtggtggtggcggctcccgtttccacggttgtgcctccgcagacgactacgtagcaagggggaggggtgcccttctctctcccagagtaggcagaggcgccttcctgatgcagatgcggggctttttgctttgttttttaaatcggcgaagcagtgcccttcggcgattcgggccccttctctgggaggatggtgttacggaagctgtacgcggtgcgtgggagacacaagtggagtcctcactccgccctcggggaagcttcggagtggggaggtggacccgccaagctcggcactttgagggtgttcggatgtaaagatcggagaattgctggatttcagaagagggaaatttttagtccggactatatcacagtatattttgtggaaaaaggggaggcagcagatattcaaagtagacttttcagtatcagcggaggtagggatggaatacggttgggggttggcggggcgggactcattaacccaattatttagtaaacgtttatcgagtgctgtcgccaaatccttgtgctaaaccctagagggagagggaagacagtttctgcgctctgcgagctcataatcccctgtagtgaggattcagaaaagggaaaaatccccttgtgactgggaaaggaaggggcgcatatagcagarggtaagtgtggagaatgtgtgaaatgtgttactagagtagggaaagggaaattttgtttgacgctaaattagggaagctcttasatttatttagtcaaggctgggaacggtggctcacgcctgtaatcccagcactttgggaggctgaggcgggtggatcacgaggttaggagttcaagactagcctggccaagatggtgaaaccccgtcttactaaaaatacaaaaattaggcgggcgtggtggcaggcgcttgtaatcccagctattcgggaggctgaggcaggagaatcgcttgaaccggggaggtggaggttgctgtgagatcgcgccactgcactccagcctgggcaacagagcgatattccttctcaaaaaaaaaaaatttattcagttaatgtattttattttttgagacagagtctcgctttattgcctaggctgaagtgcagtggcgcaatcacggctcacgcagcctcaacctcctgagcctaagtgatcctacccacctcagcctcctgagaagctgggaccacaggctcgcgccaccacatccagctaattttttgtagagacagggtctccctgtgttgctcaggccagtctcgaactctgggactcaagcgatccacctgcctggggcttcccaaagtgctgggatgcctaagtgccaggcatgatttgcacttctaccacttttagttactactttagacagttccacatcctgaccattttgaacttaaagcatcctgtgagatgaaaactggaaccttctgactttgtctattattcatctcctcagtctaaacctgtagctttttttagatgctaatgccatactgtcatgtggaatttctagcattctgtgaatggaatccatattaatatactttaagcacttacaccacagttatcttaaactgtaggctatttatttggatcttacttacatgtgtgagaaaagtagaaaaagaagatgcctcctttccatgttcacaaatcagtaacagcagtaaaatgaaaggaatttactttctctaatgtctcactccaaagttccgaaaacctctttttaacatacaatgactattgtcctgtggacttttttttttttgagatagagtttcactcttgttgtccaggctcaagtgcagtggtgcaatctcagctccctgcaacctccacctcccaggttcaagcgattctcctgcttcagcctcccgagtagctgggattacaggcgcccgctgctaccatgcccagctaatttttgtatttttagtagagacagggtttcattcactatgttagccaggctggtctcaaactcttgacctcaggcgatccactcgcctcagcctcccaaagtgctgggattacaggcatgagccaccgcgcctgaccccgatgagccattttggacccagggctttgtctgtcaggtgtgttggatgaagcccagttatatgcttaagtctctggcttcatcctgtcatcccaatttggaagcccattaagaaagtgagctctgttttgtttttagtgatcactacattttcccctaaactcagagaaagatctatgagcacgtaaagcatcaaggttgtggctttcaacagtctctagggggttattaaagaggaactctctctctctctgaaaacccacttatttttcactacgaaggataaaagggccctttgtcatatattgggtcaaggtccagagtctacacttgggtttaaaggatgcactgctgaggatatggtgtgtgcagggaaaagggaarccrcttgcgtggcagtcgggcgtagaagtgactttgttgtatgtggtataacttttgagccctgtctctactaagagtctggacttcgcataagtgcttcacagaaggtcgacatccccctttttgggcaagggatttctggtaggctgggatgagagaagttgatttccaaaccagaattaatgaatgtctctacygtacttagaaatactatttaagcaaggctctgaagttgcttaacttttgtctctatttgaaattctagggtgacaatgaagaacaagaaaaattactgaagaaaagctgtacgttatatgttggaaatctttctttttacacaactgaagaacaaatytatgaactcttcagcaaaagtggtgacataaagaaaatcattatgggtctggataaaatgaagaaaacagcatgtggattctgttttgtggagtatccttcccatggatytaatgtagctgctgaaccagggtagagctgagagtggtagctcayaagcgtccctgcactcgtccctacgttttccttcatctccctcctactttccacccagtgtgtctctgcccttatactgtaaagctgatactatttatattctcttctgaaatccatgctttatggttctttaacaaaaagtttttcaagaatgtttgcccttcacgtaaaaaaaaaaawtccaaagaatgtrgtgaaaatayaaaaatctcgtactgttctaaacccctaatgccctttgccagaggcagtcagttascagtttcttgggcgtctttcaagaagtaaccctgtgggtgtgcggtagtgtatttcatgtgctgtttttaaaatcatttttttattttttattgttccatttcagcatatgtaggtctttttttaaaatagctgtacagctggscatggtggctggtgtttgtagtgccagctgctcaggaagctgaggcaggaggatcagttgagcccaagatttcaaggctgcactgagttgtgactgtgttccagcgggggtgacgggttaagaccccatctttaaagaaaaaaacttttaagtaaatagctgtatagtatttcattatatagatgtatataacctgactgtataggtacaaaccaaaactatttactttgatcatttaattcccttactcagactcttttaagtattggacctcttggatttatcctatgttctttttactgtatgttttggtcattcaatttaatattctgagaaattttgcaggcccaatttaatrtatcttttgaattttttcctgtgccctgaattatgtttgtttcggttgaaatttttccttaagtgtctggtgatccctggatttctgctcataattaaggaaaagaatgctgactcactggacccaggcagggcttctctcccagattgcaggcttgcctcggggatacacgggtttcccaaatgctagaatgaaaagagattttattttggcttgctaacatcaaagatactagtttctccagatggtttattcagaacactgttgtcttatttttatttgtctgagattaaatgtcttcccctttaattaaagggaggtctctgatgaagtaggtttgggaactgctaccttggtgacagcttgagtctttcctttagtgaagtgcagcacaattccacgtgcwcggtgaccttctcttgattagggtgccttggaatgtacagaacctaacttgaatatacagcactggtttcttggataagaagtgtacagtgatctaaacttgcamaccaaaatacagagatgatgggaccaaaaattatcaacaggaatgtccaagaaatatgatcagtgtagccatggatacgtgtcatatttgactctatgtgcttccaaaccaatcgcaaacaggcctgggcaagctgaattactgtctttgaactccatctggttggattagctcttgtactttttaacaactcagcttcatttacatgttgttcccctatttccagaaatgtttggaaaaatgctagtgttccttaatacttaagatattactcacgcgcagatgcggaaaacgccatgcggtacataaatgggacgcgtctggatgaccgaatcattcgcacagactgggacgcaggctttaaggagggcaggcaatacggccgtgggcgatctgggggccaggtatgcaagaagggtctctgggctcagccattgcctgggattccagtcacaatgacaggtgttttggcaatttgtatttactcttttgtaaataactttgtgtctataaccttggcttgaagtggatctgaaaaccacccaacggtttgggtgaattttttttttaaaccgtgaaatggtatgttctgtacgtttctaacaagcaaccattcttgaacttctgctagggctaggtatcttccacctgcaggaacatctaaaatgaaagcaaaacgcactgaagtgagctgaagtgcatatgtcctgcttgaaatgttcacattgtggcatctgaacaggtttcactgtttgtctaacatgtttgtgggaggcatatttgttacaccattcttttccatactgtaactctggattctttccattaaaggttcgggatgagtatcggcaggactacgatgctgggagaggaggctatggaaaactggcacagaaccagtgagtggtgagagctctgtcagtgacaaacactcctttggcctgttgaatttgctgaagarcatcacctaaagtctgcacacgagcccatttttaccaagatttgatcagtgtctttactgagctggaagcctctgaaagttattaaaggacagaatccaaaagaatgcctttaattcttgtctgagaatcttggccatgtgtcagattatcagaacaattttgttaccaggtcagaaattgtgttctttgacaacagattggatctgtaatgttgattagtctttagccataaccactacacttttagaaagacagaaaaatgtaagaatttgtttttaccataatgagtcttaagtaggttcatgatctacattggggcctgggattatttttttaattttaagtttgcatgagatagcctaataaatggaggtggggccaggcatggtggctcacacgtgtaatcccaacactttgggaggctgaggaggaaggatagcttgaggccaggagtttgagactagactgggcaacatagcaagaccccgtctctacaaagcamaacgaaaaacaacaaatggagttgtgctatgttgtattgctttgcacaaaattaggaacaggtgtttgacaattgaatttgttttctgtgaattctaacctctaaaggcatgcttagaggtcaaggaccttcctgtgtagttggtgcaaaagcaatctccacaggacagcactgcttccatgcttcatacatcaggaaatgaggccagaacttgagtatttactaacacgtttttcaaaagatgtcagtgttatacctaaagctaaaaaaaagcaagggtttgtcatagagggaacctctaaataatttcaggggtaggggagatgttgtcaataggaaatgggataaaatatcaagagacaatgaaaacactgccttgacatgaggaccagcaagtttattcttttcattttcagtgatgttgggaatggactgggttttaaaagggagcttgaagagggaatgtttgacagtcacagaaggttcctgcagcagatgcctcttttagccatttctcatttttttcctcaaattttacctactgaggctcaagccttcacagtgagctgatggtctctacaggggaggggagtctagggaatttatttggtatttgtaaggcaagmggtgatttctctctaatatatctgagttattgctcatttaaaactgttaagtccagtataattttccctgatatgaaaaaatgtgcatttttttcacttagcaacaaagtaccttctaatttccaatagtccgtgaaagttggggctgaagtacctaagtgtgaatgtctctccygttaaactgagtgtagaaatctgaatttttaaaagagctgtaactagttgtaagtgcttaggaagaaactttgcaaacatttaatgaggatacactgttcatttttaaaattccttcmcmctgtaatttaatgtgttttatattcttttgtagtaaaacaacataactcagatttctacaggagacagtggttttattyggattgtcttctgtaataggtttcaataaagctggatgaacttatcgttgttgctgcctgtttcctggcctataaagagggttgtgttctggaattcctgtactctggatacacatgaatgagttccagggggattctatgaatagtgtggacaattcgcgtgtccattttgattgactgacagttggaaataactattgctgcgtgtgaagagagcgcacagattttcttgtgaaagtgatcaaataggcaccaagcaacctctactgatggaagaataggttagttttccaaaaaacatgctctggatgattgcaagggaagggaaattgtgggtggattaagaacatcttatgtttgctgggctagagaacactaaatgtgagtctctttactgcaccattctttcctatttctcatggatagcatctgacctgtttctcactttaatcggagaaaagtgaaaattcaaacgtacagatgaaggcatcactattaatacatgttagtgaagtgtgagaattaaacattcagtttctcagtcaagctaagatgaagatatagaacatttccgttgtagaaaattcgagtgatggtgctgctgctctgagggtgagctggttagggcctgcactgctcactgttctgaaatgacctctgtcgtgactggaatgtcacaagaaaaaaattactcctcgccaaacagtacatgttactcaagacgagagaacacaagtttataaaggcatttagtttatttttcaaaaaaatactttgctagaagggttgagtactgtaattttacatgatcataatctctaaataaattctttttctgaccaacaggtaccagttaagtgaacagctcgtctaggtctgcttttgtaacacccaaatacaattagcacttctctgctggtattccctgggccgtcttaattatctagaggccaggaggcaaagcctagcacgtaacaaagtatgtgctttgtaactgctgattaattcagtttcttaactaggcagagcaggtcatcagtgtatctaattcacactattaatacactgtcttgctgaagagtctgacctgcccagaaccccgttatggctagcccagggaagcagtaaactgcaaagcagagaaaaggggcagctaagatgaggctagtgctggctgagtcccagttaggtctgttactgttctgttccaactataaatccaggatgactgttactcagattcagtgctatgtagaaaatagaatgcacagccaaaaacataatttggggatgactggcagcacctttttttccctttcttaagaggctaactgaaagttgattaggattcttgagagaacgtaactaaaagttgaatcaaatctatattcactgctatagatttaataaaaggaaagaccactgtaaagatgcaactacaacctgatgcgtctgctgaggagaggactgggcagcttgttgaaggctcgtcaaaagtagcgcttagttatcacaaggcctgcactcaacctcaaaagcgtaaggtttaggccaggcacggtagctcatgcctgtaatcccagcactttgtgaggcagaggcgggtggatcacctgaggtcaggagttccgagaccagcctgaccaacatggcaaaaccctgtctctactaaaaatacaaaaattagctgggagtggtggcgcacacctgtagtcccagctattggggaagctgaggcaggagaatcacttgaacctgggaggcagaggttgcagtgagccgagatcacatcactgcactccagcctgggcaacagagcaagactccgtctcaaaaaaaaaaagcataaggtctgcctacctcatgggcacccaaacagttcagtgccaaactagtaccagtaaagccatgcctgcctctttcaccaacagtccagagtatatttcaaaaatatctttattaaccaaggaagcaattactgcaaacatcaggacaaaggacattctaatctaggacttgagttaaatagaggtttacacctaatcacaagaagagagggaaagcaattacgtgtgctgaaaccaagtttcatcaatgacaaatattttaaaatgacttttaaaatacttaacattggccaggcacggtggctcccgcctgtaatcccagcactttgggaggcccaggcgggcagatcacttgaggtcaggagttcaagaccagcctggccaacatggtgaaatcctgtctctactaaaagtacaaaaatcggtggggcgtggtggcacacacctgtaatcccagctacttgggaggctgaggcaggagaatcgcttgaacctgggaggtggaggttgcagtgaggcaagattgcgccattgcactccagcctgagggacagtgagactctgactcaaaaaaaaaaaaaaaaaaaaaaaaaaacccaaactcaacatttagtctaagccacactgggcagcacacctcaaggtgccctatgaagcatgagactggaagtggaagagtcactggatttgggcagctctctctcggcgttgattttcttacaggaacaattctgtctcttctgcatgccaggttctgtcactgaggaactgaaacacttcctcactctgaagtacaagacattttgaactgacagcccagtgactggctactttggtataccacacccccacaaaaaaaaaaaaaaatcagaggcaaatttctggcatgttttgaaaaatctcatgtttgcataattatgtttgaaaaactcattatgagatcttccttaccctaaactgtcattttttcctaacgctgacagaaccccacctatagcagcataaagtgcctctactctcagtctttttaacgacttgaaacacagtaagaaacactgacctggtttgacattaaggattttgggtctggaggactcaggagaggaaagtgctggggctgcttcccagtgtcaccactggtgttgggaaccctgcatgtaaacatggtcggactcaatcctcaactgctggcagtcagccttctcaaccatacctcagggccaagtgaaactaaacattttagctttttcaacactccaaacctacgcgggcataaactcgagaatcttctgccatttactttgtttttctattcagacttctgagtttctcatacatacattggttggttttcctcccaattcagaaagggtaactgggtaggtttcacatgtatctttccaacatgtcacgaaaggctggattaaagatgtgagacgcgtgatattcatcctaatgcagctaagtgtatggacaagggccacttggcctttcttcagaagatgaggttcaacagaaggagaagaacagctgtgctagtgtcagcactggccatgcagaagccagacgtaccctgcatgttactgaggtcactaatgggacaggagaaagaacctgacacggttgctgcgctcccatgggactaagttgtctctattaccttccctcttctctccagccacctgcaaaacatctcaagtcagtcagccttcagttttgaatgtttacgtttcagatacccttgaaatagaaatgcatttggtaaaccttaacttcttccaattgggaggcaacacagggaaatgacaacttaaaaattactctgagaacagctgcattctcatttgtttgaccactagtttgatggatgttaagatttttttaacaggtcgaaaacagaaaaattcagggaattcaatatcccagcaaaagcctttatgagatgtatgccacgtattataattcctaaaaccacgattgaaatctgtcattgttactggcctccaaggttgctttttctcacaccttactcctcccaaagcagccactgtgcttacaagtgtgcctccagaaacagaagacaccagtcagtttacgaccacttccatctcacccttcaaaaggaatggactgcactctctaagactcacttggagagggaagttggtgaaagttgccgctggtaaagtaaaacaggactggatttgtcaaaaccacccccagctacccttaatgccccagggaacacttactattctcagagttatgttgtatcaaaaacatcttgcatttttaggttctgggagtaaatttgaaacctgtattcagttcacgtctaactaagtttcaaaagctgcaccaaatctactaagcttttttttttaatactcttcactgcatgctctgtctatatgcatgcgtttgaataataaatattaaatatgggggacgcacagaaccataaaattaaaaatgaaaccaaactgaacattaaacaatagtacatggtagctggagaaatgaataagggcaaaaaataaatttgaggtaacaatagtggcccaacaccactgatctgaaatatctgtaaaaattcaactaagtgtttggagattcaagtaacaaaccatctgctccaacttggtcagacttcccagagtccctgctgagtttcagtccatgagccggcactcacatagctccttgtaaatcctcttccgcactcggggcatgtcttcttgtgaaaactggaaaggctgctctaaggcgaggcacttgcagtactgcaaaaaaaaggtcccagaaacacttcagtggcacttggagttgtggaccagcccattctgttttactaaatgcagacctaatagtgtctaaggcagaagaccccaacctttttggcaccagggactggttacatgtaaggcaatttttccacagacttgggggagagggggttggtttcaggatgaattatcaggcattagttagattctcataaggggtgagcaacctagatccctcgcatctgcagttcacaacagggttcacactcctaagagaacctaatgtggacagtatctgtccgtggcccaggggtttgggaccccgatctaaggcagcattttcatgtctgtttaaactactgtaaaaatacactgttttaagcatttacccaaattataggtgactgaccaagctagtgcatggcttgggatctcctctccctcctgacccaatactgtgaaaagcagcaactgatgaaaaggcctcaattcctcccaaagtgcaacctgctggagtgcagctagacccatcatggcccttaatgggaacttgaatttgtttataaaaccccaaacatgcatgaggtatacaaacgaaccggtcttccaagatctttgcaaatctctaaattcatgcatcatattctgtaatttccaacataaatatatgtataactgaatttttttccatagcccttttcgatctctaaggagatctacagcacaagatggcagtttctcaacgtggaccttatttaaaatctaatcactgtgtcaaagacctgcagattgcttgccaatgtttttttttttttttttatttctgcaaatgccaatggttatgatatggacaaattcaagtcagtctccaatgtggcttactaataacctccagtgagacatggatgatacccacacttcactcttgatccctggaaggtggttcttcctaatgataacatctgaacatgcagaaactactgctcctcagcaataaaggggagggaaagtactccgttgctcgtacctagcatcatatacacatacaggaactgccatctctcccctctcaacccaacagactcaattcacacattgtaagttccgaaaagcaagtgtttctttacctggagcacaaagactccacagtcactgtcgtttttctgttgtggaatacactgaagggaaaaacaaaatagtcattaaaacaagatccattacttctcttcagataagaaaaactcctttatggaaaaatgcgcaaaagataggaaacttttctctctccaggacagctggtatatctgatatctcaagcatctaattttatggaggcacctggccacataaaaagagctatcaggtggcaaccccaatttataggacaatgttttacctaaatatgagaaatggg

SEQ ID NO: 98163 - DNA, 43908 bp, Homo sapiens
ttaaataatcacatcttcttaagggaaagagcacagcacctggcataggataagggcaggcccagctttacgaatgaacaaagaatgaatcagtcccacccataaagctctaattcaaaccaggtatcctataggtcaaagattcccagatatttgaattttctggagtagtccacagtatttgggaaaccaaaactgagaggtcagcttttattttgccaagtaaggactcgagagaaaaatccaacatgattatttgctgtcatcatcattgtattcatccattcactaaacaaatatttaccagtgcatactttgtgacagcacacaaaaaagaaagggccatttcaacattaacaaagcaaaaggtacacacttcagaatgcaagacagtccattatattgaagatatttggttttatgtatagcttattccattgtccttacaattaccatcctgccaaggaccagtgaagactttactgtagaactggtcctgtccactaacgggtgcttttctgaagagcagctctaaattatatactaagtttttatctaaatcaccagtaactgttttttcctaaaggaacagcttttgctagcagcctaaagcacacagcactgacccccggaggctcccatattgagatgatttctttagatgcttgatgacattgccattctatacaaaatgcacaatcagcccagttaaaaacactgaaatgaattattcagaaatccagacttccagaaaacaatctctctaccaggctactttacttgaagtagcacccacatgaaaatatcatccagagtaaaaagtcggatggctagaactaggggccatctatcctaagtgaaataactctgaaactgaaaggcaaatactgcatgacctcacttagaagtgggagcaaaacaatgggcccacatggacaaacagagtggaataagataatggagactccaaaaggtgggagatgggacaggggtaaggattgaacaattatttattggtacaatgttcaccattcgggtgatgggtgccctaaaagcccagactccaccattacacaatatatgcatataagaaacctgtaccccctacatccatacaaagaaatttaaaaattattaaaataaacattggacttaatagtattatctcctagaggtattaaattaattacgtgttattgaaaggcatttaataagtgtgctctattattagtattaataaggacaataaaataatacccttttataaccaaaaaaaagttggtgcaagcctcccaccacatgaacatatcaagggacctctgtgaccccttctcaacagtgatctgtcaaacatcatcagtaatccttgaaacaaactaacagagcccacttgaccacaggagggaaggtattaggttggtacaaaagtaattgtgggtttcaacttttttaaaaaaacactaagtcgtaattacttttgcaccaacttataaaaggcttggagagaaacggtagccatcttctgaatcatttacgcttcctgccccagcagtaaagtctggagatctcacctgaggacctgcctgtgtcgcagaaatgccaggtaatcattagtgatcttgcacaggactcgtggctgagaacagcttctcacttcagaaaagcttgttattttttctggcagaagcagaagaaaaaaatccagacttagggttaaattttataggtgtggtatcatacatcttcctcactgagtaaaagtagtaactacaatgccaatggttttttaaaaacaccactgggtcctctttatttaatgtctcatctaaatgttatactgtatctcttcaatcctcacagtttaaagggaatatgttgaaaataaatcccaaagttgttgttgaattacagctgtgatgggaagcaaaataacttagaggtcatggaatgttaaagagctactgaaaattatatttgacattttccttttttttttttttgagatagtctcactctgtcgctgaggttggagtgcagcggcataatttcagctcactataacttctgctcccaggttcaagcgattctcctgcttcagcctcccaagtagctgggattacaggtgtgtgccaccataccctatctcagttggggttacaggtgtgagccactgtgcccggccatgtttgacatttttttttttttttttgagacggagtcttgctctgtcgcccaggctggagtgcagtggcgcgatattggctcactgcaagctccgcctcccgggttcatgccattctcctgcctcagcgtgtttgacatttttaatgataatggaaaaacgtttatgccttagaagtgaataaagggctgcctgtggaccaataagaccccaattacctaaagaaaaatgtacacacacacagatacaaaactagcatgaactataccaacatgttaccagtggctgttttgaggtactgaaattgcgggaaatttttcttaattggtctgtattttctaaattttccacagcatgcacatggtgaagcagcactgcacagtgaggggcacacgggctttgggagtcacacagagttggagccagtccctagctctgccacatactatagggagaatgtctaagtcttttttttttttttaaggcagggtctcgctctgtcatccaagctggagtgcagtggtgcaatcatggttcattgcagcttctacctcccaggctcaagcgattctcccacctcagcttctcaagtagctgggaccacaggtacataccaccacatctggctagtttttaaattttttgtagaggtggggtctcgctatattgcccaggttggtggtctcaaactcctgggctcaagagatcctcctgccttggcctcccaaaatgttaggattacaggtatgagccaccacactgggccctgagtctttccatcttcatctattaattggcttagaggttgataatgaggactaaatgtgatgatgcttatcaggtacctatggaggtacttgagtgcacattgtagagtgtatagtcaggaagtctaactggtgtattatttttatagacacaaggattaaaaaaaaaaaaaaactcttcagcagaggctcccacctggacagttactaaggttctctgggtaggaaataatgctggcagtctgacatttctcacccattaacttttttcctatcttaaatgcactaagattcaccagtcctgtcccttgggctatgaactcctggccctgttgtttagagtgagtaacagattcaagctcctcaggactgcaaaagagcagggcccaagccacaagcacaatgatatgctccctccatgacatgcagacagtgcctcaatggcagagggtccatggaattagaaggggaagagggagcctcttcccaaaagaaaaacaaagttgcatgcaaactgtacctaagcactgtaagacgatcttaaaactttcacttctcccaggggccctcccagaataagaaattactcttatccccttccttgagattattatcccttcagcaatgttattggttgatttctgttcatatcatataatagcctacactttacagtttttctcatcctttcctatataccttctccacctgcacagtgtatactatagttcgtcaattaataaaacacacaatcaagtgtttattaagtacttattttgctaaatgccatggagaaccaaagaaaaggctgtgcgcagcagaaaaagtcttgcatcagagaaagcgggccttggttctttttagtactccttctatccgacatttggccaagttacttatcctctctaggcctcagtttccttatgtgtaaatcgagggtaataatagtgtctatgtcctagggttgctgaaaggattaaatgcaacatttatccttcttgtacctcaatttagtcatcacaacattgtgattaggattaaatgggaaaatattaatataggatatctaaaagcatgtagcatgtaagtgagctttattgtattgtccttaagaagcttgcaatctagttagggaaacaagaatcatataggtagaaagattagaaaataagaggttggtgataaccaagatcatttaaaaaagtaaatgagtgcccattatgtgtcaagtcctttataagtgatctcatctaataaggagaggagtcctatgagaagatcattcatgatctcatctactccagtctagaccattagtatgtggcagagtcaaggctgtaataactaagaggcaggattcagactcttgtcttacctctatatttccaaagctgaagcatcataaataccaactgctgactaagccaagaggattgtccctgtgcagtaggaaaagctgggccaccaggtttaatgaccaccaccacttgttctgggcagacggtgtatcagacactgcacagattatttaaccaacttgtcttttcaacagctctatcagttctcgataatctttgtttttttgagacggagtctcactttgttgcccaggctggagtgcagcggcgcgaactctgctcactgcaacctccgcctcccaggttcaagtgattctcctgcttcagcctcccaagtcgctgggattaaaggcgcccgccaccacgcccggctaatttttgtatttttagtagagatgcggtttcaccatgttggccacgctggtcttgaacttctgacctcaggtgatccgcccgcctcggcctcccaaagtgctaggattacaggcgtgagccaccgtggccagcctcaataatctaatttttatttaaagaataggaaacacgacttaaagagactattcatattaacagctactatttattgaaagctacagcctatctaaggtggatgcttttgaatctgaatccatgtatatccaaaacagttatttatcactaagtaaaacaaacaagatccagggctcccccgttcacagaatggccaagcaaagagaagttgagagtgcaagattgcctgtgggggctaagctggagttaaattacgatcaagtttttctttattcagaactaggtgtcaggcacggtactaaaacgtattcacaccctctgtgaaacctgctaattactccatttacacagaaggaaactgaggctcagagaggtgagggaactcacccaaggtcacacagcgagcgaacagtattcgaactccagtttaggtgagtcctggggcccagagtctttcctcggcatcaacaaccacaggaacaaatcacccagcattagtccgtttataaaggcctaccgtccccaaagtgaaaagaggtggaaagggccgcggaaagagcccctggagcacacacgccagatcccagcacttgttcctccgacctggccaggcagggactgtgccctagagccaactccctcaaagtccccagccccaccactcggaggactgacgacccagttctcccgcaggccggaccgcaggccctaccggcctacccgcaggccgacctttattcgccggaggtccccgcacttggggtcggggccgcagctgccactgtctcagcccaaaacacccgagttctgccagacccggggcagcagccgacgcactaccgccatcttgccccgcggtgttcgctttcagaaccccgccaggaagcaagcatccagttccggaaaatgacagttccgcagagcttcttcgcccgggaaggaaaacttccccacaccttgcctcccctctggcagctgaaatagcggaggtgggataaatgccctccccagccgagaaaagctggaacccactccggccggggaggctggaaagaaaactggcccctaggcgcacaacggacggcttaagacgttgccctctgcggggcggaagtggggtgcggacagcggaagttatcgctccggccccgcctccgcccccggctggcgtgagctgggtgtttcctgcctctctcagtccgggtttggagactcctgcgtcctccgacttttcatggtagggagggcggtgcccatggactaggggttgagggcggccgagggagctgggcagcagcagagtataagaagggaccgagaggagggggtgtgatgaggggcagtcacgatagtggagaggcatttgggggattggttaggggaaaggcccggggtgggggaagggctttgggtggagaattaggggcgggggtggtggtagggaggctccctggcggttaggaatccgggaagcacatttgggcttgcggagtagatacktgtgtgcgtgaggaaggggtgtctccaagtgagtcctgagtgctggttggagatgggagttggtgattgcgaggagaacaaagagatatcaattgaaaacggacatttgggggtggaaaatgaggatttggaggattatgaaggagaatgaatgggcaggttatgagaaggtgaggtaggattccttggggcggagcgtttggcgttttggaggttgtggctggagtcgctgagtttccaggaagtggggaaggggctcccaggtgcgtctgaacacacggcccagtgagggaaagaaatcgagagagcccagcaggctgatgtgcgttcagtgcttggaatcctggggagagatgccaggggcctgaggttaggatacctgcgccacggagttcagtgcctcagctggcgcctgggtacctatctgtaacttccattgaggccagaggtgaccacgcctaaggagcggaggatgtttcaagatctgtctctcagctgtggggtttgtctgcttgggatcctcaagggtctgttccctgagtagctcattgtccctgggtagagatgaccaaagattggcccagatcttctttctacttgcttgcttgtttgtcacgtccctggaaagtgcagtcttaagggaaaatcagtcccagtgacgctgctgaagaaaagtcagttatcctgtagctgacgttgactagtccgctccattttgtgcaaaataaggaccagcggatgggaagaaggcagcataaaccagtggttctcaaactctggtcccaccagcagcaacacctggtaacttattcaaaatggctgaaatttcaagccctgtcagagactactgaatcagacattcttggggtggagcccatctatcggttttaacaagccctgcaagggattagactaatgatttcttgatttggactgtgtaatgaaaggggcaaaggagttgggagtcagagggctcttataggtgtgattcctagttttctccccaaaaaagtggggttgatgataaacatctttctcactagaacattgagagaaatagaccaagagtttgtgtattaaacacagggagagaatgtcatttgatggaagttgcaattggcggtagctgtcttataagcaaattttggatgtaaaatgctgcaattatgtgacttagtttagttgaaatgtaacagcagacttttctgagttgtagaaatgccctcagtttgggaaggttttatacaagcctcaatacagtgtttcttaaacttctttgctgtaggaatcccctgaggtgatgctttgcctcacatccctggcaactcttagataaagctggttaaataccttagctaggtggcagtaagccctggtcccacatccgaatcccccaaagagctttttaaacactagtgactgatcagccacccctccgcatctctgagatactgattaattgatctggggtgtagcccaggcaagcacaggtgtgtgtgagtttgtttttgttttttggagacagggtcttgctctgtcgcccaggctggagagtgcactggtattatcttggctcactaaagcctcaccttccctgcctcaagcagtcctcccaccgcagtctcccgagtagctgggactacaggtgtgtgccaccatgaccggttaatttttttttttaatttttttgtggagattaggtcttatgttgctcaggctggtctcgaattcctgggctcaagcaatcctcccgcctcagcctcccaaagtgctgggataatgggtgtgagccactgtgcctggcctggcatcatgttttttaagcacacgcaggtgattctagtagccagggttgggaaccactgatcccaatgtttgagacgcccaaaggaaactacacaaaggactaggtgccaaatgctttaacattcattctctgagggttttgaagattatggctttaacactccattttacaagttagaaaactgagacttgggttaaattgcttgaatttcacgaaggaaatggtggaactggattgcaatccaggtttgccgagactatcccgttttccttaacacacacacaggcacacaagacttctacagagaagcatatagaaaacgtggggtcagggatttggtgcgttttttcctactgtacttgcctgagcctccttttcagtcgatgattttcccccttcagctgatttttgtattttcatgcatgcatacagttgcttcctccctgtggctctgaagctgtgaagtgggggctggctktggtttatggtgttttggtttgtttttaatgtgtcaggtcaggaattcactgggccaagaccgtggagttaatggtagcttaaataaggggtacagtgctttttaraatagtgggctctaatcttggtgggctttaaaatctcctgagggagttttaaaaattctgttgcctagtccacatcccrgaccaattacatcagaattttcatggtaggacctaggtgtcaggagttttgagctcccagctgatttcgattgtcaccaactggagagccactgtttagaatcagcaacattatattcaggggagatggagagaagagagactgaccatttaactggaataaacttctgattgaatcagatccgtagccagtatctcaagtattcattgcctctctgtttcatgtaaccaattttgctgtctcctgcttcacctccccagcttcattrgtaatgaaatcaaacctttgaaacaagtcaaaaagcaggatcctggccaggcacggtggttcatgcctgtaatctcagcactttgggaggccgaggcagatggatcacttgaggtcgggagttcgagaccagcctgaccaatgtggagaaatcccgtctgtactaaaaatacaaaattagccagkcgcggtggctcacacctgtaatccgagcactttgggatgccgaggcagaaggatcacctgaggtcaggagtttgagaccagcctgaccaacatggtgaaaccccatctctactaacaatataaaattagccaggtgtggtggtgcatgcctgtaatcccagctactcgggagggtgaggcaggagaattgcttgaacctgggaggcagacgttgcggtgagctgagatcgtgccgttgtactgtagcctgggcaataagagcaaaactcagtctcaaaaaaaaaaaaaaaagcaggattccagtagcaacagtggggagagtcctccctagagaggwttgctatggtgggggtctctggtccactgcctcgtgtcctaagttcactgtaacttgggctcaaggacacgaatgctgccaaaacytttcccccaagggccttgcctactattaggttgactgacctttggagagggtgagctctgaaaaggtttagagcttttgttgcctaatctgtagtctcattctagatcaggatggctcctgcctttatctcttagtcatgccgtctgccattagagctggaaacagtttccaaagagaagatagtttgagacttcgggagcattctcaaatcatcataatttgagtgtttggagtgtttactcagagctagggagccctgtgagggaggtgaggcttttggccctggacacagctactaagtggtagggctggggccttatgcacaggtctaactccaaacccttagccacactttacctcgcgactattttcagggctttttgtactttttaaagaagggaggtgaggctggcctttctcagcttatgtatcatagctctcaatctactaggtgtgatggtctctgggccagccaccacttgcccatgtccttcactggccccgtcactgactcaactccagcttgagagtgactgaccctgatggggctgtggcatccaaatccacaaaatggaaataactatagctgtcttccagcattgtttgaatttgtaaaaggcatgtggkagaaatgcagtggtcaagggacaccgaggggctttctggaggcatggaaatgttccaagacagcttgattggagtgggggctacacaggtgcaagtattgaccaaaacacatcaaactgtacacttaaagtatacttcattatgtgcaaattatctttaaaaaggtattggaaagccaaaaaaggtacagtcatgcgcacataatgacagtttggttagtgacagactgcgtatataacagtcccttaagattataatggaactgaaaaattcctrtagcccagtgatagtgtagctgtcatttcagtggtagcacaacatattacgtgttcgtggtgatgctggtgtaaacagaactactttgctgccagttgtataagtctagcacacacaattatgtacagtacataatagtcgataatagtaatgaacttgatagatatatcactggttaatgtatttactattaatggttattttagaatatactcctacctgcctttttttttttaagtgaaaactgtaaaacagcctcaggcaggtgcttctggaggtatcccagaagaagggattcttacgggagatgacagttccatgcgtgttactgtccctgaagaccttctagtgggacaggatgtggaggacagtgatactgataatcctgaccctgtgtaggctaggctaatgtgtgtgtattttgtagttttggataaaaaagtttaaaaagtaaaaaaagagaaaaaagcttatagaataaggatataaagaaagaaaatatttttgtacagctgtgcaatatgtgttttaagctatgttattacaaaagggtccaaaagttaaaaaaaaattaaaaagtttttaaagtaaaaagttacagtaagcaaaggttaatttattatggaaagaaaaaatattttaaataaatgtagtgtggcctccctgtgcagtgttgataaagctacagtagtgtacagtaatgtcctagaccttcacatttactcaccactcgctcacccagagcaatttccaggcctacacactccattcatggtaagtgtcctatacaagtatgccattagaaaaaaatccttcatatcacatatttactgtgctttgactttacatgaagtatactttatgtacttttttgtctgtttcatgataggcaccttccaaaatgctagatcgtttcccataacaagcatttattatataaaattagatctgaaaggggtgcttaaaaagtatttgcattttggggcaaatttcctcaacacacaccctcacccatgaccgtaagccttttctcccccccttcgaggtcttcacagtttttggaaacttttatttccataagctactcctgtcatcccatggacaaaggatttttctgagggaggtggctggtcataactgttagtgtgaggtctctggggactgatttcagaggacagctagaaaggaggggtaactgcttcttctggacctcttttgtgtttggcatcgggcagcaaagaccccaggtgagctaagcctgagcttttgaaaacatattttcttgtgacttttcttgatgaaaaaggaactgtttcttgagaaaacatttctttccaggaggccgttctttctctgtttcactctgcagggccctgacatggcaggtgatatccaggmcactgttgggtgccatggagttggggagagttggccagaagagttggataaccttgaattgaatattgtccatgactgtcgcgttgcttctgctgttgcaagctgcctccctttactcccagtcccatttacaaaaataacgyttgtgttttaccagttatagttgtagtacccattcattatagaaaatctggaaaagctagacaattctttttcagtttcagggaatagttcaaacaagttatgtgctgtcagtgccctgcagccaaaaagcacgaggagcatacctgtagtcaagcaaagttgggtttatttccttgttgcattggggtggggaagaactgtgggacatctcagagaagggctgtgggcttgtgttgggtgatttgagagacagttcagagaagtggggctttgctctgtgttggatgctgctgggaagcagggctaattctgtgattgggtctcagtgattcctgacttgaaagcaggaagaatggaaggaggctaaacytctcattggtaaagcagcagctrtaactcctattagccaggataggggatctttggtcatttttgtattttggataatgtttatgtttttgtctgtgtccggacatgatgactgaatggtcctgtttttgtcttgtcgcaagggcacagagtggccttgtctgagggtgatgtgctgtgaaaaactgttgatgttcaatgggaatggtagggccagccgtgggggctaccccagattcagcaaagattctgcccacccttgcacatytccacctctacagttttacctgttcatttcagacatgtttgctctgagtacacatgtgccggataccaatctcactttccaggcctgcgtaaatcagccactgtatccatttctttgagatgtacagagagtcagccatgctatcagggagatggtagtgggatcttgctcttttgggcagcactagtctaggaggtctaattttgcaataacttggttccaaaagtttccatgtctgttgtttagtcctcagaaacaccttctccctacaggaagtgataggagtgcsagctggaatcccattcaacttcataaagcttatttcatctgtgatgcagctgaaaaatgacacttagctagctattgagtggtacatggcaataaggaaatgtaaagagacctgggcagtgctttaggctgttttagggtgcagccagggtgttcatgtrtacaggtgctaggcagaaaggaagtgcttataacacaagagttaggggcacccttgtgcctgcagggtcgacaggcagggtcagtgtatgaggctttttgggtgggttttgggacaaactaggggatgcatggccctctctaggggtcatccaataccccagctctgaccagttgttcccctgctagcccagttggcctctgattttaggagaagccagaagtccagatttttctgtgagctctccttagttgwccacattggaagcaaacttttaaatgctgtgtatgcgtggcccaagcaaaacacatctggaggccagattgaatccacaggctgaaagcagtcaaccaggcctgatgtcatgaccctgtatcctctccactggcaggaagagatgtcaggagaaagtgtggtgagctcagcggtgccagcggctgctacccgcaccacttccttcaagggcacgagccccagctccaaatacgtgaagctgaatgtgggtggagccctctactataccaccatgcagacgctgaccaagcaggacaccatgctgaaggccatgttcagcgggcgcatggaagtgctcaccgacagtgaaggtaagctcaccsaccaygtgcctgcctctggccatgcrttatgtggtcaaggagggcttccctgaagaagtgacatttaagtcgagacctgaagatgtgtaggaggcagcttgttggggactcccaccatcttgacttggtcgttgatttgctatgttactttgagaaagtcacttcctcacccagggcttagcttgcttatctctgccatgcttctgtgacttcagagtgaaactcaagcctgggggagagagaggtatcttccctggacccttgtcctcccaagatggggtcttgacaaagacttgccaacctgggtttsagtctcagctccccattagtatctggtgatcctaaccaagtggccgaagcttttggtctcattttcttcctctggtgaaatgggcatgacaataccctcccccgtggggccatcggcacatagtcagtattcagtgcatgtgtgtatatgtgtgtgtgtagatagatagatagatatacacacacacacacacgtttttctttttcttgtggaaagtcatgttattaaaaggcaaagaatcggctgggcacagtggctcatgcatgtaatcccagcactttgggaagctgaggcgggcggatcacgaggtcaggagatcgagaccatcctggctaacaaggtgaaaccccatctctactaaaaatacaaaaaattagccgggcgtggtggtgggtgcctgtagtcccagctactcgggaggctgaggcaggagaatgacgtgaactcgggaggcggagcttgcagtgagctgagatcgcgccactgcactccagcctgggcgacagagcgagactccgtctcaaaaaaaaaaaaaaaaaaaggcaaagaattgttgagaggggcattgtcataactacttcctactcacctggaatgatcaaagagcccctgacaacagggctccatccttacctggctgggtttgcgtgcaggtcacatgaggtttaaaaatagtaccatccttcattccttggcctgagattgcttaagaccaggccagggcacagcctggcttgaccttgaccccgccttcctgtttctgagactggtcttctgtgctgctgccctacctttccagggacattgacttgggagggtgggtgagttttcacataagcgggtgggattgggggacctaagcctggtgtcccacagttaattctctgatcctaagagggctgaggcttgggctacccactggtgaggacattcctctctgtgtcctggggaaggccagggtgtggggctggaggttctgcttcctgtgaactccggtttctgttcaggcagcagcgaactgaggttggagccccaaagctgccatctcacacttagctttttatgagtgggaggatcctctttgctgtgccacaccccacatggcccgagagtatctgtggaaatcaagacaatagcacccccgctgctggaggaagcaggcattatctgagaaccaggattgttgtggtttttctcataccctacccactctctggaggggctcaggaaaggctgctgagttgcctcgaaagctgaggctcttctcctcgaaaggcctygccttggtggcctgatgccatatcaaaaaagaaacggactcctctgtccccctgtccccgactggacagagcatacgagtggtactggcaggactgctcaccttctaaatccctgctatgagatgtttttctcctggtgctgcctggaaaacacaggttctcgggggacacagtgtcattttgacactgcaaactgtgacttgtttcatgtcaccggagctcagcccctgcttcatatcattatgaaaagctaatggtatggcattttatggggcattcttttctctttttttgagacagggtctttctctgtcacccaggctgaagtgcactagggccatcatagctcacggcagcctccatctcctgggttcaagcaatcctcccgcctcagccttctgtgtagctgggaatacaggcatgcaccaccaaacacagctaatttttagaatttttttctggagatggggcctcactatgttgcccaggctggcctcgaactcctgggctcaagccatcctctcacctcagcctcccaaaatgctgggattacaggcgtgagccaccacgcacagccgatgggtattgtttcatttaatcctcaccataacccttcgaggggtggatactgttgttgccattccaagtgaggagtccccatttcagaggtgaaatsctttttcaaaagctgatgggactagaaaaggtgaagctgctgaacccaggacttgctgcctcttactgtctgctgtccatggctagttgtgggcctggtccaaggccagatcatttgagtgtggcatccttatggtttaactgctgtctttgtgctaaagccctctggtgggggccctcgtgaaggcctgggctggtaggctgggtatctggccttccagctgttgtctgtgtctggcagagcgatcctgtyggtccttggagagagcactgcatagcctgacccatggcctgcatgttgcctcaaatgcacccttgggtctacaaactgggatagactccctgcatcctgcagctctaccctggcctacaggctggaagcctgtcagctgcaatgaagtttgctacaaataggcagaaatgccaagtgcagctcagccaggcagtgaatccagcagtacagcttgctggttaaaggacaggggctttgaaggtcctgaacaggggatgtgtcatrttgcccaagaaagtgattgcttcaggagaggggacctggcatccagcatggggggaatagtctcctttttgctctgggcccttctacctgattgagttttgtactgtgtgcaagtaactcctaaaccaagaagaacttggatgttgatgttagccaggcctgggttcaacacctggctctgctgcatgtcacagtcacagccgacatttrtggagctctgtctacatgttgtgctaattttggcctatttgccatttactggtcatgtgacattggacaagtggctttttctctgaacctctttcctccttccccagttatgaatgatartgttttgcagagttggggattgagtgaggacatgagaaagcgcttgccacagggcctgagatgttgggagaactcagtaaatgggaactgtcaattatggcttttgttctgagtgtaaatgttggggggatgagtgttgctgaggggctacagagaagcaggtcttagcagcatgtcgggagaggctgcctgccttggccttcagggatgagtgtgctgcagttccacactacccccaagggatggcttttctgagaagacaaggacactgtggcagtgagcatgccctttccagactcttcccggaaaggttcagttcccacaatgctagaattttcacctgactccttgtcagcattgccattggtccacggatgtaggtagcacctttcacaatgcattctgttcagcatttgcctgtagtggtctgtttcatccctgttgcttcgtacaatacttccccctattgtaggttttctgatgtcttgctaatgtattttggaattagtgcgtacactagattgaagagtcattcattttgtgatcacacattcccctagaaaactgggaagtccagtctgatccatgggaaaactgcagttcctgggggtttccctgagatctccagcccttctgccttccatgacaatgctctttggtaaaattctgaagtacctgagagcttttaaattgtgaataatacaacaaactcacctgtgccaccaggctcagcccaggcataaagtatgacctgtacctgtggggcccctttgtgccttctctgtttgtccctctcccttccaaaggtaagcatttggggtcaccaggtggatctcaagcttggctacagagggagtcacctgaggaggtcagtactggtgcctgggtcccagccagggtgtggcccaggcagtaggactttgaagagctctctgggtgattctagtgtgcaaccagcattgagaaccacaagtgtccatctttccaggtattactcttactatagctgtgcatgtccctaaacaaggcgctgttggtgtgtttttaaacgtgatgtaaatggtgctgtacagtttgtatgttttgcttttgcttacgtagcattatgcttgtgagatcaatccacaactaaatasctctcgttcagacattttccggtggtagagtgtccattctagaagcatacagccgctgccggagccatattctgttgatgatcatgtagagggtttgcggtgttcactgtgacgaatgtgaacatccttgaacgctttccccgtgcgtgggagtttctytgtgcgatgctgcccagcctttgccacatcatggggcacgtagacaatcatattttcactttggcaaatgagggggctctggactccctagatcccacccagccatctcaagggctatggctttaagatcttacccactgttgggagctcagccctagagtttattcccaggaggggaattgggacagcatcttctacttccttagatattgcaggagtcccttctggagtggttatggcaacttctactccctgcagaagtctggatttttgccaacccttggcactgtccaaccttttaattattgcaaatctggtgagtatgatatggtaccttgttttattcagtatttcctaatgtctggtacgttgagcatgtttttatgtgtattgctcttttgagtttaatcttttaactgcttgattgcatcttacttacacatttgcctttttcttattactttgcaaaagttcatatactggatcctgtttctttggggtccagtgctgcaaatatcttctcccagtctgacttgtctgagcttttttaatggggcttttggaaacctcagagtttaaatcgcttttttacacttacatccttgatctacctcagtgatgcccaaaccaatgggtgattttttgggatatttagcaatgtccagagacatttttgttgtttcttggggatgatggtgctcctggcgtcaagtgagtagaggccagggatgcaactaaataccctacaatgtrcggggcagcctcttacaactaagaattatctggtccaaaatgtcaaagtgctcaggttggagaccctgccctagggattctgatcaggaatgaggcaggttgctagaatctgaatttttcacaagtaccttgggtggcatttatgatcaggggtgtttgggaaccacaaaaatatagagtataaataccttaggatggcaaagagaggtcagtgaaggttccctggaggtggtrggagaggggaaaggagaggtcagacatccagggagagaggaagcacatggtatgctcacggggcggggaggaggggagcctagtggcccaatcctcctgacccccagagcagccttctcctcccttgggtccctgaaagcaacaccaactccatcctgggggctggaacttgctgcctctggacgctgctgctctgcttccagcaataatgatgaaagatgagattgttaaagacccatagctgcttttgagtgctgtyggtagacccagcattgtgctgtgtgccttctgtacrttctttcatcatatttttatgtcaaccctgtgagatcgtttgtagaagagaaaactgctagacagaggttaattgaagcaccaatgtcatccagcaagaaggtatcagagctgggtttccaacacttaactgctgtgctgtgctgaggacgtcctggagcccaagtccagtgctgcccagtgtggtcccggtcagttctgctctccagccttgcctaatgggtctgggatcccaggctgccctgactttggacagccttcctaaatagctctcgtgccccgtggcagcaggagagagaccccccacatgcgaggagctgcttgacttccatttgtctttctacgtgctaggcatttgagctgactttcaaagggatcacttcctgctttgaaagcaaccacagtatcttaaagtcaaaacgctgattgaaacctcctggagagtgtgcctggctcccttgcccttatttgtccaaagtatgattctttcgccacaagcatttcctgacggcattcttgagccggagcccagtgtcacggtctgcctgttcatttatgggaactctgggctgtcatttggataattgatttcagggccctgggtcttcccmagcagctgagttctgcagacatcaaaggcagaacgtggaaggttccttccctgcgcagctgagttgaattctatttatcttttcaattctggtgaaaggagttttcctatgagtgccttactttttctttgtggtctagtcctgctgcctctgcttgggaatggcactgcacctctctgagcctctgttttatttgtggaaaatgcaagggaatgagctcccctcaaaaaagaactggtagaaagrtaatacggtctttccctgccttgtcagccttctgagaaaaaattacttggtgtagggtagcacagaggcctcaagctggtagcctgcaggcccagttcaactgcagatgtgttttgtttgccttgtggtgggttgatgacagttttgttttgttttaattagtttaccrtcctttaaaaatcagggaattcacagaaaaatctgggtttctggcattgcatggaacatcagagctcacagctcttgggcccacattcctgcctggccactcttggctggagtgggaagagcctgcctctcttgggggcagggcagatgctgtcctgtcagccccagcctcagccccgcccagctgcactcatttattgtgcttactggccctggaggcatctgggttgcataagatattaattccatattttgttttctcagatgtagaaagaagtggggtgggatcacatttgcaggtcactgtcagggtgatgtgatttaccatgcctgggaaggcctctttcttccctgaaaccaggagttgactcagggctatacatttgtattgcatttccccccacttggggtattcttcccacctactcaggaaattggaacagtgcggaagtaggaagtggaagccgctggagggtggagaccgttcttttaacaaaaggcccaggaactttaggctgagctgtttcatcaggggaacctggaaacggccctgttatcaaactttcctggcaattcatgcaaagaataccaaactatgccctaaaaccatgagagggcacttggcagggactggacctgccaggtaaggggtaggggaaagcgggcagacttaagactctggattgtgaaaaagatgcgtttgctgctctcaacttttgctggcctctgccactgatccaaggcccaggatcagtagggcccagtctgaggaggacgtggaacagggcacagcattgttaggagtggaacagggcacagcgttgttaggagtggaaatgttggcccttctcccaaagtggggaggaaggtggtagcataaagtgaccgattcctactgaagccttctcacggccctgcgcactggcattttccacctgtaatgcgtggcaggagccgtggggacgccccttgcctgaggtcaccctgcttgtcagaaggcctcgacttcaccctctcatctgtctggcttctttttagagcttcacatttgctgttgggagatacttggactttgctccattcctgccttcctttttggtacctcctcctcctaggctccagtcctgtcttctacaaataccactcccagagacactgcatttcagtagaggagttctgaaaaccctcaggatctctggtggaggaatgtcagctcagtgacaagattagaaaggacattgagcagcagagtagggagtcttcctggcccccacccccaagaatgtttcacagtgcctggatttggtcagctttgggacctttttccatatccaataaaagctgattctgtctccccatgtttaccgagctgcctgagggtggggtctgtcttggtcattcactagccactaagtgcttgttgcaggaagttgtgggataggacttcctgtgttggtgctggtcagtgtctagggctcagccttgggagtcagaggtcacagtctgcgagggtgagacttgtgcgttcttagaaatggctctgttaatgtgacagtttgaaggaagctttgtggaaagaggaagtagatattttttacccagaaggctttcttctatccttggtatgtggccatttgggcctgttttacccaggtgtggtacacgaggcccctgttggatgtccttgtgtaagggatatttgagggtacttcagaagtgtacttttgggcctcaagagtcgggatgtctaacagagcctcagacyagggtcacctggggttatggttgtgtccagccagyagggcctggaggctgtgggggcttcctcagcccttagtgggcaggtaggcaggtgaggctgccaytctccaggcagtcccrctctccgctgggaggtagagggagccgagagacaccccagctctgctcagggcctcccacaagaggagggcccatgtaaccagcccctgcctcctccctctgcaggctggatcctcattgaccgctgtgggaagcactttggtacgatactcaactaccttcgagacggggcggtgcctttacccgagagccgccgggagatcgaggagctgctagcagaagccaagtactacctagtccaaggcctggtggaagagtgccaggcggccctacaagtaggcatcaccctttcttcccatatgggtggagaggcaccaagcctacctgccttcctcattttccytctctgcaaaatgggggcagtttctgtctgactgagatgttgtgagagttaatgagtttgccctggagcccgattccttcggttggagtgacccctgagaggcctccctggaacagcaggccacctaactactgtgtcactccttgcagccccatgctgttggatcttctcatgtgtacatctcaacccttcagcagagaaccccgcggtgtgaaacttggtcggtgttcgggaccaatcttagggcttactctagtcccacaagtcattgttgggagctcagcataatctctacagacagacacccctcactccttagctagacrgagcaggaccactggagtcaggtctggtgacagtaaaatcccacaaaamcaaaatgcttctagacatggccaacacccctttatttcaaacaaagttgcaacgtggcagagcatcagaagcatccctttgggttttcgtaggaatctggtctgtgtgcatgaggcccttgtttgggcctcccccacaccacatgtctgtgtctggccccgcaccggaccagtacccataatgctgcacaccacctctactctgagagtctgaactcactgcagacctaactgaatgttgcagcatttacttttttattattactacactgttgaaagtgatgcacatgcatccttcaagaagtcaaatagtgctgcaaggttaacatcaaaacaccaccatacccctcctactctccttcacccttgcagtaacctctgtgaattctttcagcagttttttctgttcacatttatgtttccacataattcgcctgtgctgctctttattgaattcccagtttttgacattatctactggcatgactatagaaactagaatttagctcacgcactgcccctacctctacccccaccaagcttaggcatacttttccttctcccattctcccagtacagttcatcacagttttggttaaattcagagtttacgtcatgacgtgtaaatacggctgacagttaagccacagagtgtacagtgattattttctttcttctataactttaagtttgccagagttagggattgcctcattgttttgttcacttggttttctaaatatatgttcctacttcagccccacgttctcagcggtctcatagtggtgtgttcagacacatcagaggttctgtttcatctttgtcttggagacatgcccctgggtctcgtttctgttagtctraggttagacctccaggactgacctcctaattctttcctcttagtgtctctggctttatccttttgttctactttctcagaagttttatttttcaccttttcaacccttctatcaaaattttcatttctgcttcgtctttctaacttccaggagccttttcttgctgtccgaatgccctgctttccacagcgtgctcatcttgtttcctaggaggccgtatctgctctcaactgtctgatgattctgtttgttttctttcttctcccttcattatctgactcctcctcttttcctgtctttgttttggttttgttctcatgttaaagaggcttttcacatgtaatctgatgatgcttggctgtctgttgaaggaatgagagactctgaaagctgtttgtgcatggaaggtccttgttgtccactgggctgcattgtgggtgataaggcagactttttcagcgggacccccaactgtcagaatctgtaagccattttgggggaagcaggtggtgttcctgaagaggaatcctctactctcctcctgcctgacgggtctaggcctggccggctgcctttggggatctggaaggggaaggagctggggttgctcatcacttagtgtgatgttcacttgtccccccgttttcagaatcgcagctcagccctgtcctctaccgtgcaaaccactgcaggaagatggccctttcttctgcctgcatggggacggagatggatttggggatcttyccagtgcttccgcccactggtttcagctttccccctctccttrgttaacgctcacctgtgacctttctaccctmaaatttttgactttttttttctggtctgctgacctcacttctcccattctttttccccttatgggtttatgcttttttttttaattcctctgcagtcatggtagtggggttttaggagcttttgattaaaacacgtttctgctgccacgtcragggtttatttttgagtggcttcctgggctgtggaaaatgtgtcatcattgttagtacttactcagcatcctggcctatcatggtcatagccaaagagcagacttactgggaaattcaactccctgtcttcccccatctagttcactggtggtgagaatcctyctctcttcccagccatgactgccccatctcccctcgccagagcytgtccagccggtcaactttaaaaatgcagtgctaggcaggcctcctaggctgaaagcatgttttgttccagcagaacaaagatacttatgagcctttctgcaaggtccctgtgatcacctcatccaaggaagaacaaaaacttatagcgacttcaaataaggtatgttggaggcacccttgtggaatttcttttgctaccagaaatgatggaggttcttctgaataacttttgaaataaaaacatgtataattgcctgagtgaggcctgataatgggttcacagtgggaagctacaggkcatcttttgtgcccctgctattkggtcatgtggtccccctctccagccagcaagctatgcttgtctgcctcttctgatgcagggcagggccccagccctatgggaagctagtagttcattgcatctgcctgccaagtaactctcttcttcttcttttaaaacaacccacagccagccgtgaagttgctctacaacagaagtaacaacaaatactcatataccaggtaaggcgtcagccgggaaagacagctccatttactaggaaaacctccactcacaccagccaggcccagctcttcttcrtaccttcagatgaggatgacccctctgtacctctctgcctggatagataagtagacagatggatacaggggtataactctgagctataattcacacatatcataaaagtcatctttctagagtgtacagttattattatattcacaatatgtggtttttatatattcacaagttgtgaggccataacsactatctaattttagaactttttcrctgcctgaaaagaaaccctctattcgttagcagtcactccccattttccctcaaccattgcttccccaaccccacagccctaggtaaccactaatctgttttctgtcttgatgaatktgcctgttctggacatttttatgtgaatggaattgcataatatatggccttttgtgaccagattccttcattcagcataatgagattacctaagaggttttcaaggtttatccatgttgtagcatgaatcaatacttcattcctttttatggcagaataatattccacagtgtagaccacattttctttacccattcatcagttgatggacatttgggttgtttgcactttttggctattgtgtgtaatgctgttatgaacattcatgcaaagtctctatgtggacttacgttttcatttctctrggaacagaattgctgggtcatgtggtaattctatgtttaatcattcgaggacctgccaaactgttttctaaagtggctgcaccattttacattcccaccagcaatatatgcaggtttctagaatgccatttggcccttgaaaacatgtggctctaactcaggaacttgagggatgcagggaggatttaatcaggttactcaagatctttaaaaagacctaggatatagagtctcccttgggcagtgccattctgctcctcttggggctcggtgaggtgctctcctccacctggtgcctgtgcccagaggctgtcactcaagcacratggttaggagcactcaggcttaggggccagggctgtcttttggggggygtgtctgccatttattaggttcagccttgagcaattacctaatttctctgatcctcactttccttcttgagtgatggagattggagtgcctttgtcatgggattattgtgaggttgaaatgaggtagtggagaaagtgggctcagtagggccctgcgtgtagaagggcccagcaaatgatggcagtttttaccagcttgtggtcaccgtatcaaatgctcttttgcagcaattctgacgacaatatgttgaaaaacattgaactgtttgataagctgtctctgcgctttaacggaagggtcctgttcataaaggatgtyattggggatgaaatctgctgctggtccttttatggtcagggccggaagattgctgaagtctgttgtacctccatcgtctatgccactgagaagaaacagaccaaggtaagagcctcgagaggacagtttggagtggctgttctgaaacacacacctatagaacttcctttcacttgagcccaatacagagggaaatgcttttaaaatgctttgcttgccttgtgattgctyatccttaaaatatttatcttttaggccctgcaaggagccaaatgtagggttcatctggcattcctttagckccctaccttgctggcttccttccaagcaygcttgactccctgactgggctggactctggggatgtgtttttatatcatcctctccaaaccagtaggcttgacctatcctttgacttctcccaccatgccgttccacaaagctggattgctctgcatagtgctgctagagatctggcccccccttaattgaatttgcctgcccttttggggcyctgcaattgggttttctgtctttttaaacttttaattcacattatacactctgtcatttctttaacgtgtctaagggaattctggctatccagtgacatgcagcaggtctgctgtgggccgacggtcatgcctcttgtcacccttgcacaggagtcttaagagcctgagcctgtaggtcacttacccaggttactattgtccctgcagcttttggggccacagttctgcatgattctgtagctgacctcgaacaaaaagcaaatgagaagaaatcatcacatcacaaagtagaaaccagagtcttttttttttttaacttattattgaaaattgaagccatacacagaattatagtgtggtgatttcccctgtgccatcrcgccacgtcaagggccatcagcttgggcactctcactcagtctgtatctactcctcctccccagcactcacaggatgaatttgacaacatattttattcctaagcattcaaaatctatcctaaaagaatagatattgttcttaaggtagccaagaagtgctaaacactgaggttctttttgctttcaaagatcccgggggcagggggtgaaccagaatcatctgcctctctctccacattggcaagacatcatgccccttttctcctgtgaactgttttttttttttcagggctgtgaattcttcctgtaattagacccccattctgtcatggtttgattttttaaaaatatacctgggctgcctctgcccttgggtagtaagaggagagtcaccatattgattaagctttaaaagattaagacttctcatttttagagcttaataaggaacaaggggatttagagaccacatggtctgatcccaactgtttctagattagcagacaggttcaggagtggcatgttcttgtgtttgtaaagctagttagtggcagagccaggatgggaagccaagggcctctttcttttctctttgttttgagagagagtgttgctctgtcacccaggcttgagtacagtgacacaatcatagctcaatgcagccttgaactcctgggctcaagtgatcctcctgcctcagcctcctgagtagctgggtccacaggtgcatgctactacacctggctcattttatttatttttgtagggactggctttcactatgttgcccaggctggtctcgacctcctggcctcaagtggtccttctaccttggcctcccaaagtgttgggattacaggcatgagccactgcacccagcccatatcactctcctctcctgtctcatctccactctgttattgagccctgctggtaagttgtgtttttgtttgrggttgttggttattgtatttgtcagttctcaagtgctcatttggtttttctgtctccttgctgagactccctrtgtttccatttgctctaagagcattggcccttacttactggaacaggttaataatagctgctgccaggtctttgtcaggtaattccaaaaccttgtgtcaccttggygctagcatctgtgagttatttcccacaggagttgagaatttcttggttcttgtgtattgagaaattttgattgtatcctaaacattttgaatattgttaaaggactccaggccttgtttaaatcctagggagaacattgatgtttttgttttagcaggcaattgacccagttgggctcaggctgcaagctctaaccagccttctgtagtttgtagttgcggtgacagtttgattttcaaagccttcaaatctgtccyagctgtgtgccatgctgtggcccgtctgtcctgggcagtatctcttgcagcattcagttctttcagtctgcgtatgcagtttaggggtagatcttgcagctgggtgtgggtctaggagttcatatacaacttcacaggctgctttctcaagctcctcttctccgcagttctctaagcttccctggagtccccttctctgatcggccagccagaaagctgggggtttggttattccccctttgccacccactttctgtaaccatgcctgtattttgggcccaggagcatgaagatagaaaaagcaaccagattctcccaatcctgctgagaccacagctcttctcatcagaaaagaaggttccttccctcagagttttgactcctgcagtctctggttgctgccacaggaatgctcaggtctgggtgcaagaaaataaagaaaaggactgagcatggtggctcacacctgtaatcccgcactttgggaggccaaagcagaaggattgcttgagtccaggagtttaagaccagcctgggcaacatagcaacacccctgtctctaccaaaaattttttaaaaaatagctgggcatggtggtgtgtgcctgtagtctaaactacttgggaggctgaggtgggagaatcatttaagcccagtagttcaagaccagcctgggcaacatagcaacacactcatctctacaaaaagttagttgggcatggtgatgcatgcctatagtctcaactacttggggaggctgaggtgggagaatcatttgagcctaggygttcaaggctgcagtgagctatgattgtgccactgcactccagcctgggtgacagagcaacactccctctcaaaacaaaaaagagaaaagaaagaggcccttggactcccgtcctggctctgcccctaaccagcttcacaaacacaagaacacgccactcctgaacctggtctgtgaatcaagaaacagttgggatcagaccatgtggtctctaaatccccttgctccttattaagctctaaaaatgagaagtcttaaaattttaaagcttaattagccagatcccatatcttttaaaaaaaaaggaaagaaaaccaggatttcctcccagcctctctgcctgttagactctgttggcctccctggccactagagaccttctggaggtcttctgtcctggtgccatttcagggtttcaggctgcatcagtgctggcagcagcaarcagtaaactcactgttgggcattactccaaattctgttgtttcccccatctgcctgccatgatttacttctgagtccacagttagctgctgtgtgcatcccattctggctttgtagtgtcagtgaggaagacggggtagagtgtgcctgctccatttttcccagaacctcygaattccaccctgaaagtggagtctagtctgatcaaatgtgtgggacctgcttatgtggccctcttcctgttcatcacaccttaaccctgaagggcaatgagcaaacacaatgatttgccaaacagcagaagggctcatgcccatttcgtgggagtccccagctggaccctgtacaaaaaactgctttagagactgctttaaggtgtggaaggacttctgtgcaaggttgcagctctgttaggagaagcatattagcastgacctaaatggccatccaagtatggttaattgcattgtcgtatttataattccttgatacagaatgatctctaggttaagttaggcacaagaggaagacatgtacaactctgtgtggtgggccaccttgtgtgttttttgaagtgtgtgaataaatatgtgtattacacatatttacatgcacagaatctttgagagggtaaaatgatgagaaactgtacctttaagaagggaaactaggggcagggagacctgtttctctgcatccccttgattttctgtgcatttagcaccacatgtaagtgttgccattgaaaatatcagtttatttaaaaataatactggtggccttcagcagaatcccaggggcctgatttagcctggcggccctgcttaaagtccaggtgttggcagagggggtgggccataacttacctgccctgtatactgtgggaacacaggtggagtttcccgaagcccggatttatgaggagaccctgaacattttgctgtatgaggcccaggatggccggggacctgacaatgcgctcctggaggccacaggcggggcggcggggcgctcccaccacctggacgaggacgaggagcgggagcggatcgagcgcgtgcggaggatccacatcaagcgccctgatgaccgggcccacctccaccagtgagcaggcaagagaccgagccgccctcctctcaccgcccccactccctgccgtgctacacccagatcctgtgcaggctgccgggccccttctgcttcccttggagcctggagatacttttgtaacaagccagatgattattttggtattgcttgacaaggcaaattgattgtcttgacccaggcgtatgacccctgtcgttgaacaagctgtgtctaagatctctacttttcatgagaatctgagactctttggagccaggctttctcggttctcagaggaaaagtatgaatgagtgtgaagtgtatgtgagaacttttgtttgcaatatttatttttgtgggtgtcgacttcctatgtgggctttttgggtgacactcccttaagggttcagtttgacaattctgagagttgtcctgcagttggaggccaccagaggtatctgagctccctgcttcctatttcataatcctccagccccagcaggtccactcctggttcctgtgtgtttggcccgggcacaatccccactgctttgctagacgtgctttctgccatgtggctttgggcctagagcttgttgataattgcagcttgtggcagtggaaatatggctgaatgagygtctaaatcgttgagaccagtgcaactttgggtgcaaggctttgtttagggatcaagccttttgccaccttgggctggtctttggcctggtgctcactgggaccccatatgtctgcgtaggagcagaactttccatggcagtaagtgtccagctctgtttctggktctttccccaactccagccccrtccagttgttctcctgattgacccgastccactccaggaaggccatctgaccctgtgacaggsatagctcataaactacccctccctgggatcccgctcctcttcagccyccttccccaygaagctgggctaactttctaagtcattttgcttagaaattcagtgtggcccataccctttgtcctcccagcctggcatccaggcagggacaccctcacaccaccagccccagggagcttccctgctataaacacagacccccttgtctttgcctctgatttttacacagtgtagagtggccagcagtgaacaggttgaggatgtgcgggtagatagataactttgggtctggtttgtgtctgtgttcatgtttgtttaagggatrtgtgtgactgtgggtggggacgtgtgcttgtggggcacaggtggcccctgctggagcccggctgggcgcagcgcctatgtaggacgggtgttctcagtgacctacctcccaggctcctctgcacctgcaaaggaacaggagtgagtcgtgactgacaggggtggttgagactagactaggtagagtagttaccaggagatgtgaatgtgcgtcaggtgatggatgggtttgtcaagggaatcgttaccgttttataccaaaggtattaacatgggcagcctttgacacatgtattccaaaaacgagtttatattttcaaacggtttttacagcttagactttgtacttactgccctgcctgtgacagttgtatgccttcattttgtatccaacagcaaagtctacaataaaactttaaaacaatcatgactgaatgtcaaaatcgtgtattgggcagatgctttttaaactgtcgtgtgagaaacttttatattaggccatttggattttattaagtgctaaggaaagagggcttacaaaatgtttcgtaaatattttatactgtttaagtgttaaacaccaaccctgtctttcttttgggttgagcttttttagaaagtcgaagtgaatgttggccaggaaaatggaaaagccattgtataaatttttttttgaggcggagtcttgctctattggccaggctggagtgtagtggcaccatctccacttaccacaacttgtgcctcctgggttcaagcgattctgctgcctcagcctcccgagtagctgggattgcaggtacccatcagcccatgcccagctaattttgtatttttagtagagatggggtttcaccatgttggccaggctggtcttgaactcctgaccctgtgatccgaccaccttggcctcccaaagtgctgggattacaggtgtgagtcaccacacctggctgcatagtgttttaaatgtttgtgtgaagaatgagtttgtggaacaatttgatttgctgtggcctctatgcctaatgagctagtgtttctggcagctctctctacccaactttgcacttgtagttttgagtctttgtctctctggaatatgaacaggtttataaaacattccatggtgaacaattctgtcggctgcattatagccatgagtgaatagacagcattggctggtccaagctctgttattgagtatacaaggaactgatttttcttatgttagcactaagggcaaaaaccaatatttataatgtaagcactatccaggtaaaacactggcccaagatttggtaaagagatttcattgcaatgtaataactacagttttttacaaattggaacagctttggtgtgtcgtaatcaagggttttktttgtttgtttgtttcaaataagccatctgattgtggtgactggggcccatgtccaagacaattcctggcatattctgtcaccctcccgtggggcgatcactgtgtggggaccccattccccagttaaagtgtgtctctgtaccttacaacagcgattcaggacccaagtgtgaacaacactcagcccgccctctggagcgtgtgctgtctttagggcyctacccaaagtcactgtaacagttaagtgtgtcattaacctttctgtctctttgcgccataaaaaaatgctcaaagttttagatgtagccactgtatgttgtacaaacgttggcgacatgtaaaataaaagtcataaaatgcttctgttttctggctcttttcaggcatgcccggcataaccaggcccctaaaatcggtttacaacaaaggcagggcccccacgttctgcctcagccccttraagtcgctccaggtggaagggaaaagacagtcatgtttctgtagtgtttgtttgaattcaaacaccaaaaggaagtcttggggtcaaaggctgcctggctcatgaaaaagtgaatcagctggtgttaccactgatttgctattatggggcagagggcttcagttcaccaaacccaatcccttgacacatgtgagttccatttatttaaagcaaaattcaaatttcacagctttaggaaatttcctttacttagtctcagaccatgcacagtaagtcatcgataggttcttggaagctgagacttgaagcaaaaccatgaggctaatggatgtaaacaagagttaaattcctacagcatgttgctgggcacaaaaacatcacccaatttctaaataaagaccaaagcacttctcatattaaactgtgaaatacatgagctacacgtatatttaattaaatcaaaaataagaccatattacctaagttttggtgaatcggtaagtgatggtggtcacagtggtggccgcatacatcagtaaataaacgcttgcaaaggtgagattatacggagcccctccccagtcacaagcgtggcaggctcgctacacgcttttgcgctgtggcatttattgtccatttgtgtgctcatatgctttatatacatttttattttacaataaaatttgtattcattcgttctccaacctgcacgttcagggttgcagatggccagagcccaatcccagcagctcagggcagaaggcgggacccaccctggacaggatgtcctcctctcacggggctcacgcacccacactcactcagactgggaccgcatagacacgccagtgcacctgacacacacaccttggggacgtgggaggaaaccagagcacccagaagaaacccagagacatggggagaacatacagactccacccagacagtggccctgcccaggaatcagatgtcttatcaacatataaygaaatgttatttgagaacttgctgtacacagtatttcatcatgtctcagggcagcttgacagaggtagagaatcttgcccaccctctaatgacacgttggactgcgcactgaacatagatcctgtcgagggtgtttagaattgcgccttcgggtgacctggggtctgcttccagaaggtgacattttaaataaggtgccatggggcagctgaggagctgggattaggctttggcctaacgcccctcagtttcttcagatgtgatctgttagtgctgcgggcctggtaccttgaagaggtagctaactggatccaatccccacttcccctgtagtttcctcagttggagcaaaaatggcgatggtagaggtcagacgtcatcctctatcaggacttcctccggactgacacctgggagagagtcacacttcggtttacagcccttccccgctccctttgcgcaaaaggaaacagttatcacctcaactgtcaccattagcaaggtgggtgtggagggcctgtgagaagccagtgccacctcccatgagacaagccagacttagaaactggctcatcgaggcctgtcagcctcttcagccagaaccagtcagggaggaagatggactccgtgtgactccagaggagagagacacagtctctggggtgtcacttttaagacagtgtgtaaactaaaaagacaccttatagtctacatccaaaatgatccttattttaacttgtccccaaaggagttcattgtgtctaggggcaattattttatatctacaaaatgattttatttttttgagatggagtctcactctatcgcccaggctggagtgtagtggtgcgatctcagctcactgcaacctccgcctcctgtgttcaagcaattctcctgcctcagcctccctgagtatctggaactataggcatgtgccaccatgctcaactaatttttgtatttttagtagagacggagttcaccatgttggccagactggtctcgaactcctgacctcaggtgatctgcccatctcggcctcccaaagtgctgggattataggcgtgagccaccgcgccgggcctgcaaaatgactttataggtaaatccacttaaatttaaatgtgtatgagacactccatgttcacagaccattttttaattaatttgtatcaaaattcttcctataatacaagatacattttaaagattcagctccctctgcttttaacatgtcgttttcagcaaaactggatcaaaacaagctccgtgtactagcagccagcgaggaccactgggaccctcagcccagcatgggcacagtcagggaaggcagcgtacttgtgtgctcaggctagacttctccctaacgtagccatggttcccaaacctctgtgcttgttagatccattttataccaaaggtattaacatgggcagcctttgacacatgtattccaaaaagcaactttatattttcttacatattttttacacatttctttcttacatatttttcttacgtttatattttcttgcatcctgaagcctaagccgcacctccaaccaattaagtctcagtatctgggtgggacacaagcgcattgatttccacgtggggggaagttatggatagttatggataactgtaataagcgtgaagcctttatccagtgaaaagttagactctgctatttgggaagtgtctcatgtcagcttctggttcactgacaaggatggttaagctttttttcttttctcattcagtgtttagatgtgtgtatctctatatcartttcttcctgtcttacagatgtagaattaggaatagagggcagaaatgaactattaatagcttatgattccagtcaatctacaggactgaaattggtagaactttaacttatattctcatctaaaacggcttacttccctcccagagacggccactcaccactgttaattgtccatttttatttttatagacttgttcttccrgtccagtgtcgaaaactattgtgccttcttttcccggactaataaaaaactgtaaacttaaaatacacaaagtgacacattactgacatactgtattttcttctctcaacctttggtctrcagaagaaattcacttattaaattctactagtttcaagatcaaattcctgttttattacagtgttttattgcatatttgaggaaaggaagaatgctgttgccacagctgggcaacttacatgtttctgtagttaccgtgagatcaaatgagcacattcagttcttcaaagggtcagttgatgtctatggaactacttccatatcacactgaaactctgaggggctgagtattccctcaggtacagcaacacaaagacaacacatttcaaagcactcaactctctctccttattccacctacaaatgtgctctggttgttaaaacttggaacagcacaggatgagggaaaagaaacagctctccaggatatcctgccttcactgacttcatttctctgaaggccaagatcccagggatgaagacggaaaaaagttacttatgggaaggggcgaggatgtaacactagaggcttctcaccccttactggtagagatggtgcttgattacgttggaagcaggaggcaagcaggagtgaaaacaatatttgcatcttccccgatctgtaatttttttttttttttgagacattgtctatctctgttgcccaggctggagtgcagtggtgtgatcttggctcattgcaacctccgcttcctgggttcaagggattctcgtgcctcaggcctcccaagtatctgggattacaagtgtgcaccaccaaacccggctaatctttgtattcttagtagaaacggggtttcaccattttggccaggctggtcttgaactcctagcctcaagttatctgctcacctcagcctcccaaagtgctgggattataggcatgagccaccacgctcggccttaataaacattttaacattgaattacttcctgagctgaagatgaagccacctaccttccttgaacaacattgacaatgttctccttcttaaccagcatgacgagtttagtaactgcttcaaacacgtgtccacactgcaaaacggcatccccctggggtggggaggagacaaggcataatttcagtattcacagcttaaagaaacagacactccaatagagaagtttcacggtggtcaacttaacattttggcagtgtattgtttctgtcttttagtagagactggtggctgtcaattaccttttgcttgctgtcctctggtgaaacatgaatgactaagattccatcactcagattgctagtggagacaccttaagacagatccagagttaggagccaagaactagagagcttgacattagtacagaggaagaagagatacgcccaggggctgcccaacaccacacttcattctcctagctgggcccagaaggatgaagggcatactttagaaatcttagcctgctagtgggctctgatcaccgtggaagcagactattgcccaacctgggtacttgagtaaagtggtgctattaatatttatgccagaataagggtgcagtccaggctgggcaacgctaggggaggagggcagatggttttgttttttgtttttttttttgagccagagtctcactttgccacccaggctggagtgtgtggcacaatcatagctcactgcagcttcgaattcccaggctcaagtgatcctcctgcctcagccttccgagtagctgagactacaggtgtgcatcactaccccggggtttatgggcaccctacacttgtgtttcccatttgggagcttcattactgggctttccagtagttgagtcaactcagtgcattgttttaaagattgcccacttcttacctttgagagctgagtactctattttctgcttgattttggcaagttccaccacgtaagctgctttctgagtaagaatgagttgccgctgccgtgctttgaagccttttctgtcatatttaatgaccgggacaccatactgcaaggggaaggtgacttcaccagggaaggtggggcagagtaccgagtttcttgctactcagacaccggtaaagtgatgtcaagcatttagaaaagctcaaacagattttgcgtgtatgtgtgtgtgtgtgtgtgtgtgtgtgtgtgtgtgtgtgtatatacacacatatatacgtacacatacatacacacatatatacgtacacatatatacacacatatatacgtacacatatacacacacatatacgtacacatatacacacacatatacgtacacatatacacacacatatacgtacacatatacacacatatacgtacacatatacacacatacgtacacatatacacacatatacgtacacatatacacacatatacgtacacatatatacacacatatacgtacacatatatacacacatacgtacacatatatacacacatacgtacacatatatacacacacacacacacacatatatatatatatatatatttttttttttttcctggctctctgcatgatggggatttggatccctagctctgcctacctgcgttgccctctgaggaagtcaaggctatggctgcctgccttgcaggtctgctctgatggtcagagatgaaaactctcacagccacagtgtaatccaatccagtcacagtggcttctattccccagggaacaaaaaaaaaagagcagacactggcacacacgatcaccagggcttcacctgctgctgcgtgccaggcagcagcctgagcacctctcgcccaccgactcattcatcctctcagtaaacccatcatcctcattcacagaagatcagaggcaccaagagcttaagtgacctgcccaggatctcacggctgctacgttcaaagcaagtgtcagtgcccaggcactatgccacactgcctctcaccaataagggggtgtttcgtgattaagttcatggctacacttcattcaattttgtaggaaagcaaaccaagacagtttctagggtgacggaggtgtcatgagaacagcagccattatctaatcatcatttgttccccatcatcttagttaatacccaaagcatcacagttgagagccccagctgcccagctgcacccctgcatttaaatagtgcgccctttatggagaaaggggaccctgctcttagactcgatgagggaatcctgtttgagactgaggacacacatcgccttacctggattttctcatggctaattagctgaagcactttcggattaatgtctccttcatctagagagggaaccagaaggccatgaatcatcactaaagtaccaatcctgtggaaaagtcattggtatctgctagttttgttatgcatctctgtgctaagatctcaggtggggaaatagccatcaggaaatgctgcagagttgagcatctgcctttgacttatttttttggagacagagtctcgctctgtctcccaggctggagtgcagtggcatgatctcggctcactgcgtcctccgcctcctgggttcaagccattctcctgcctctgcctcccgagtagttgggactacaggtggacaccaccacgccctgctaatattttgtattttagttgagatggggtttcgccatgttggccaggctggtctcgaactcctgagctcaggcaatccgcccacctcggcctcccaaagtgctgagattatgggcatgagccaccgcaccccaccctttaactccttttagaattggaaagccaagtacataggctggaaaatgtacttacctatccgactgttgacaaagggttgatttaaactttctgtgtagccgtctttccttcccctgaagatttcacttgtaactaccttttgctgcatctggtaatacacaattgaaagtataaaaatggtagccacaggcttctttgggatagaagagctctagacccattgaggtcacatcctttgctggataaactgtgggagccttgttaccctggagcatacaagtcagaacaccttcctggctttggccaaaatgccctgaaagtcatattggtagagactgggttgacgtttctgctcgttcccttactaccttcctgaaagtggattttccagagttccaagagcagtttcttgtagatcagggattgggaaaccacagcctgcaggccaaactcagcctgctgtccctttttgtaagtaacattctattgggacagagccatgccattcatgcacacattgtccatggctgctttctcactgtagcagcagagttgagtaattccaacagagaaaggccacaaaccctgaaatagttactcttctagccctttacacaaaagacccgcaggttagcacggtgaaaaacagatttccagcagaaaggggtctacattctctgctccggtggatggatggcaggagccgttgtgattgtgttcccatggtaacaaacggagccatgctgattacagtaacagctggcattcatccagggctctctgcaggtctacctgcaattatcttgaacatttcaaagcatgggactagcatgacccccgcttataggtgaaatggtggatgaggaggactgacactcaggacccactcttacacccacccccaccaccggccaccgcagacatcatgtccctaccattgctttccgctcagctgtgatcccgcggcagtacttctgcaccaggttcctcacgcacattttcctgagcagatctgatgcctgtgtggagaacacacttctttccacttgcctcactcactccctgtctggggctgtggcgatcaaaatgaagctttaaaaaaacactgctgaattcagtttgatttcaagcacagtgttaatattttatattttatagtcacagcagctaacctgatcctctcccaactttttgctgttgcttaacgaatgattctcaaacttgaatatgtttatgactcacctgcagaactggctataatgagattcctggagattctgactcagtgggtccaaagtggagcccgggactcttacaacagccccgcctctaagttccagacacagagggtcctcagatcatctcttgagggatgctattctaggaaggctacgtcaggaatagaaatgattcgaaagtactctgtcggctgggcacggtgactcgcacctgtaatcccagcactttgggaggctgaggcggacagatcatttgaggtcaggagttcgagactaacctggccaacatggcaaaactccgtctctactaaaaatacaaaaattagccaggcatggtggcgggcgcctgtaatctcagttattcaggggggctgacacaccagaatcacttgagcctaggaggcggaggttgcagtgagccaagatcgcgccactgcactctagcctgggtgacagagcaagactccatctcaaaaaaaaaaaaaaagtgctctgtttaaacaacctccagtggctttataatgctactaaggacactccagtggctttataatgctactaaggacatcgcaaattctgaggagttcaatttcttgtgcagcatccttgggaagaagggctttgccagggcagccctttcaagccaaagggaggcagcacaaagacatgcaagagttaagcttcgtcagtgcccgtgctacttacaacactggaaatcccagattagtccttacattttccaagatgccaggaggcctcagccagctcttgtccaggacagtctttggaaggtgataccggagattcaagatgtaattcttccgcacaaacacgataaattcctcgttgtcaggacagaggggtttgttgcgactgatgaatcctttaatgaacctaaaaaggaaaatgttttcttacttttctggaccatttcttcaccgagatttacattctcttcccccttctttgattcagaggcggccaaagtggtagaggctgtggagatgaccacataggccagaggccaaatctgccccacatatatgttcgatttcacccacacggccttttgttttgttttgaggagctttaattagctgccaattttaaaaagttaggaagcagggcata

SEQ ID NO: 98164 - DNA, 17281 bp, Homo sapiens
ttcccagatgagttttgtttcatgcacagtgtttaaagaataaactgtcacgctgagatgagaaatgccctctccagtttgctgcagttgcctccaatcccatttgttttacacccttccttttaacctgtgctacctgcctgactcccctaagtaacttgagttttcccctctgactcaagaggaactgtatggaacagaatttttgaagacagagaacaattaatagatgacatgccagtgtcagagcatcagtgttcgctcttcacattctcttccctccactgtttctgttatttaatgactaagagggatcagggaaaacaattcacaaataactgggcagctgggttcatttcagcaggtagcagtcaagtgccaattgtgtgccgctataacaccactgtggtctgcagcactccaaagctgtcctattttaggcattgctgcagagaaatgttccttttatttcagattgaagccaagggaacgttgaacggggaaaaggtggaacaccagaggaccacttttgttaaacagttaaaactagggaaggtgagcccacactacacaccctgttggctttgttttgaggactccgtgtatcctgcccctgaaacaactcggttctcccgatttctcttccacccgcagctccctcagtgtctctgcatccacctacagcggctgagctggtccagccacggcacgcctctgaagcggcatgagcacgtgcagttcaatgagttcctgatgatggacatttacaagtaccacctccttggacataaacctagtcaacacaaccctaaactgaacaagaacccagggcctacactggagctgcaggatgggccgggagcccccacaccaggtgtgtgcgcgcgaggagccgatgcagcaggaattttcagcacagagaaaagcagtttggcatcaccaccttctgggtcccttatgacaggagcacaaggcttgtacaatggtgcttaaactcttgagaacagcaggattgggggtggaagagggaagatttcttagaagaggttaaaattatgtagcagtgagatgtatcgtttttgaaaccatattacagatgaaaaagtacagagagaaacgcttaaaattgcagctttgccttctaatttttccgctaaatgatataatcattggctcacatcattccagtgaatttcttttttcggtcatgtcatttcctgtcagtagaggaaatgtagggaggacatgtcctggctaaagatcactgagcctcttctgggggttgaaatgccttctgtactgaattatgtatctgattccattactgccctcagctgaggtctcatttaagccgggtagctattatcgccggtcttactgataagaacatggaggctccacggggttgaatgattggtccaagggcaaacaccacacaggagaactggccctagaatgccatgttgggccattttctaaaggtgtctcatgtgacacactgagttctttagagttagacatgaggaaaacccactcacttgaagggctcacagcctgaactcaccacctgtctgctgcccccagttaggtcaggattgtctcacaccccatactttcctatttagggtcccttactccttttgttctttttatgaccacagttgcatggcccgacacctcatcatgtcagggagattgtgttttcctctttctcatcaagtcactagattaacatcgaaaagagatgaggtaggggacagactctggttcagtccttggccctggttttaaatcaaagacctctgcaccccagcttccccatctcctgggctggggtgcaggtttactaatgttgagagcatgctggctgtggttaaagatgccagcagtagggccactcgtggtggctcacacctgcaatcccagcactttgggagattgaggtgggaggattgcctgaacccagatgtttgaggctgcagtgagctgtgatcacaccactgtgctccagcctgggcaacagagcaagatcctgtctaaaacacacacaaaaaatgtcatcaggaaactacttggtacataacagcccccaaaaatgacacttgaaaggaaaagacatgtaaatatggccttaattatgttgtctacccataaacatgtatgaatgctattacacgttggtattccttagaagctgacagaattaaagcaaatagaatgcttagatcagtggttctcaacttggaggagttttgcctcccaagggacattgggcagtgtctggtaacatttttggttatcactactgggggaggggtgctactggtgtctagtgggtagaggccagggatgctgttcaacatcctctaatgcacaggacagcccccgcaacaaagaatgatccagccaaaaccatcatggtgctgctgttgagaaaccttggtttaggtcaaaagccagtaaattagctactgattaactttgatacatggcattagcaaacagggctaggaagctcaaagatcccaggctagccgtaaagctggagctagatacacttttcctatttgggattaagacagattatccctatttgagattaaggataaagggcagattattttatgaatctatataataccaaatgaaatagatttttttctttgtagcattatggggagttaactttcaaggtaatcaaaaccaggttttgtttacagagccactgctaattttcattgactcgggcctttttctcttgcagttctgaatcagccaggggcccccaaaacacagatttttatgaatggcgcctgctccccatctttattgccaacgctgtcagcgccgatgcccttccctctcccagttgttcccgactacaggtgagccaccctttacaagccccatcttagagctaccactgctcttagcttctaaaattagcttttcacagaaatgaattaaggaaaatatagatgtttatttttcattttaaggtgaagtttcacgattacacattcctatttatttttgtccaaaatggaaataacttttaaattaaaaatttttaaagtacataaaatttacatatgcatatgtatgtgtgtatatatgtgtgtatgtataaaatataaagaaaatttaaaatttcttgggataccatctagagatagccaattaaacacttagggtcatgcactctataaagttgtacatcacacatacatatagtgtacataaacacatacactcattgatacaaacatccacatatacacaatatacatatactcatagaatgtacatcttgccatgccagtaaatacagatctgtattttaatagttgtgtagcatttggtggtatggacttaccattgtattcatcccctatttaacattagcattcttttgtttttgcctataaagtctttttgttaaaattgtaaacccctgacatgtgttcgtatcattcagctcctccacatacctcttccggctgatggcagttgtcgtccaccatggagacatgcactctggacactttgtcacttaccgacggtccccaccttctgccaggaaccctctctcaactagcaatcagtggctgtgggtctccgatgacactgtccgcaaggccagcctgcaggaggtcctgtcctccagcgcctacctgctgttctacgagcgcgtcctttccaggatgcagcaccagagccaggagtgcaagtctgaagaatgactgtgccctcctgcaaggctagagctgatggcactgtctgcactgtccaggaaaaaagtaaaactgtactgttgcgtgtgcaagcggccccactagagccttccagccttctggtgtgttctaagagcaggctccacctgggagccagccccagttcacaccaaaccaggctccctgaacagtcctgttcatgtgtgtaggtggttctgttgtgttaagaaagcattcattatgtccggagtgtctttttactcatctgatacaggtaattaaaagaactcagattcttgaagccaccgttttcatattgtaatgttaggtgttctcagaggggaggtacctttgtctaatcaacgtttccacttagatcttttatttttaataagcaggcccataaaaattgttgacaagaattaatgaaattattaaaggcaacaatttagaagaaaaagtgcctttcactttcgattgcttttgtagcacgtccattgtgaaatattccttccaggctactcaaaggatagcaagagaacaggtaaatgatgcctaaagaacaccttcctttttctatgccttttctaatctttcaattctttctatggagtaaaggctcatctgccaaatctgccccctggggaaactctttcactactttgtcagttataagtgaagagcttacttgttgcttttatcttttgtatattggactgagatgtaattacactgtattataaaactctgtgaatagccagaactgagctggatctttgcaacacctgattcctctgctctgtggaaaactttttcttacacaaggatccactgtggacggttactttcatctgtttatttattgcccatgcagagctcttaaggtttacaggtgggagcttggggctgtataaaaaaataatccctgccctgagttgacacctggcttaggaaggaagggctgactatggggctgcagtctctctgaacctcagtttcctcatttgtgaagtgaagggttagatttgatgaccaccaaagttcagcccttttcacgaaaaggagaaagcagcttttgactttttaaaaaacatataactacagctggcatctagtattgtcatgttgctctaggtccatattctgaatttattcatttccaatagcctaatacaaaaagtatatattgagcactttcttcccttttcaggtaagtctctgaatgcagcccagggccaaaggaattttgatgacacagtagtacctatgttttaagctatatttttaatttagaaaaatggataccaaattcaaaccgactcatcagaggtaagatttggaatcagacctttccaaaaggtcatctgaggtaaggctaagaccgcacttcctctgctgggggtgagctggcagacacaccaaacagtgccttggcagcagctcacagtgcaggaagcccaggtgatcactcttctgctgggcccaggctgcaccctgaggactcagtaactcactctcaacagaatattctgtgcaggctctccaggctctgggcgtcagggtgcaaggggcagcttgaactgtacggtccgtcctgcactcacccgatgcagaccttgactttgatgttgaaatgaacacacttgttttacccaagtctggtggaacaaatgcccaatcatgtgaccttaaagtgtactgcaaagctgtagctttaagtaattgctgttctgccactgcttactctgaaatctaccatcaaagaaagatagagaaaaggggctgagccttggaatatatggttataagcagatctttctttggtcagagaccagggtttgagccaaggctgtaaatgtgaacaatagctgtgcaaagccttttaacctgacttcttcattttgtaaattattatgcattaagtagcagcccaataatctgatttctagttttattttcaaagtaagtagcttcttttgggaaaaacctaagttaaactagtagttttgccataataactgctgatttatgtatttgctaaaggtacttttgtatctgctgtgtattatagcaataaaataatcattttgttagaaaaaaatcacctggtgttcttttgtaatacactgatctgttacaaacatcatctttctgaattctgcattgttacataacaagccctacgctttaaacctttctgtgttccctgttggtaagggaaatgccagctccctcttagagtcgagagggaaagagaaaagagaaaaactgttaaaaatgtttttattttttagtaagcaaaattttacgaaaagtcagattcacccgtggagccagaaccttctttctcacgggwagactgtggtaccagtgygtgttggtcgggtggttcatcattagtaagctcccgtgggccagcggcagcctgaccaccgccaccctcctggaggggcttttcccaygggaatccttatgccggaagacaaagtctctgcaggcaccgaaggagacagaggcaatggggctcccaggggccagttctctttcatcatctcggtgctccccgatgtggtcacagccatctttatacctgcaatgagaaaacaaacacagtgcataaaaacaaccctctcctgaaactcaccagcaccgccagccctcgttttcctcacagtgtgaaacagcactctgcatggctgtacctgccgttgtttctgcgagggcttgaggtccacagtgggctctaagataagccaacgctgaagaggtctgttgacgtatttgttcatgtgacttatttattattatttttgagagggtctcgctctgtcacccaggctgaagtgcagtggcacaatcatagctcactgcagcctcggcctcctgggctcaagtgattctcccacttcagcctcccaagtagctgggactataggtatgcaccaccccacctagctaatttcttttcttttgcagaaacagtttcaccatgttacccaggctggtctcaaactcgggctcaagcamttcactctccttggcctcccaaagtgttgggattacaggcatgagtcaccacgyccggccagttcatgtgctttaaaactgaagacacccaaagccaaaatcacgtcttactgtagttcccctggccagtctatgtaaacctttatcacatgattttgccctgcactcaaaggccatactctgcatagcccggcccctgcccactgctgagctcatgccatccccttctttccctcattcactgctttccggccatcctgcagcatttttgcttcacagacactccagagtccctctgctctccctccagatgtctgtggctggcactctccatttagttatcagctcaaacgcactgcctcagccctcctctaaccaccccatctgaagtgaccttcccttaaacccacccagggttctccaccagggtgattctgccccaggggacaggtattgggggrtgggggacactacttgcaatctagtggatggaggccagggatctgctcaacatcctgcaaggcacaggtcagccccaacaacaacgaatgactgggcccaaaatgtctgcagtgctgccgttgagaaaccttgccctaatcgcaaacctctcagccattctcagtcaaatcggcctgtttaattttttgcaagatggttatcactgtctgaaatcgtctagggtcaggcatagtcgttcacgcctgtaatcccagcactttgggaggctgaggtgggaggatcgcttgagcctagcagtttgagaccaagcctgggcaacatagaaaaaccctgtctcaaaaaaaaaaaagaaagaaaaagagaagaagaaattatctcattcagctgtttgttcaggagttaatcacctctcacttcctactccgggatgagctccaggatccaggaagaccgagtgctggcgctattccactcttagagccccagtgtactaagaaatgatttgtaccaatgaaccaaatagggtggaaccctaaacacttccttttggaggagacagaagacttgtaacattgagtccactaaacagggtgtcacctgttgatgagcacaaagttgaaggtctgtccagtcaccccagagacgtgatcccggatgcgctctagaactgggatccagggctttggagacagcgtgaggcctgaaaatgtgtaggtcagcccagcrtcgccatacgttgcctgcttcctgggcacactgtgccacttcccgaatacctggactctggccagtgctcctgtgmagaggaaacatggcagttcctttctacctgacccccatctagaaatccagatgccccccccaacccgcactgccatcaccagaaatccagtgccccacatacatgctccctgggtattcaagattgaaagggaagtaaggaataacatttccccgtcattccatgcaatttaaacccctcttcaatcatcattttggcttgccccaaattttctttttgttttgttttctttgagacagggtctccctgtrtcacccaggctggagtacagtagcacaatctcagcgcacttcaacctccacctcccgtgctccagcaatcctcccgcatcagcctcctgaatagctgggaccacaggggcgtgccaccatgcctggctaacttttttgtaagctcactgcaacctccacctccagggctccagcagccctcctgcctcagcctcctgagtagctgggaccacaggggcatgccaccatgcccggctaactttttttgtatttttttgtaagacacagggttttatcatgttgcctagactggtcttgaactcctgggctcaagtggtccgcccacctcagtctcccaaagtctgggattataggtgtgcaccactgcaccaagccaactgccccaaatgttcatgtaagaacagtgactcttgttctacaaggagagaaacatggtcctgggccatttttttagtgaacactgtaacttaactgccttaactacagtaagggcagaataaagaggctgaaattggaacacgataaagttagtttacaggctaggatagcttgtcaactgtagggactaagggcatgtgaccccatgaaagatggggctcacactgctggggtctcttgtgggcatttctttttttaaagagatggtgagccaggcgcgctggctcatgcttgcaatcccagcactttgggaggccaaggcgaggatcactcaaggccaggagttcaattaacagcctgggtaacacagtgagacctacagataatttaaaaattatccaggcttggtggtgtacatctgtggtcccagttacttaggatgctgaggtgggagaatcacttgagcccaggcggacgaggctgcagtgagccaagatcgtgcccctgccctccagcctaggtgacagagcgagaccctgtctcaaagcataaaagaataaagtgacgagggggtctcactatgttgcccaggctggacttgaactcctggcctcaagtgatcctcctgcctcagcctccagagtagctgggattacaggtgtgtaccaccgtgcctggcctgtgggctttcgttttttgttttgttttgttttgagacacagtctcactctgttgcccaggctggagtgcagtggtgcgatctcggctcactgcaacctctgcctcccggtttcaagtgattgtcctgcctcagcctctcaagtagctgggactacaggcatgcaccactacgcacagctcattttttgttgttgttgttgtattttagtagagatagggtttcaccatattggccaagctggtctcgaactcctgacctcaagtgattcgcccgtctcgggctcccaaagtgctgggattacaggcgcgagccaccacgcctagcttcctgtgggcttttctatgcctctctgccagatccttgtgtcctcattacaggatagaggtgtggttctcaacatgtgctccccagaccagcagcacctggactctccttagaaactaaactaaaccacaggggtagggtccagcaatccaagtcctgccaacagcaagtccaccaggtgatgctgagaaccactggtgtggagaaattacctggttatttgccatctctcctatgagaccagtgattctcaaaccctgactgcccatgagaatcacctggaagctttttaaacaaacaagtggtcagcctgcactcggagcgattctgattgaagtgctctgcagtagaacccagcacgtttttttactttgttttgtaaactttcccagaagatactcatcagtagccaaggagagattcactcgagtcatctgtcagctcctagtagacaggcaatccagtttctttcaagtttatgtcccaagcacctaaggggcttagcccagaggtgctcagagaatattggatgaatccattagtgaacccatcagtaaataatggatcctgagttcagatttctccaaacatacgatcattaattgcaccaaacaagccctcaatgcacacacacacacacacacacacccctctgcttacctgtaaaatattctacttctttctccaactcttggaaaatctcatctgcctcagctttgccaaacaggactgtgtaactgcagtccaggccctcagcccgaatgtgccgccagctagggcctgctgagtggcctccattccctggggcctctctcctgrgcctcttccttgtgctttctttgtctcctcccaacacagctggctcttctccagttggctcttgctcctcctgcttcctcaaaaggcccccttgagcccctttcaccaggaatctgtccatcctgtccccacaggaaagaagggacgtcagtggcgaggccaagacagaaattgctcaagttctatccccagtgcaaaaatctgtttgtccaaggggtctcacagcaacattcctagtttcacatttycattttaaagtttaaaaccatgtcctagaaaggaaacagaagatgttaaagccggaagggaccctagggacaatctgatccagggtctcccacgtccacctgtgcatcagaatcagctggctagcttgcaaaaacccagaggtctgcactccacgcctgagcacctgaatttttaaagaactacctcctgggaattcgcacgccacagctaaacttagaaactacaatccaaaccctcattttgcagaaggggaaactgttgcccacagaggcgaagaggtttgcccaaagtcaactgtccacccctttaaggaggaaggacccataactgacctcgctgccccccaccagtgttaaaatagatcagtctagtgatgctcaagtggayacgattcagaagcgagacgcaaagaggttaaacacgggtaaaccgcacgcaaaattctgatatcactgcaacacgtccgtggggtgggggtggcaagagtgctctagcatcgcagctccggcgcagatcggaatcccgcagtcaccctggtggcctcgtggtgggaaagacgcgccccagcgaatcggtcgcgtcacttccggagcacgctgggaactacggcaggctagggcgcaaagagagcagccgggcggccctctggtgccacctgctggcctcccgtgtgtggcaagcactgccgctttcccgttgatcacctgttgggccactgtcgagaatcacggctggggtgagaactgtggcttggcgtcacttctcagtgagggttactttggtgtccggaaagggcgttgggccaccagtatattgtcacgagtgggagcaggagttctgcagtcggatatcgtggattctgtttctgtctcctccgccctggctgtgtggcctcccacaggtcacttaacctctctggggttaagttgcctcatctgtgaagtggggactacagcacctatgtcatgagagcgcctgaggagatgacaggatgcatgagaaatgctctgtcctctaaataaatgttggttccattattgctcgtttttctttgttttcttgttttttgatgttgttcttgtttgttttgtttttttgagacaggatctcactctgttgcccaagctggaatgcaatggcatgatcatagctcactgcagccttgaactcctgggttagagcgatcctcccgtctcagcctctggagtagctgggactacaggcacatcccaccccaccctaaataatttttttattatttttagtagagatagggccttgctatgttgcccaggctggtctcaagctcctgggctcaagtgatcctcccacctgggcctcccaaattgttgggattacaggcgtgagccaccacgaccggctcctaatttttatttactctgtctcccctcaatggaacgaaagctccatgagatcagaggctttgttttgacagatttcaacaaatgtacaatattgtatgatcaccaccacaatcaagatctaagacagttccgtccctccataaaactgctccagcctcttaatcaacttcgcccatcacccagcatcagcaaccactgatctgtcttctctccctatagttttgccttttccagaatttcatatacagggaattgccgtggtttgaatatctgttcctccaaaatccgcgttgaaatttaatcctcagtgtggcagtattgagaggtggggccttgaagaggcgattgggacatgagagctctgtcataatgtcctcataaatgaattaatagattaatgggctcaggggttaatgggttaatgggttaccgtgggagtgggactggtggctttataaaaggaagaagagagacctgagctagcacactcaggcccctcgcgatgtgatgccctacacggcttcaggactcaacagagtccccaccagcaagagggttttcaccagatgcagcccctcaacctcggacctctcagcctctatgagaaatgcctttgtgggacttctttcacttaagcatattgcttttaagattcatttatgcgcccccccacctccccgcttttttttgtgagacaaggtctggctctactgcctaagctggagtgcagttgcatgatctcggctcactgcaacctccacttcccaggctccactcccacctcagcctcccaagtagctgggactacaggcatgcaccactacacccggctaatttttgtattttttgtagagatgggtttttgccatgttgcccaggctggtctccatagtcttcagctggtgagctgaagaaatccgcctgccttggcctcccaaagtgctggaattgcagtcatgagccgctgtgcccagtcgtatatgcacatttgtattacttatttgttcctttttattactggtatagaagggatgccccacaggagtaggccccacatagggttgtttctctgattttaggttactatgagtaaaatcactataaacattcacatacaagctttgtgaatatagtttttcatttcccttgggtaaatgcctaggtgtgggagtgctgggtcatagtggctctaagggcaaatgattttcagctttgagcctctctcccttagacttcagcttcttgtcctaggcactgggacacaccagcaacaagaagcagcaagttcctttcttcactcaggttacattttggggatggagacagaaacacacaaggaaagaataaataatatgctgtctctaaagaaattgtgtaaaaagaaaaaataaataagatgcttttgtatagtatagcagttatagagcaatgggctagaaagtggggcaggaggagaagtccttttcagggaaagatcctgagctgagacctgaggctttccaggcaaggggacggtgaatgcaagggtgtgcaggccacagggggacaagctgggtgtgtccagcaattgtgctgggagctggactcagtagtgggggcttccatcagagaggaggcagcactgagacctgggtaggaagctggggtttattctaagcctttttgaaaaccaaagaagggttttaacctaaggattgtcttttttttctttttcttttttttgtttgtagacagggtcttgctctgtcacccaggctggagtgcagtggcacaatctcagctcactgcaacctccgcctcccgggttcaagtgattctcctgcctcagcctcctgagtagctgggattgcaaatgcatgccaccacgcctggctaatttttgtatttttagtagagacggggtttcaccatgtttgccaggctggtctcgaactcctgtgctcaagcgatacgcccctccttggcctcccaaagtgttgggattacaggcgtgagccaccgagctgggccaggccccaggtattgtcatgatgtaaaaatctctctctagaaaagagaacaccagcttcccagctggtcttctgtagctaggagatgcaagagcagcagttgaatttgaggtttgctttggagaaagaaccaaaagcagatatggatggtttggatgtgagggagggaaagagaatcctaagtgtattagtagtggtgggaggaggttcggtacagtggtgtcatttggaagacaaatcgttggtgtttaacctctatgacccgaaagtctcccacaagcctgatacattaggcaaaatgtttgactgcactaagccttagtttatcgtcataaaataggccatgaaaattgcgtgagaaaatgtatataacagttcaacaaataatattggctgggtgtggtggctcatgcctgtaatcccagcactttgggaggccaaggtgggcagatcgcctgaggtcaggagttcgagaccagactggccaacatggtgagatcccccatctctactaaaaaaatacaaaacacacttgggcaaacatggtgaaaccccatttctactaaaaatagaaaaattagccaggcgtggtggcgcgcgcctataatcctagctgaggcacgagaatcgcttgaatccgggaggcggaggttgcagtgggctgagatcacaccactgcattccagcctgggcgacagagcaagactctgtctcaaaaacaaaatacacacacaaaatataatagtatttgtttgtttgtttgtttttgagatgcctcggattacagtgcggggattacagacgtgagccatcaagcccggacaatattattatattgttcattgcactcccacaacacccctaaggggcaggaacttttcttcccagccccctccccccgaccccaccgagagacagggtctcgctctgtcgcccaggcctggagtgcattggcgcgatcaaagctcactacagctcagaccctctggcctcaagcgatcctccagcctgggcctcccaaagcgctaggattacaggcgtgggccaccgcgcctgaccagtcttctcttcttgcagctgagccttaagagcctgtccaaagagcagaggtgggctgaaggcacaaagcgaatgaaagaataggcccccgggcaccgttgcacgccccacctcctcccaggggcgttgcactccagcccctcccgcacatgcgcactgggccttccaccgccccccgcccccagcaaagccccccgctcggagcatgcgcgggccgcttggcgccaattgctgaccgccacagccacagccagggctagcctcgccggttcccgggtggcgcgcgttcgctgcctcctcagctccaggatgatcggccagaagacgctctactcctttttctcccccagccccgccaggaagcgacacgcccccagccccgagccggccgtccaggggaccggcgtggctggggtgcctgaggaaagcggagatgcggcggtgaggcgcggcttgggccggggctagggggtgaagggggaggaaggcggtgggccccgcctgacggagggcgtgcaggatcgcgcctctgactcggtaaacccgggctccgctttccaaatagcctccacgtgttcaaaatagccgccgctgtcccccatgggccgccatgctaaagggccagccaatgggaacgcgtctcggggcccatggcgccaatccgcgcgccgcaggccctcctggctcggtgcgctgtccaatcagaggggagagggggcgggacccagagggaggttttttgccgcgaaaagaccacgtggggacgcggtggggcgggtctggcgggggcggggcacctctgtgcagggttcccagtcaccgcgacgctcctcgggaagccatagggcgcctcccagcccgtctccccgctccagtttagaacctaattcccaattcccggaccgggcccagccctgggctcttactgtccgcttttgctgggacctgttccacaaatgggcgtcttctgccttgggccgtgggggttgggccggaagctgcggacgcctgggaaggggccgctgcagctcttgagccgcctctgcggggaccacttgcaggccatcccagccaagaaggccccggctgggcaggaggagcctgggacgccgccctcctcgccgctgagtgccgagcagttggaccggatccagaggaacaaggccgcggccctgctcagactcgcggcccgcaacgtgcccgtgggctttggagagagctggaagaagcacctcagcggggagttcgggaaaccgtattttatcaaggtaaatatggaaatgcaccttccataagggtaaatgtggaggctgccggcccttttgtcttgttagtgtagccggccaagttcatgtttccgtaggcttaggttgtacccccttcaacctcctttactcacaaagggggtaaaagaaagccatgatgtttcactctgcagctttatattggttaaagttgttaacgacccgcgagatgatatcatggattcatttaagtcacatagtctattgtccaggaaaggctggcgtagtaaaatcaccaaccatcctgaatgaaacctggcttgagctttaaaaagccgagaggagtggcactgtcaggacccagcccagagaaagaggcaaggaattgacctgattgaaccacttaggtgggggggcaggcactgtttttgtttgttgttttttaaaagaatttggacataacatgacaaagaactaatgatgttccaaataacttgcactagaagctttcttattgaattcttatggtttccaatgagaatctgattttaagtctagtttatctttaaatcagctaatgggatttgttgcagaagaaagaaagcattacactgtttatccacccccacaccaagtcttcacctggacccagatgtgtgacataaaagatgtaagtacaacttgttgataatttttattggggagaaggagtcaaatagtatttttaaattagggacactggagttaagccacagtccatcattcagtagtaaataaaacactgaaatcccgaggtttggctgactgtatttcagcctgtatttactctttttaatgtttaccacgtggtatttat

SEQ ID NO: 98165 - DNA, 45093 bp, Homo sapiens
  misc_feature (1)...(45093): n = A,T,C or G
ctttctttctctccctccctctctccctcccctcccctgccctcccctccctccctccctcccttctttccttccttccttcgttccttccttctttccttccttccttcctctctttctttctctttcttctgaaacagtgttttgctgtgctgcccagggtggagtgcagtggcgcaaccatggctcactgcagacttgacctcgcaggcccaagtgatcctcttacttcagccttctgagaggctgagactacaggtgcatgccacaatactggctgatttttttttttttttttttttttttggtacagacaagatctcactatgttgcccagattggtctcaagttactgacctcaagcaatcctcctgcctcagcctcccaaagttctgggattacaggtgtgagccactgcgtccagcctacactcattgtttctggggtgtcattgtccctggtgtcactcagtggacagagccaggaatgacatagatatgtttccagattttgacatatcaatatgaaaagtcatgagttcctactgatacctctaaatccagcctaatatcacagtattcttcctgggcttgtagctttccatgtttgtatttttcttttcctatggtgatacacctggatcccaaatcagcactatatttattaatttgcttaatcctaaaatacaagagaatggtttcaaacttgttatactactgtgaaaaaaacaaacctatgacataaaatttaagattcaggctgggcatggtggctcacacctatatcccagaacattgggaggctgaggcaggcagatcacttgaggtcaggagttcaagaccagcctggctaacatgatgaaacctcatctctaccaaaaatacaaaattagtggtgggcacctgtaatcccagctacttgggaggctgaggcaggagaattgcttgaactcaggaggcggaggttgcagtgagccgagatcgcaccactgcacttcagcctgggcgacagagtgagactccatctcaaaaaaaaaaaaaaaagaatttaagattcagttgtccttccttcctccctctctccctccttccttctcttcttccctccctccctccactcctccctccctccctctctccctccttccttcccttctttcctccctccctccctccactcttccctccctccctctcttcctaccttagattgaaggtatgcagttgaagaactgtgttaaaagttacttggggccagacgcagtggctcacacctgtaatcccagccgagatcagtcttaaaaaaaaaaaaaggtagttgggttacttctccccagacccccattccttttagtgtgcttatgtttatttaaatacagtcaggattatttgtttctctttgtgttcatctttaggggttttctccattctattgagttgaatggatttttttgtttgtttgttttcagagacagggtctcactatgttgcccaggctggtcttgaactcctgggctcaagtgatcctctcacctcagactcccaaagtgctgagattacaggcatgagccactgtgcccagcctcttcattctcttttttttttttttttttttttgagatggagtctcactctgtcacctgggctggagtgcattggtgtgatcttggctcactgcaacttccgccttctgggttcaagtgatcctcctgcctcagcctcccgagtagctgggactacaggcgcctgccacgatgcctggctaatttttgtatttttagtagaaatggggtttcctcatattggccaggctgatcttgaactcctgaccttgtaatccacccgcctcggcctcccaaagtgctgtgattacaggcgtgagccactgcacccggcctcattcttttttatagctgcatagtattccatttcccagctgttgtgtggtttatttaatgaagcttctatgtatgggcttgaaagtgtttccaacagtttaaaattacaaacaatgctgcaataaataaccttatggataaatacttagaggtgggattgctgggtcagaggtagatgcccttggtgttttgttagacattactcttcctgtcttttgcatacccactagcaacgtgcatgtgcctgtttctccaggctcaccaacagggtatgttgtcaagcttctaaactttttttttttaatctcatagaaagaaatgatatctcagtgtagtttatttaaagtttttttttttgtttttttttttgagagggagtcttgctctgtcacccaggctggagtgcagtggtgcgatctcagctcactgcaacctccgcccccggggttcaagcgattctcctacctcagcctcccgagtagctgggattacaggcatgctgtaatttttttttgtatttttagtagagacggggtttcaccatcttggccaggctggtcttgaactcctgacctcatgatccacccgcctcggcctcccaaagtgctgggattacaggcgtgagccactgtgtccggccctaaagtttttgtttttgaaaacatgtactctttatctagtttctcccagtgataacaacttatgtaaccagagtataaatatcaaaatcaggaaattgactttgatatggaactttttttttaacttttaaaaattttttgagacagggtctcactctgttacctaggctggagtgcagtgatacaatctcagctcactgcaacctccgcctcccaggttcaagcaattctcgtgcctcagcctcccgagtagctgagattacaggcgtgtgccaccatgcccagataaattttttttggatttttagtagagatggggtttcaccatcttgctcaggctgctcttgaactcctgagctcaagcgatcctcccaccatggcctcccaaagtgcagggattacaggcatgagcccccgaacccggcctgatatggtactttaaattacaaatcccagcactttgggaggccatggtgggaggatcgcttgagcccaggagtttgagaccagtcaagcaacaaagtaagactccatctcttcaaaaactcaaaaaaattaaccaggtgtggtggtgcatgcctgtagcccagctacctaggagacttaggtgagagaatcacttgagcctgaaagattgaggctacagtgagctatgattgcaccactgcatcccagcctggacgacaaagtgagaccctgtctcaaacccaagaaaacaaaaatcaaaaaactaaattacagaccttatttcagcagtctttacatgcactctattttcactgtatatttcttacttcttctccttctccttcttctggacagagtctcactctgtcgcccaggctggaatgcagtggcatgatctcggttcactgcaacctccacctcccaggttcaagcgaatttcctgcctcagcctccccagcagctgggaccacaggcacatgccaccacccggctaattattttgtatttttagtagagatggggtttcacaatgttggtcaggctggtcttgaacccctgacctcacgtgatctgcctgcctcggcttcccaaagtgctgggattacagacatgagccactgcacctggcctcttcttttttgaatggttaagtatagagtttgttttcacccgaagattgaggttgggcacttaggagcatcgcttcatgttaccctgaatgtaccattcagggtatacgctctctcaccatatatttctctgaatgtttattttcagtgtagctttaatttgcatttctcctatagtgaatgaagcaagcatttttcataaatataatggtcacttctacatctttgttcatgaattatttgctgatgctttttgcccatgttttctgtctggttttcacattttccttctcaaaccttttctttctttctttctttctttctttctttctttcttccttccttccttccttccttccttccttccttcctttcttccttcccttccttccctttccctccctccctcccttccttccttccttttctctctctttctctctctctctctctctttcctttttgacaacttcttgctctgttgcccaggctgtagtgcaactcactgtagcctcgacttcctaggctcaagcaatcctcccccctcggcctcccagtagctgggactgaggcagaaattaaaataataataataataagtactacatatattcactccaagagaagtaagagctaaggcccagaatgtggcaaggcaagggttaaaaaagaagaagaacaagttttcctctgcttagcagctcacttcaaggacagttataagataacgctgtccgaaaagccaaggccagaggactgggctccagaccccgccctccaccccaccgcccgcctccagagcaaggttgaaggaaaaaaaagagagaaagacaaattattttattgctattcctttccttggtctcttaagcatgactatgttttacaaacctctctatttagccagttcttgttttacttttgatgcagctacaaggccaccagctatgcaaggccacaagttatgcactatatgattaactacttttgttttacctttctaagcttgcttataaaaaccccacaatatctttgttctaggctcagctttttggatgtgaatccactgagccagtgcgtacgttgaaataaacatcctcctgttctctcatattggtctctccgttcctcagtttcccacaacaggactacaggtgtgcaccaccaagctcagctaatttttatattttatagagacagagtcttgccaggtttcctaggctggtctcaaactcctgggctcaagcattcctcccaccttggccacccaaagtgctgtgattacaggcatgaaccactcacctggccttccctctcaaattttaagagttcctgatatattatatgatatatgttgagatatatatacatatatatatgtaatgtatatatatgatatatgttgcaaatagtttctcctggtctgtcagatgtcttttgactttgcttattgagttttttgacatgaaaaagttaaaaaatttatacagtcaaatgcattaatcttttattgcatctaggtttttttttttttttttttcttttgagacaaggtctcattctggttgctcaggctggagtgcagtggtgcaatctcgactctctgcagcctcgaccttccgggctcaggtgattttcctacctcagtctcccgagtagctgggactataggcgcgcctcactgcgtccggctacttttttgtatttttagtagagacgggggtttcaccatgttgcccaggctggnnnnnnnnnnnnnnnnnnnnnnnaaaaaactttttcccaccacatgaaaaacggtatttgagggacaatgggaaaacgttggaataaagactgcattagataactgtattaaataaatggcaaataccattaaataaatctggccgggcgcggtggctcacccctgtaatcccagcactttgggaggctgaggcaggcggatcacctgaggtcaggagttcaagaccagcctggccaacatggcgaaaccccgtctgtactgaaattacataaatcagctgggcgtggtggtgcgcgcctgtaatcccacctactcaggaggatgaggcaggagaatcgcttgaacccgggaggcggaggtggcaatgagccgagatcgcgtcactgcactccagtctgggcgacatatggaggttttgtcttgtctcaaaaaaaaaaaaaaaaaaacttggggaagtgtgctaaaccgggtttgcgtaggtggaaggggcggccgggctctttaaggtgggtcccgccccgtaggcctcccctcgcgccagcccctcccatcccggaaaggctcagcccaagcccggccccgcccgccctcggccccgcccatggcagagcgcagtcacgtgacccgggctgcggggcgcagcattgygcggtcatggtgggccagatgtactgctaccccggcagccacctggcccgggcgctgacgcgggcgctggcgctggccctggtgctggccctgctggtcgggccgttcctgagcggcctggcgggggcgatcccagcgccggggggccgctgggcgcgcgatgggccggtccctccagcctcccgcagccgctcggtgctcctggacgtctcggcgggccagctgcttatggtggacggacgccaccctgacgccgtggcctgggccaacctcaccaacgccatccgcgagactgggtaagggttggcttatccccacgcggggccatcgggggagggggatgcgtgggcgccggacctcgcctgttcccgggaccggcctcttgccgggtgggaacgcccgtttctctgggggtcagctactcccgaggctgcagcaccgccctgcgggccaagtmccctgtttgggagckggctactgcggcatccctcacctcatggggccagtcccttgccttcagccagtggtgacagtacttctgtccccaagaagccagttccctaccaccgaggccgcagtgcctgcatctggatcaggtccatggctggtgggtaaattctatcctcacggggacctgctcccttccctagactttgcctcctcaccccatggaggccagccccctgtccccaggcctgaggggtgatgagaactcagcaggagactaattcttacctgcttggctgtggcttgctcgtgggtgccagcaccctgcctcccttccagtgccaggtcagcaggactgaacctgggttccaggctagtccaaaagcagagggtccctaaagtcacatagacccatttagtatcctgctagggctctgctcctcccttgtcttctgtgtcctggtccaaggggaagtccttggctggatgccgtgtttggcagccatgctcaccatctttattgctggaacccaggctgtcattctgatgtgtgagtctcacctaactcctccgcctgtctgggctcccgtttccccatctgtggcccagattttgaggatgtgctctagttgggtggtcatgtgctgcaagttctgtacaagggcttgtgcccattcatttattcattaccctgatggttggccttagggacacagctgagcagctgtctctactcagtgggaaacacagacagcgatagaagagaaatcagagtcagtgggagtgggaaggatcagcttcaaagccttgtcagcagggcccagacgctggatcaggctgtgctgggggatcctagggaacccggggtgcatccgtcatatcctagtgtccagatgatgctagggaaccctagcactaggatgtgcccaggatgtggtctgtgctcagaccacactgccccctgcagcagaaagggcctcctcccactttagcccctatccattttactggcatccattggcttctgcaggtgttagggagacacaggatgccgaggacacccccattctggtggcacttggggggtacatcaagtagacgtgagatttgggggagatatttgcacagacacaggggcactggttggggtaaatctgggaaggctcccagagagaggaggccacagagtgagctggcatctgtggagggaactgaagctttgtggctggcctcgggggctgccgggactcttggatctggtgacccgttctttgctgactcactcatgtttttggccctgcatagcagaatcaagaggacatgacagaactgttcaggcgaggaggggcaggagcgaggcccagcatggggagggggctttggcctytggaggcccctcctgggctgtgttgctcttgactatggtaaacatggaagtggagagaaggcttccttgattgtgctggatggaaagttcttccaggctcagcccctctgctgtgtgaccttgggcaaatcccttcacctctctgagcatgttccctcatatcaaggtaggrccaaaagggtcatggaaattcactggggtcacagaaagcactgtttatttatttttatttgtattttattttttgagacacagtttcactccgttgcccagctggagtgcaggggcacgatattggctcactgcaacctccccaccctgggttcaagcgattctcgtgtctcagcctcccaagtagctggaattacaggtgtgtgccaccatgcccggctaatttttgtattattagtagagatggggtttcaccatgttggccaggctggtctcaaactcctgacttcaggtgatctgcccatctyggactttctggcttgttttcggcaccctctctcatcccctcctcttacgctcacatgcccctttccctttgagtttgccagcccttgaggctctgatgcagggaaaaccataaagcgagccccattttataggcaggaaactgaggtcctcagagacagctgcttgaggactcagggtcagatgaaagaaagccatagggggtgtcctggctcctgatcagcagaatctctgatctgtgggggactctgtgtcttatttcggagggtgggggcagggatttgatgcctctgttcactcagaattaggatcctcctccttcctggtgaaatccccagattttgccactggggatcctgggattatcaggataaattctccctacaccataatccttcgtcttttttattttttaaaaaaggtttttttttttttgttttttttttttttttgagacagggtctccctgtgttatccaggctcgagtgcagtggtatgatcatggctcactgcagccttgaactcccaggctcaagaaatcctccgacctcggcctcccaagtagctgggactatagatacgcacccccatgcctggctaatttttaaattctttttttttgtagaaacaggggtcttgtcatgttgcccaggctggtcttgaactcctgggctcaagtgatcctctcaccttagcatccccaaatgttgggattacagatgtgagccactgtgctcggtaccttctttcagttgtgccatatcttgactttgggccaacacccccacacagcctggaaacatttatgatttggtgcttggagatcagagatgtcactaggagcagagcctgcctcagtctagctctggccttggtcctggggaagctgtatcctccaaccttactttgtcttccttccctgatctgatcccactgaccagcaccttatcgacgaggttgcttaaagtaaatcaccatcccgttgagagaggaagtgaatcaaagttagagggaattaacaaatttagtaaacggggaagcatcccaaatccaccaaccaacaggcaaaaacagcccagtaaaatggataaataaggcccagctgtttctttgaacaatcacaggagatgaatctataccatcaagaatgagaaaggaggacaggcgctgtagctcatgcctgtaatcccaatgttttgggagaccraggcaggaggatggcgaggggccaggatttcgagaccagcttgggcaatgtggtgaaaccctgtctctgcaaaaaaaaagtaaaaaattagctgggtgtggttgcgcatgcctgtggtcccagctactcgtttgagcctgggaagtcgaggctgcagtcagctgtgattgtgccactgcactccagcctgggcaacagagtgagaccctgtctcaaataaaaaaaaaaaaaggctgagataggagtgatagacacagttatggggggcatcccacataatggagagcatccaaggccatactagactgcggaagtggggtgctgatatttgtgagatatttgtggccccctgctcatatcagtggtctgactttttccaatgtggcctctttcaagaggcaccttgattagactcttgagtcatcttagagacattagctgcccctggcatgaaattgcaatttggcccatagattttccaggaaaaaaaaaaaaagattgaggaaacagacctactgctgccaacttttaatttttgtcaagcaagtgcattaaaaacaaaggagagcaatatttgtcaacccctgtcagcgtttatctcataaaagattggcaattttagagcaaacaagcagaaaggacatactctctgaataaggagtaatcttcttttgatttattttttttttttgagatagagtctgctctgttacccaggctggagtgcagtggcatgatcttggctcattgcaacctccgcctcctgggttcaagtgatcttcctgcctcagcctccctagtagctgggattacaggtgtgagccactatacccagctaattttttttttttttttgtaattttaatagagatggggtttcaccaygttggccaggctggtcttgaactccygacgtcaggtgatctgcccacctcagcctcccaaagtgctgggattacaggtgtgagctattgtgcctggccgaagagtagtctttaataagcacatctagttatagacacactctaaagtgtttttctggccgggcgctgtggcttgtgcctgtaatgccagcactttgggaggccgaggcaggaggattgcttgagcccaggagtttgagaccagcctgggcaacatggtgagaccctatctctgcaaaaaatataaaaractagctgggcacggtggtgcgtgcctgtagttccagctactcagaagctgagacgggaggactgcttgagtccaggtgaggctacactgagctgtgatcacgccagtgcactccagcctgggtgacagagtgagaccctatctcaaacaaaacaaaacaaaacaaatttctagcagtttagaaagaggggatgggatatgggaagtaaaagcctccccctaccattcttcctagatataaacatttttagctttttttttttttttttttgaggtggagtctcgccctgttgcccaggctggagtcagtggcgcgatttcgggtcgctgcaagctccgcctcccgggttcacgccattctcctgcctcagcctcccgagtagctgggactacaggtgcccgcccccacgcccggctaattttttgtatttttagtagagacggggtttcaccatgttagccaagatggtctcgatctcctgacctcatgatccacccgcctcagcctcccagagtgttgggattacaggcgtgagccactgcacccggacttttagctctttcttccagaattttctatgcataaagaggcctaaaccttcttgcatacatataaatgtagaggcatatgtggtgtgtgatgcatttacacaggggcttagttcgtgcctaccatttggacttctcgacttttttttgaacttcatctctgacctctttgctcatcagcacatgcagtccgctatggcatgtgtgattattgtatcaggcccctaatgatgggtgtttcgggaaggcccgtcttttctggctttgaagagaagtcctgctgtgaagaagggcctttatgcccatctctgcagggctgtatgagcatccggccagggaatgggttcctaaccactgcccgtctccggggcctcagtgccgaggccttggctgagcccacccttgctagaaggggyagctctcaccaggtgtgccctggaggaggccactggccgctcagttactactggggctcgcggctgcacagcttttttggttttacgcagtttgtccgaggtctcctttgatccactgccagcttttatcacraggggatctgcatattgggccctgttataatcttcctcccatcatcacactcgccgggtctcctcaaactcctaccccctcagattctttttttttttttaatgagacagcatcttgctctattgtctggactggagtacagtggtgtgatcatagctcactgcagcctgggctcaagcgatcctcccatcttagccccagcctcctgtgactataggcaagcaccaccacacctggttaatttattttgtattttttgtagagaggggagtctcgctttattgtccaggctggtctcttactcctggtctcaagtgatcctcccacctcagcctcccaaagcactggggttacaggcatgagccactgcgccatctcctctcagattcttgatgagacaaatacttagtgagtgcataatgtgtgttctctcctggcacatgccacagcagtcctctgaagggggagtcactctgcccattttacagatgagaaaaccgaggccccgagaggtaaagcagtttgcccaaaggtacacaaccagtaagggatctacccagggattcagaccaagtcggagggacccacaagcccaaactctttgtcttccattctccttgaaatttaaaaatctaattttttccccttgttttttcctctgtccttatctgtgatgctatgtgaataattagcccgaagttcatggctgtcatctgcatttgataagaactatacctccttgcccccaacactcccccacaaacctgagttgagttagaggcgcagagcattcactcaagaatgttagtctcagctctgctgctcacctgctgtgtgaccttgggcaaatcacttcatctaactgtattatgtgggagcctcggttccccacatctgtaaaatgggaagaataaaacccatgtcatacggttgttggaagaattttttttttttttttgacagagtctcattctgtcaccccggctggagtatagtggcacaatcttagcttactgtaacctcccgggttcaagcgattcatgcctcagtcaccagagtagctgggactacaggcacgcaccactacacccagctaatttttgtagttttagtagagacgaggtttcaccatgttagccaggctggtctcaaactcctgacctcaagtgatcgccctcctcagcttcccaaagtgctgggattacaggcgtgagccaccgagccctggccatttttggaagaatttagagttacataaaaatgtaagtacttaccacagtttctggggctactgtaattccctgtatcaaggccccactaaagatccccacagccccaccctgctggccccaaagtactttgctttggaacattcagaactcaggcttcttccttttactttctctcttctcttcacctggcaaactcctatgtaaacttcaaaacccagaacagctgtcacctcttctgtgatgccttcacagattgtagtcagataattgtagcagcagcagtatacctcctcaggacaaccccttgacactttattcgtttttccatcataatggttaccccgttatgtccttatctgttttcatgcctttcccctctgctgccactagcattttgaaggccagatgaacatcattcatccttagataccctcaatgtctggcagccagtaggcactcaaaaaggcttgcttactgaaggtatcagatgtgggcatttttgagtctttccctctccagagtcttctccagggctgagctattcctgtcctggaagtgttcgatggctttttagccaacttcccacgagacagccctggccaagcctgcctctccctgtcttgtaccctcttcaaggtctctttagcgtcttcctgttgccctcattttcttaatagaaattgcctttaaaaatgcttccccccgctagttatagaaatgacatgagtgaatatttttgtgtccttggagcaaaaatgatatctagcaccgtgaaggaaaagattgatctggttacacaaaactacaaaatgaaactacaaaaaaactacaaaaatgaaaacgtctatatggcaagaacaaatgcaaaaaccaattaaaacacaaacatattttctcttattattattttagagagagggtcatgctctgtcatccaggctggagtgcagtggaatgatcataacttactgcagcctcaaactcttgggctcaagtgatcttcctgcctcaacctcttgagtagctgggactacaggcacaccccactgcacctgtaacttttaaattatttcgtgtagacagagtcttgctttcccaggctggtcttgaactcctggcctcaagtgatgctcctgccttagcctcctaaggtgctaggattataggcatcagccacctggcctctccccactcccctccttccctcctcctcctctccctccctcccccttccctccccttcttttttctttttctagacagagtcatgctctgtcacccaggctggagtgcagtggtgccattttgctcactgcaacctccgcctcccagttcaagcgattctcctgcctcaggctcctgagtagctgggactacaagagtgtaccactacacccagctgattattctatttttagtagacatgggggtttcaccatgttggccaggctggtctcaaatttctcgaattcttggccagccaaagtgctgggattacaggcatgagccactgtgcttggccccgtattctcaatgttagtgacaagcagagggctaatgtgtatacagggaatttcaccaaccaataagaaaagatttttaaaaacccaatagagaaaaatggataaaggacatgaaacagagaaatataaatgaccaataaaaataagaaaatatatgtaactcaactaatttaaaaattggaagcatgttggaacttctgcagctatcaccttggtaaagatgaaaaagtttgctagtaatcattttagtgagggagtgggcaaacagaagtttgctcattgtagagactcagtctgtgacctgctatggttccaggactggcagtgttggcattacctggaggctacttagaagtgcagagcccgggcatagtggctcatgcctgtaatcccatcactttgggaggccgaggcaggtggatcacttgacgtcaggagttcaagaccagcctggccaacatggtgaaaccccgtctctacaaaaaataccaaaattagctgggtgtggtggcacatgcctgtagttctagctactcaggaggcgtaggtggaaggatagtttgagcctgggaggccggaggctgcagtgtgccaagatcatgccgctgcacttcagcctgggtgacagcaagatgctgtctcaaaaaaaaaaaaaaaaagaaaaaagccctggtgcagtggccttaagctactgtaaagtatcttaacaaagtgcctgtaatcccagcactttgggaggctgaggtgggcggatctcttgaggccaggagttctagaccagactggccaacatggtaaaaccctgtctctactaaaaatacacaaattagctgggtgtggtggctcacacctgtaatcccagctaccccggaggctgaggcaggagaatcacttgaacctgggaggcagaggttgcagtgagctgagatcatgccagtaccccccagcctgggaaacagccagactctgtctcaggaaaaaaaaaaacaagaatctcagaccccattgcagaactgatcagaacctgccttctaaccaggccttcaggtaacctgcatatatacatcagaggttgagaagtgctccttcagaggagtgggagccagcctgcctggaagtgaatcctgcccctgccaactctgtgacctttcacatgtatccgctagtattgggcagcagtrctgtgtgataaaccagccccaatccagcagcttaaaccaacaacattgattctcatggatccgtggggctgctggggcagctctacttcatgctgcagctctacagacctggtgtgcttgtgtggctctcatatccctgggaccagtgggctggccggggcttgttcttcccatggtgatggcagaggcacaaaggggcaagtgaggcttcctgaaggctaatcttataactagcatgctgtcacttccacccatatcccattggccaaagcaggtcacgtgacacaaccaagcccaaatgaaggagcagggaaggatacttggccattggtggaggactgtagtctcgtggcaaagggcatggacatgggggtggggatggcatgtgacataagtctgtgttttaatttcctcctcttctgcaagagggacaagatggggacgtgcccaccttgtaggattataggggactcaatgagttaatagacatgaaagtgactagaacatggcgtggcacagagctaacatgtcatcctcaatggatgttgttagctggtgttattgtgggtaagggaatatagatatgttctgcatttttgggggaggctgtttgtcaatatctatgaaaattaaaaatacgtgtaccctttgagccagtagttcctcttggagggatttaatccggcaagctcacaaagatggacagacagacattcacgtgcacgtctactgaccactgtgttgttttcatagtttaagcctggagatgccatgtgtctagctgggggcctctgctgctgactgagtgtcccctccttcccctccaggtgggccttcctggagctgggcacaagtggccaatacaatgacagcttgcaggcctatgcagccggtgtggtggaggctgctgtgtcggaggaggtaagggccaaggtggggacatggggctcccaccctgccccagccccacaagcatgttccccagtgtgcttttgagatgtgtgcagagtaggcccccaactcctgccacagcccttcatctatctggggagaaaaagtggacatgcattctttagaaaattacactaggggccggccactgcacctggctctcacccacttctgatattgtctgacttcttataaagctcaataacaagtaaagcaaaatagtatgttgttcagggactcatcacatgcagtaaaactagcttaacaaaagtaagggagtaggcacaactcgaatgcccagctgctgatgaatggatacatacaacgtgatctatcatacaatgcaacattattcagctataaacgggaataaaggactgacgcacaccagaacatgaaagaaccttgaaaacatgctaaacgaaaaaaaccagtcacaaaagggcacatactgtatgattctgtttatataaaatgttcagaataagcaaatctacagagacagaaagccaactagtggtgccagggacttggggggagtggggagtggggagtgactgctgatgggtatggggtttctttctgggatgatgaaaatgttctggagttagagagtggtgatagttgcacaaccttatgaatacattaaaaaccatgaattgtactttttttttttttgagacagagtcttgctctgtcacccaggctggagtgcagtggtgtgatctcggctcactgcaacctctgcttcccaggttcaagtgattttcctgcctcagccttccgactagctgggattacagatgtgcacaaccatgcccacctaatttttgtatttttagtagaggtgggatttcgccytgttggccaggctggtctcaaactcctgacctcaagtgatccgcccacctcggcctcccaaagtgctgggattacaggtgtgagccactgtgcctggccaaattgtacatttttaaatgtgaattttatggtatgctgactatatctcaatataaatgactgaatgaaagggaatgatagctaccgcatttagggtggtgggtgcctctagggatagaggaggcaggggcttaggggatgctcaatggtatcagtaccattctaggttttagtttggatgttcattttattatcatgcttcataacttagaatatgttatatattttttctgtgtatcagatagtacctagtgtaattttctttttcttttcttttttytttttttttttttttgagacagagtctcactctgtcacctagactggagtacagtggcgtgatcttggcttactgcaacctctgcctccctgggttcaaatgattctcatgcctcagcctccagagtagctggaattacaggcatgcaccaccacgtctggctagtttttgcatttcaagtagagatggggttttgccatgttggccaggctggtctcaaactcctgacctcaagtgatctgcccacctcggcttcccagagtgttgggattacaggtacgagccacctggcctaggctaggcagacatgctatcaggcattgatgaccactttacagagacagcttgtcatgtgtacttcacagtaaacaccgacattttccagggaatccataaattactgacttttccattgatggcctaaccagtggcccaaaggcagagcacctgcctgtaatcccaggatgttgggaggctgaggagggaggactgcttgagctcaggagttggaggctgcagtgagctaggattgtaccactgtactccagccttgtgacagaatgagaccttgtctcaaaaaaatgaaacaaaacaaaaccacacaaaaaacaaaacaagaagtaggcgaggctgtggagtgacagctgtctcctgtgatgcagatggaggcatgcattgggtcacaagttgacatcaacttgtggagttgaacctgcatgtgccttaggatccagcagccctactacttgggtgcataccttagaggtgacccacggacatgcacaaggtactcaaagcagtcccaaagtgggagtccttaaaacaccatgggcaggtgaatggctgaccaggtggaggtgcacagtgcagcatgacagagcagtggaaatgggtgaatctgagatgcctggaggcgagggggaaagagcacatcacagaggacaacgtccagtgggacacccttttataaaactcacrctgctccttctgacacccagtcgcagttgtgggtggccctctgggaccttagtgtctggggaagtggtcagatgctgggccagggctgttgtgggtgctcagtggtgaatgagacacggttcagtctctcaaggggctcacggcctgctggggacactgaggcaaggccacaagtggctcttatgtcaggaatcccaggyccatgtgccaggcactttgcccacaaagtctcactgagcctccaccctaaacccctgagggaagcatgtgcacctcccctggatggatgggcaggcttgggcccagagaggtgaagctactttcacaaggtcagccagccagtccacagaggaggcaccattcaacctcagctctgtctaacccacgtctcgctcctaactagtgtgccctgctgcctccccctctagcctgtggccttcttgtgggtggtaatatgtcttgtccccagctgtgtcccctgatcccagcccagaacctggtataggacaggcagtggggaaatgctgtggaagtcatggaggcctgcatggaggaggtggtgtcttagtgggccttgaaggatgaacaggatttggatgtgtttcagtgagatggtgatggagcagcagtcatgaagccatcaatcctgaggcagtgagtgctgccactcactcacggggatgaccaggctacgtggtcttttgtcccccagcaggcgagcctggactcatgcaggtggcatctcggtgggaagtgcagagggccgcatgaagtctgggtgaaactgccacggcattctcttgcccagtggaatcagaagggttattgctgttttgttccctgctatgtcctcagtgcttaaaaaggaacataataggtgctcaaaaaaaaaacattcatggattgactaactgaacacacatatagattggggtccccagtagcagaggtggtgccatcagttataggctttgcaggctaaaggctctcagggcaacttccaggggcctggggtccctatccggggcagagctgggcagggagaggagcctccagggagaggacagcatgagcaaggactcaggtggccacaccagcagcctccgctctggggcagcctgggtggggggctctcagggaagagagcaccccagctgcccgccyttgcctcgcccaccccctaccccacagctcatctacatgcactggatgaacacggtggtgaattactgcggccccttcgagtatgaagtcggctactgcgagaggctgaagagcttcctggaggccaacctagagtggatgcaggaagagatggagtcaaacccagactcaccttactggcaccaggtgagtcctgctgccacgcttggtgggagggggcttccagctggccagccatcctgtctcctgttgttctggccagccttgtggcatgtccagctgcccagccgcctctgtttccatcatcatctccatccctcctagccgacctgccactcatccatctgcccagtctccatctgtccacttgctggaactccagccatccatcctagcctacctacagytaaataatgaccaaaaacaaatagtcagttgttagcatggtgttttgcttgtgtacatatggtgttttgcttgcatacaagggaggttgcttggtagattgattacattggatgcaagtaaagacagtatgagaaagaggggaaggggaaaaccagaaaatcccagaaagtctggacacagtgaattttgttttcctttccttgagtgagctgctgatcagctggcagctaacggagaggcccaggcaggctctctgcctttgggccactggctaggccatcattggaaaagtcagttatttatggattccccggaaaatgtcaggtgtttgctgtgaggtacacacggcaggctgtctctgtaaagtggccatcaatgcctgttagcatgtctgcctagcctaggccaggtttgcaccattttcctctgtagaacttctcactgtttacccacccacctactcacaccctaagacagactcttctaccaccaacccatctacctgtccattccacacatccaccacccatccatccacccatccatccatccatgcatccatccatccattcatccacctacccacccactcacccatctacctatccatctattcactcactcatccatccgttcatttacccacccatttacccacccatccatccatcctccatccacccatccttccacccacccacccactcactcatctacatatctatccattcgctcactcactcatccatccatccatttacccacccattcatctatccattcacacacccgtccatccatcatccatccatctacccatacatacatacatccacccacccacccacccactcatccacccatccattcacctcccacctgtcaacccactcacccacccatacatacatacatccacccacccatccattcatccaacaacccacccatccatcttgcagatgcttactaagtgcccagtgtgcctgcccaaggccccatgagggacacactgatgatactttatggctataggatgttgaggcaaaatgatgacaatggggagaagtcagatgcatgagacaggtgcccgaggcagcaatacagtcagtactgaactcagaacaggagcagttggcaagaggccaggccaggctgggaggcgtcctagaagagatggcttttgaactaggctcttaagtggggctgatttggggttaacacagggcagagacatagagttaattcattgaaagcaggagagtgctcagcatggaggggtgggtggtagtttgggggagtcaaggctggctggagtctggagggtacccccgggcctcctgctctgtctgaacccccaggccagagcccgtcccgttgaaggagaaggtgtgagcctggaggagaggcctcaccctccctctgcccccgccccctcccctaggtgcggctgaccctcctgcagctgaaaggcctggaggacagctacgaaggccgtgtgagcttcccagctgggaagttcaccatcaaacccttggggttcctgtaagtgccacccccagagtgaacagggtgggaagaagggccacacactcatagtcggacagacctgggttccagcatcaaccttgccactccctggctctgtggccttggaacagtcagctgacttcccagagcctcagctttctcctctgcaaaatgagtacataacagcactcacagcaggcgtggtaaccctctgatgccctggccctcctcagcctgctgcagctctctggggacctggaagacctggagctggccctgaacaagaccaagatcaaaccttctctgggctctggctcctgttctgccctcatcaagctgctccctggccagagtgacctcctggttgcccacaacacctggaacaactaccagcacatgctgcgtgtcatcaagaagtactggctccagttccgggaaggcccctggggtaggtgggtgtgggtgtgtctgggggatgagcaggtgggtgggcacacacgtggggagtggtcctaggaggtttgggccttggaaaccctcccaacacacggagtcactgcagggatattccaagagttcattttggttttgtttttttctttttgagttggggtcttgctctgttgcccaggctggagtacagtggcacagtcatggctcactgtagccttgacttcccaggctcagattatcctcctgyctcagcctcccaagtatctggaactacaaatgtgtaccaccacactcagctaatttgtttatttttttatttttaagagatggagtctcactatgttgcccaggcttgtctcaaactcctgggctcaagtgatcctcctgacttggcctcccaaagtgctgtgattacttatgtgagccaccacgcctagccagttcatcttgttttacatgtttattgccttttttattttacctattgctgcttaaccagttaccccaaaatttaaaacaacaacagcttaaataaccgctatttattttttgctcctgcctctatgggtcagctaggtggttttggttttctgggctgggccaggctgatcttggctaggctcactgatgcatcagcagtctgctggcaggtcagctggggtgggatggctggaatgggatggcctcttctcctgtctggggttgattgtcagccagggtgatggggacagctgggctacgtggtctttcatcatcagtaggtgagcacaggcctgttcatgtagcactggggcaggatatggtaaaggcctcttgagaccttggtgaaactgacacagcattcttttctttttattttgagacagaatcttgctctggtgcccaggctggagtgcagtggcatgatctcagctcactgcaacctctgcctcccgggttcaggcaattctcctgcctcagcctctcgagtagctgggactacaggcgtgcatcaccatgcccagctaatttttgtatttttagcagagacagggttttcccatattggccaggctggtcttgacctcctgacctcaagtgatctgcccactttggcctcctaaagtgcttggattacaggtgtgagccaccgcacctggcttgacacagcattttttttttttttttttgagacagagtcttgttctgttgcctargctggagtgcagtggcacaatctcagctcactgtgacctctgcctcctgggttcaagtgattctcctgcctcagcctcccaagtagctgggattataggcgcgcaccactgtgtctggctaatttttgtatttttagtagagacggggttttgccatgttggccaggctggtcttgaactcctgacctcaggtgatacagccgcctcggcctcccaaagtactgggattaaaggtgtgagccaccgcacctggctgacacagcattctttatccaaatcaagtcaggtggccagcccaggctcaagagatgggagaataggctccaccatttgctatgaggaactgcagagtcacatcacatatggcttggatgcaggcatgggaagaattagagctatttttgcaaacaaccaattgcaaggattgcatgaatacattcttcctgtcaaatgtgaaaactggctgggcayggtgacccatccccgtaatcccagcgccttgggaattcgaagcaggaggattgcttgagcccaggaggttgaggctgcagtgaacagtgatcacgccatgacaccccagcctgggtgacagtgcaagaccttgtctctaataaagaaaaaaacagttttacagtcaaggccaaagtcctccatagtgccacatccttcatcccaggccccagcatcagccccagggataccactgccaaatgtttgcagtacctccttcatggccaaatgtaaaaacttgatgggaccaggagctggtgaggaggtggggaagtgtccagccttattcattgctaatgggagtatgcgttggcacagctacttttaagaggaatccagctggcatctaataaaattcaaaatctgtcactccagtgatccagcaattctctgactccagtctgtccctagagagacatttcagcttctgcatggggagtgtgtataagcaagtctgctatcacagtggtttggtgacaacctaatgtccattcattgaaatttaagtaaactctaaattgacatttatacaggaaatcgtatacactgtaagtgtacaacttgaatttcttgcacgtggaacacacctgtgtatagcatccatctggagaaacagaacattcccagcccctagaagcttccctcgtatccctttccaggcacacccccaccccagcatcatctctgtcctgatttctgttttttgtttgtttgtttgttttgtttttaaacagtcttgctctgtcacccagactagagggcagtagtgcaatctcggctcactgcaacctctgcttcctaggttcaagcgattcttctgcctcagcctcctgagtagctgggattacaggcacacaccaccacacccagctaatttttgtattttccgtagaaatggggtttcgccatgttggccaggctggtcttgaatacctgacctcaagtgatccaaccgcctgtcctgatttctcacagaataggttaggtttgcctggttttgaatgtcatatgaatggaatcatgtagtgtgtgctcatttgttctgcatgtctgtgagattcatctgtattactgtgtgtagctgtagatctatcattctcattgctatatatccattaaaattttaatagcttttaaaaacatactgtataagtcatacaggtatgttatagaacattggagaatccaccaaaacactctcacaatgaaaatcacttgaacactccacaacccaaaagagaacatttctgtgaacatttggttatgttttctcctagactttaaaaaatgtaccttgcctgggcacaatggcttatgcctgtaaacccagcactttgggaggccaaggcaggtggaacacttgaggtcaggagttcgagactggccaacatggtgaaaccccatctctactaaaaatacaaaaactagctgggcgtggtggcgcacacctgtaatcccagctactcgggaggctgaggccccagaattgcttgaaccgcgaaggcagaggttgcagtgagccaagatggtgccactgtactccaacctaggcaacagagtcggcctctgtctcaaaaaaaaaaaaaaatttccaagggtgggcttcatgcatggaatggggtgctatacccatcattgtagtattatacagaatagtttcactgctctaaaatgtttgctttctgagtttttttaaaatcataattaagattatactgtatgaattatttgcgacttccttcttttgcccactaggctgccttggagagttgccagtactgccatgtttggtccactgtgcgttttgtttttcaaattacttattttgagacagggtctcactgtgttgcccaggctggtcacaaacttctagcctcaggtgatcctcctgcctcagcctcccaaagcactgggatttcaggtgtgagcctctgcgctgggtcccactgtgcctttttcctttccttttttttttttttttctttgagacagagtctcactctgttgcccaggctggagtgcagtggcacaatctcggctcacttcaacctccgcctcccaggttcaagcaattctcccacttcagcctcctgagtagctgggactacgggcatgcacccccaacctggctaattttgtatttttagtagagatggggtttcaccatgttggtaaggctggtctcaaactcctggcctcctgaccttggccttccaaagtgctgggattacaggcgtgagccactgtgcccggcctactggtccctttgttttaaagtgcaaagacttaatgtggaagagataattcaggccagacgcggtggctcatgcctataattctagcactttgggaggccgaggctggtggatcacttgaggtcagagttcgagaccagcctggccaatgtggtaaaaccatgtctctactaaaaatacaaaaattagctagacatggtggtaaatgcctgtaattgcagttactcgggaggctgagacaagagaatcacttgaacctgggaggcagaggttgcagtgagccgagatccccccactgcactctagcctgggcaacagagcaagactctgtctcaaaaaaaaaaaaaaaaaaaaaaagacaaaggataattcagagagctacacccagaactctggagcactgtagggaagaggtctgggtagaatccctgctcagccatttaactgtttggcctctgctaagttacttagcctttctgagtctcagattgccttatctgcaaagtgcagatgataattctctgcccccatgcagggcgggtataaggagtcaatttacaagatcacaggggtaatgagcctccagcataagcgtgaggtcacagtagccctgctgcagacagtgcataaaaccagactagcacttgtcaagggatgggtttcaggtagaaggagttctagggcaggggtgagggtacctgccgggggtgggcctgtaatcccagctactcgggaggctgaggcaggagaagcgcttacaactgggaggtggaggttgcagtgagctgagatcgccccattgcactccagcctgggcaaaaagagcgaaactctgtctcaaaaaaaaaaaatgtccagtgaacaaaatatttatctgtttgtctatctatctgagtatatatatttaacacatacacatatacccacgcacacacagagttgtcccttggtgttggggagggagttgactccaggagcccctgtggaagctcaggtctcttctataatacggctgactgtttacctataacatatacatatcctcccatatcctataatcatctctagattacttgtaagacctaatacaatgctacattaatagttgttatactgtatttttaaaatttgttttatcttttagtgttatttcttttatttatttatttatttattttttttagatggagtctcactctgtcgcccaggctggagtgcagtggcgcgatctcggctcgctgcaagctctgcctcccgggttcacgccattctcctgacccagcctcccaagtagctgggactataggcgcacgccaccacgcctggctcattttttgtatttttagtagagacgggtttcaccgtgttagccaggatggtcttggtctcctgacctcgtgatccgcctgccttggcctcccaaagtgcagggattacaggtgtgagccactgcacccagctgtgttgtttctttttaatcatgtttttttcctagtatttttggtccccagtcgattgaatccaaggatgtggaacccacggacatggagggccaactatataagttttgctgctagcttttatttttacttgcacgtatatgcacttttatatgcccaatgacctcatttgctaaatgacaaaaaggacacagtgggggcttcctcggaggcctgcctgtgcccctgtgcctgtgtcttgttaggtagggtgcaggggcctccacctgtgcctgtctgaccagcatccctggctcgctctgcctgcacaggggactacccgctggttcccggcaacaagctggtcttctcctcctaccccggcaccatcttctcctgcgacgacttctacatcctgggcagtgggctggtgagtccctttctcatgtctcctctgttcctggggtgtttgtcacacggcggctctgagctggcaggattgattcctgcrgcaagtggggaccaggctgcagcccagtgctgggtgccatgtaggagccaggggtgcagtggaggaygaggtggacgctgccccacctgccattcagagcccagactcgcccttcccctgctctggggacttggaccaccacaagggcgtgtttaaacatagacccccaggccccgcacagggcctccaaaacctgcagatggcctgggactctgcatgtaaccctggttgtcaggaaaggctggacttggggatgtttgggactatccctgacctcagtgacctcacttgtttttatgtattcaggataactgtgcccccgccccccccacatccccaccgcttccctctcctcctgcctccctcttgctttcctcagagcccctctgacctgaccaggtttgctgaatagaggctgtttacagtgtgttgttttcatcttttttcctggctgcggtccagacttgtttagaaatctgtccctggcacccctcgctgagaaagtgaaccctttgatctccagggcaacgagacagaggagaaaaaacatcactctaaaaaacacccttagcgcagagaacgccagctccctgcggggacgggaggggtggggactcttcttcttgtctgatccttgcttttttctgagtgtggaacgaggcaagagagggccaggcggtgggtgagggaacccccatgctgtggcccaggtrgggaaggggactgaggcagctggggagggacacgtgaaatggttccacctggttaccaggaaagggtctgggcaggaaacttcccttccatcagggtccctaactgtttttgtgccataaacaccttgggcagtccaggaggctgttggccctcttctcagaatagtgttttaacttttattatttatttattttttttcatagagatagggtctctctctgtcactcaggttggaatgcagtggtgtgatcgtggctcactgcaacctcccacctcctgggttcaggcgatcctcctgcctcagcctcctgagtagctgggactacaggcacatgccaccatgctcagctaatttttaaatttcttgtagaaatgaggtctcactatatttcccaggccagtctcgaactcctgggttgaagggatcctcctacctcagcttccgaaagtgctgggattataggtgtgagccactgtgcctggcaaattagtgtttttagacacataaaccaaaatgtataggattatggaggaaaccagttatagtgaaatatggttatcaaaatataagtaaacttttagtatatatgtgctgctttattaacacactgaataataagatccagaagcaggtgtgataaataccataagttagaagaagcaaggtgcatgaatgatactttaaggtatgtacagccttgtaatctgatggaaaaacatctgtgatttctgacagtgaccgtcccagtgactactaataccactgtggtgtgtcacgttaacagtggaaagaaataccaaatttcaggatttttttttttcagagataggatctcacactgtcatgcaggcctgagtgcagtggcatgatcacagctcactgcagcctctatcacctcagcctcaagcgatcctcccatctcagcctcccaagtaactggaactataggcgcctgccaccatgcctggctaatttttttattttttgtagagacaggttttgccatgttacccaggctggtcttgacctcctgggctcaagcaatctgacccccttggcctcccaaagtgctgagccactgtgtccagccttttttttcctctttaaagagaaaaaagaaaaaatcacatttatggatacagctatcttttagctgttctcagctttttggtgggggtggtggtggtggtggttttttgtgtgtgtgtgtgtgtgtgtgtgtgtgtgtgtgtttttttttttttttttttttagataggctctctctctgttgcccaggctggagtgcagtggcacgatctcagctcactgcaaccttcgcttccagggttcaagtgattctcatgcctcagcctccgaatagctgggattacatgagttttgtttggtttggtttttaactcacaagaactaagctttacttttcaaatatgctgaaggcagccaagggttccagcaggaaatggagaagggagaggaggcaatcggaggcagcggtgggcatcctgcatgccccaaggctggagggagactgagggcctctcctgttgtaaggcctcctagtcctctgactgctgcatctgccaggctgacagcctcaggccgtgcaacttttcctgcagaactgtgggaaaggggtgggaatgggaggttgcccagcttggtgagggagtgggttcatgggagcggctctttgggcctctcaggggctgttcaccagggcaaagctagatgcatgatcccaaatcctcctgcgtgcttgtccaaggaactggtggggaacacgtgcctcaactggatatgagtttttatttttatttatttcttcttttgttacccaggctgaagtgcagtggcatgatctgggctcactgcaacctctgtctcctgggttcaagtcattctcctgcctcagcctctccagtagctgggattacaggtgtatgccaccacacctggctaatttttgtatttttagtagagacagggttttaccatgttggccaggctggtctggaactcctgacctcaggtgatccacctaccttggcctcccaaagtgtgagccaccatgcccggcagattaagtaagtatttaacacatgtaatcccagcactttgggaggcggaggtgggcggatcacttgaggtcaggagttagaccagcctagccaacatggagaaaccctgcctctactaaaaatacamaagttagccaggcgtgggggcacgtgcctgtaatcctagttactagggaggctgaagcacgaaaattgcttgaacttgggaggcggaggttgtagtgggctgaggttacaccactgcactccagcctgggcaagagtgagactctatctcaaaaaaaaaaaaaaaaaaaaaaaatttttggagccatgactgatgaagtactgccacttggtggcagcatgcctaggctgtgcagcagcccccttgaccttcccacaggtgacactggagaccaccattggcaacaagaacccagccctgtggaagtatgtgcggcccaggggctgtgtgctggagtgggtacgcaacatcgtggccaaccgcctggcctcggatggggccacctgggcagacatcttcaagaggttcaacagcggcacgtgagtgggcttctggccctgtggcttcccctgcaccaagagatagaccaacctcccctttaacactcacactcctggggaccagatgtggcatccrggccacacaccccacgccctcctttgtttcatacatggggagactgaggctagggaaggaaaggatttgcccctcccctgcaggctcctcagcctaggaaggggtgccttggtggcagtacaggaagagcacttggaacctgaagactctcaaggggacagtggggagggctgtttgaggaggtggacgtgggtgggtggcagggcctgtgagccagagacactggaactgggcagtgcagatcttacagcatccggcagaggagctgacctagggagccacagaatattctggaacagtcaagcagcatgacgagagaggggtttgtggatacctggtcatgctgcagcgtcagggtgtcagttgaatggctggacaaccccaggcccacttcctgtaattcctagctgagtgggacactgcagggtggggaaagctggggaggtggctccaggctctgttcagtcctcccttcccctgcccggcaggtataacaaccagtggatgatcgtggactacaaggcgttcatcccgggtgggcccagccccgggagccgggtgcttaccatcctggagcagatcccgtgcgtaccctgggagggaggggtgggggctcggggcagaggggaytgccagggtgaaggcccagagccgtgctggcgctgtgcaggaagtgaacgatctcaggagggtgtggctggaagagaaggtgtccctggtgggggctgaagttcaggacttaatccatcctccaggcaatggggagccatcggggctccccgagcagggcagtgcccacaggagccccttttctgatcacctccaccccatctctcttctcggtctcagcggcatggtggtggtggctgacaagacctcggagctctaccagaagacctactgggccagctacaacataccgtgcgtgycttctcactccgctccccgtcaccctccagggcatccacctcactccttgcccagctccttcctaggcaatgtttttaaacccacagaacaaagaatcccagcctacccccttttctggccaggagagcccagacagtttggcagtgtagttgcatggcttaagtcagcatccatgtgacctctggttctaacacccagagcagggtggtgtggggtggccaggctcagggactggcccctgccagggtctctgactggatctgccttactgggctgtacagctgtcacctcctgaggctcacttactttacctgcattttctcatttgactcttaaaattgccacatgtggtcactagagttcctgttcccatctcacagatgatgaaactgaggccctgagaaagtacctcactttcccaagcttcccctgttggcgaatggtgaaggcaggatttgttttttgttttttgttttgagacagaatcttgccctgtcacccaggctggagtgcaatggtgcaatctcagctcactgcagcctccgcctcctgagctcaagtgattctcctgcctcagcctcctgagtagctgggattacaggcgccagccaccatccttggctaatttttctattttcagtagagacagggtttcaccatgttggccagtctaatctcaaactcctgacctcaagtgatccgcctgccttggcttcccaaagtgctgggattataggcataagtcaccacacccggactgaaggcaggatttgatgccatgccttttgggccccagagcccaagcttggccaccccaccaagccaccccccagcacaaatggaagacattattgttatcccgaatgtcatagttggttttgttgttgttgttgttgtttgtttgtttgtttttagagacagagtctcgctctgtcacccaggctggagtgcaatggtgcgatctcagcttgctgcaacctctgcttcccgggttcaagcgattcttgtgcctcagcctcccaagtagctgggattacaggcacgtgccaccacgccggctaatttttttttttttttttgagacggagtctcgctgtgtcgcccaggctggagtgcaatggtgcgatctcagcttgctgcaacctctgcttcccgggttcaagygattcttgtgcctcagcctcccaagtagctgggattacaggcacgtgccaccacgccggctaattttttttttttttttttgagacggagtctcgctgtgtcgcccaggttggagtgcaatggctcgatctcagctcactgaaacctccaccttccaggttcaagtgagtacatgcctcagcctcccgagtagctgggattacaggcacacaccaccgtgcctggctaatttttgtatttttagtggagacagggtttcaccatgttggccaggctagtctcaaactcctgagctcaggtgatctgcccgcctcrgcctcccaaagtattgggattacaggtgtgagccactgcacccagcctgaatgtcgtagttgtaagtaataatgtcctggtgtgactgcccctcccctccctggccacagccttggctgagtgaggccagtgggggtcatgggtgaccatccttgtccccggcaggtccttcgagactgtgttcaatgccagtgggctgcaggccctagtggcccagtatggggactggttttcttatgacgggagcccccgggcccagatcttccggcggaaccagtcactggtacaagacatggactccatggtcaggctgatgaggtaggtgccagttgggtggtgggttggggagagggaggccgcaggaacacagaacttcctgtgcgctttttgtaccaactcattcaaactttgctgccagccccagagggccagcagggggtggtcagatgttggacaccagtgcagcagctcggtggccgctctccacttgggccctgtcactgtcctcatagctaaggggaggatgctagacatctgttgagtgacctgtactgctaggcactatgcttggtaccaggagcaacaggtagaaaacctgtgccccactgtcctgtctcttgggcggtgcagaaatccatcaagttcttgcactggtgtcaatgtgtaaagatggctgtgttccaagagaggctatccaggaacaaacgggtgcctcacctggctggggtggtggcatggaggccttccctgaggatgagtgcctgagcagagagctgaataatgaaggcagagtgacttaggtgaaggggtccgggycccaggcagaggaactgtcgggggtagtgtgcagtgkgaggggctcatcaagttgaaggctggcagctgttaacggggctgcctgtgaggattttggcccccgtcttagcctctccttcctgggatgactgatgttccctccttttccccatccaggtacaatgacttcctccatgaccctctgtcactgtgcaaagcctgcaacccccagcccaatggggagaatgctatctccgcccgctccgacctcaacccggccaatggctcctaccccttccaggccctgygtcagcgctcccatgggggtatcgatgtgaaggtgctgcctcctccctagggcctgagctgtgggtgggggaagtcaccatcaccagctttggggaagggacaggttggggcaaagctgatggcggggcaggaatcacagtcggaattgggctgtggttggggtcacagtaaaggtgacagtatgggctgggcacggtggctcatgcctgtaatcccagcactttgggagcccaaggtgggcagatcacttgaggtcaggagtttgagaccagcctggccaacatggtgaaaacccgtctctactaataatacaaaaattagctaggcgtggtggcgggcgtctgtaatcccagctactcaggaggctgaggcatgagaattgcttgaacccgggaggcagaggttgcagtgagccaagatcacgtcactgcactccaacctgggtgacagagcagagactcaaaaaaaaaaaaagtgacagttcagaattgggctctggggtcaaggtcagggtgggaggctgggtgcctggattggggcaggccaggacccctgctcagctgcggctctgccctgtccccaggtgaccagcatgtcactggccaggatcctgagcctgctggcggccagcggtcccacgtgggaccaggtgcccccgttccagtggagcacctcgcccttcagcggcctgctgcacatgggccagccagacctctggaagttcgcgcctgtcaaggtttcatgggactgaagttctgtccstgctctgctgctttcgcccctgctgaccctcgtcagggtcacccccgtcccaaggccaccggacttctaactccagcccctcctgggggcttygttctctgatctggggtctgagtcatctcctcctagagtgggtcacgaacctgatggggctcagaactgaccccctctctcccccgaggtgggtgggcaccgtggcgtctcttctgccctgccctaaatctcccactctctgtttctgtctgtttcctactgctgctctctcaacctcattcccacctctggggccccttcctcgtgcttctccttcctgagggtttgggaaggtcctggggcagactctggggctcccatggggtggaaggagcctgttccagcacccttctcccagctgcattcccacgggtggccctggagctggtgagctttgtctgggcgttgtcttcggctggcattgctcctcccagctctggcccctctgctccctcaggaagcagtcccctcgtctccctttctgggcagcttccttgaggacagaaacttgaaaacaaacacaaaccaaagtttctggccatctgtggctggagggttctgaatgtcctctctccatgtcaggcagagggtcagcccccatgcttctgcctcaggccccaccccaccccaccccaggcctgcccctcacctcagggccatacccacagcgccctgatggaggaaccagaccgcaggctgtgccaccattaaacaagagcggctgtggccccatgctgtgcttcttggggtggcagggaaggtggggtcagcgctttttctcctctcaggtttgggttctgcgccatcccccatgcagcctcctgtgcagccctctgtctgtccttctgtccattcattcatctgccaacatactcacccatcatccatctgcacagccttccacccacccatccgtcttccatcatccatccatccatctacctatccatttatcatccatccactcacccatccaaccacccatccaaccattcagccatctccatctgtccattttctttcttcttcttttttttttgtttttgttttttctgagtgggagtttcactctattgcccaggctggagtgcaatggcataatctctgctcactgcaacctctgcttcctgggttcaagcgattctcctgccttagcttcccaagtagctggggttacaggcatgagccaccatgcctggctaattttgtatttttagtagagacagggtttcaccatgttggccaggctggtctcgaactcctggcctcaagtgatccgcccgtcttggcctcccaaagtgcttggattacagatgtgagcccccgcacctggcctcatttgtccattttccatccacttacccacccacccatttactcatccagccattgactcatccatccacctatgagatcagacagggagggatccttttttgtattggtctgtataccacagcatggcttacgaagttcttatctatctatcacccatccacccacccatttatctacccacccattcatccacccacccatccaactacctatccattcatccatccacccatctgccaacgcatccatccatccacccacccaatcatctacccactcacctatccacccatccacctacctatttgtcacccatccacccatccatccatccaatcacccatccaaccatcaatccaaccattttcatctgttcattttccatccatctacccgtccacccattcactcctccatccacctacctatccatttatcacccatttacccatccatccatccatccttccaaccatttatccacccatccaaacatttccatctgtttttccatccatctacccatccacccattcactcatccatccaccttcctatccatttatcatccatctacccactcacccatccatccaaccttccaaccatttatccacccatccaactatttccatctgttcattttccacccatttacccatctactaattcactcatccatccacctacctatccatttatcatccatctacccactcacccatccatccatccttccaaccatttatccacccatccaaccatttccatctgttcatttccatccatctacccatctacccattcactcatccgtccacctatccatttatcacccatctacccatccatccacccactcatccatccattcatccatccacccacccacccgtccatccacctacctattcatttatcacccatccatccacacacgggtctgtgcagattcattaatatccacccatgcatccatatttatctattttctatccatcagccatccattcattcatatccatccatccatctatccatccagatgtttattgagcacctgtgttctgggtcctatttgggagccttgttaaccaccaagaccttcctaagccatattgtggtatacagacagatacaaaaaaaarggctctctccctgtctgatctcatgcagcctgccttggagacaagactctcccagtgctgtgtgcttggagagrggaaagcacacagccctggagtcagagacctgggtttcaattctgtctccacctcttattagctagctatggactcctctctgagcctcgattrcctcatctgtgaaatggggtaatggtgtgagcagcgtttccctgggggatgtgatgcagcccacttggggcctcatgcactcagcatctctttattagcaaacacttattgaacccctagtacatgccaggcactgttatgaggtcccggggatactttataacaaaagggacagaagcattcctgctcttgtgaagtttacattgactagatagtaaacaaaataaatgaaatatgcagtgtgtcagtgctggtaaacccgtggagaaaataaagcaaggttggggtctggggttgggaattgacttgtggttttatcttattttcctttttatttatttatttattttttgagacggagtctcactctgtcgccagactggagtgtaatggcacaatcccggctcactgcaacctctgcctcctgggttcaagttatttttcctttttgtagagacagagtctcactgtgccaaccagcctggtcttgaactcctgggctcaagcgatcctcccacaggcgtgagccactgcgcccagccctgagtgactcttaaacttcagtttgaacttggggtcatccagaaagtaccctgagggtggggttccctccatgctctggagccagccccagtaattcctctttgatctatgatacgggcttcagcatatgcttttgttggaagagagggctccatgtttgaggagggtttgcatgacattgacttcaagtccacccaccctttccctctcccagagatgggtgtccagtgtcagctcacacacgcccaggggagggggcctcacttctttgcttccattgggtctgtgatgaaataattctgacttagtaggaaggacttcatatcagaatgaagttggcctccccagctgcttctgccttcagcggaggcagcctttgtcccaccccaagtccctcttgtttagccacctgcttcctgtggtacagggatgcccctgtcctggcatgcaagactagctggagtcaggctcctggcctcactctggggccccagttgagagctggggctgagagcagacttggggtggaaggaaagcaggaaaggagacagctgatgatgggaaaatgcacaggatctttgtttcataaatatattttatttttcaatgaaaaagtttgcacattagaaaaattagtaagggtcaggggtgggcttcctgggaggatggctgagatggttcctcaaccctggttggtggccctgttgaccttcactgggaacaagttcaggggcgaggtcacagctttgaggaattcctcactgctgtgattcaggtctctcctgtccaccctgctctgggtacctggtgtgttacttgtgggcacttgtcacgccagcaagttggctaaggatgggcacagagcagtcacacagataccaaaaaggtccaattcatagcctcgctggctgccgacctttggcctctgcatagtgggctcctgataacaagaagttaacctgcacccaggccacaggtgctcagccaaacatacgacgaggcgctggataaaactccagcccctccaggggtctcttgggctaggagagcacagatcggtaaggggtccgtcctcacttgggcaacctatttgtcatgcccagctgttccttgagcgcccgcagctgggccaggctgatgttgctgcccccgcagacgatgaccacgagggatggcagcggggttcggagattcccctccagttggagcttctggatcacgtggctatagacagcggccagggctgccccgcaggcgggctccaccaggatcttctcatcatctgccagagaaggggcgtgacaggggcgtggcctgagtttcccagggtgcacaggagctgacaggccattggcaggacctgggaatactgagccaatcagctctcagccctggctgcagccgcaggtcctgaaccaaacgtcccgtcatcggcctgaattggcccttccaagcctgagccagggcctgggtttcatcatgagtgctaacactgatagaatgagtgtggttgcgtgagcactgtgttgagaaggattctgaggcatcatctgagcaagagttccatggttgattagccaagtgtgcagcaggtacagaagcataaatggtactatttttttctctcttttttgccatccctgccctagacggaacccagaaagagtccagcctagttacagactcacctctgaatgaatcaaactctgagccccatgttttcctttttttaccctggctgccaggaaactcagaagcaacattttaaatattcacttattgttttctgctgctatggttatcaggcttacttttctatttacttttccattatgtgtggcttttgcttttctatttctacacggcattgtattatcttctattaatggaaaattctaggcagaggtggaagacagaactgtgaaggaaacttggggtgagtgggatccccagtggcataccaagtggacagccacttagcgcctgagtcagcaggtcaggtcatgggaggacctggcacatacccacgaacttctcaatggcggccacagcctcctggtccgagataacttcagagaaaatggggtgttcctgaaacagcttcagggcctgagcccccacagtcttcacgcccagggccttggcaacactgagagaagtgggaacccagaagaggatgggagtgggggaaacaggagagagatgggggcagggagggagagaaggagatggatgtgagacagagaaggcaatgcatctgggggcagggggacaggtatcacctctgcagctgtaaaaccctgaaaagcctcagggatccccaaaccaagtggggtcttctaataaggtgcagagtgtttgaattgacatcatatagtatattctttagtatcatttttttaatttttttgagactgagtgtcactatgttgcccaggcgggtttttgttttgtttgtttttttgttgtttttttgtttttttttttttttagacggagtcttgctctgttgcccaggctggagtgcagtggtgcgatctcagctcactgcaatctctgcctcccgggttcaagcaattctccagcctcagcctaccgagtagctgggactacaggtgcccaccaccacacccggctaatttttgtatttttagtagagatggggtttcactatgttgaccaggctggcctcgaattcctgaccttaggtgatccacccccctcggccttccaaagtgctgggattacaggcatgagccaccatgcccgaccccaggctggtcttgaactcctgggctcaagtgatcctcctgcctcggcacagcgtcatattctgatcaacactaagtcaggagcaaatgcctaagaggacccttgttgttccctgctaggactccctgcttttgctccgggttacaaccgctacctggttaaccctcatgaagcttagcaccactctgcctgcccacatcctgctgtgtccttcaaggctcaggattaaggccacctcctccaaggagtcctcctgggagagtactgagtcccacggccctatgtggaattctcaaatagtcctccctgctagtaacaagcgccctgagtacttcttgagaaagtgttaggtgccaagcacttcacaagcattattgaattcacacaagaattctgctgttgttaattggtttgattttggaaaggggaaactgaggcagagagtgtacagtcacttgcccaaggtcacacacctagggagtgctggagctggggctgcaagcaggatctgtataacttcaagacctgcactggtaaccaatgtgttgacgctgtccccagcttcctggggtgaccactagctctattcccagctcagctgccccctctcccttccccaggagcatcttgagggcctgagccacctcagccctcagcagcacgtggtttacagtaggcgctcagccatgacgtcttcagtccctacagtgtgggacacagcagctccagatgccaggctcaggaatctggaagaagttcttacctggctgggctcagtcttccctatctgtaggggagactattgtctgccccggtgtcttttctagctgcacttatgggcacctggtgtaaagacatttcccagcctcccttgcagctggatgtggccatgtgactaagttcaggccaacgaaaggtaagtggaagtgttgtgtctgtctttgaaggttggagcatagccttctgcccttgcttccccatccctgccaaatggaatgtgggtgtgatagctggcactcaggcaaccattttggactgaaacactacatgctaaggataatggggaaacaaactcaagggacctggcgccctgacttttcatggtaaagttcaatctcatttaagtcactgttatttgggccttctgtgtaatggggtcaaaacctaatcctaattaaatactatctaccagccgggtgcggtggctcacgcctgtaatcccagcactttgggaggctgaggtgggcagatcacctgaggtgaggagttcgagactagcctggctaacacggtaaaaccccatttctactaaaaatacaaaattagccaagtgttggggcagacgcctactcctgaggctgaggcaggagaatcgcttgaacttgggaggcagaggttgcggtgagctgagattgtaccattgcactccagcttgggcaacaagagcgaaactctgtctcaaaaaacaaagacaaaaacaaacaaactatcaaaggtttggggcttggatatgaactccttaggagcaagacttgtgtttatgcaccactctctccccagatcagccagtgtcttacacacaataggggctcagtaaatggttggcaaagtaatgaggtatgtaaaaccttgccacagaggactcagtaaatgattcctatgagaccttccttccttccttccttcctccctccctccctttttcctttcctttcctttcctttctttctctttctctctttttctttctttcttcctttctttctcttttttctttctttctctctttctttctctttctttttctttctctctttctctttctccttttttctttctttctctctctttctttcctcttcctttctccttccttccttctttccctccctccctccctctctcccttccttccttccttccttccttccttccttccttccttccttccttccttccttccctcccttcctccctccctccctctctcccttccttcctttttctttgtttctagacagggtcttgctctgtcacccaggctggagtgcactggcatgatcatggctcactacagcctcagtctcctgggcttaagcaatccttcccaccttagcctgggactatgcgtgtgtgctaccacgcccagttaatttaaaaaaaaaacaaaaaactttttttagaggtgggaatctctctatgttgctcaggctggtcttgaactcctggcctcaagtgatcttcctgcctcagccacccaaagtgctgggattacaggcacaagtcactgtgcccagcctcatatgaggcttttcacgtgaggaagtgtgacatgttggagtcacacagacttgggtttgagtccaagctgtaccactcactggacgtggccctgggcaagcgatcaaagcctccattgtctcatctgtgaaacaggctgacatcaggatctatctcaaagccagccctaagggggactccccagtgcttgctggacacccgagggaggcaccccagctgctcacctggtgatcttgggcagggagacaagtttgcctgcggtggtggcagcgtggaagctgtgggcaccaaaagtctccatggcgatgacaggcacgtccccccagcccacctcctgcagcccctggaccactccacacagcaggcccccgccgcccactgacagcgcgatggcccccggcttttcccacagtgtctccttcagctctttcacgatggaagcgtggccttccctggagggtggggagagggggtggcaggtcagggctaggcttcctggagacaccagctcaggtttgcaccggccttatcccagctgatggggcctggagctagttccctccccacccccaaccttggcttctagctgccagcatctgtgtctctgcctgaggaccttctctggccacctgagctacctgcaaacagagtcaggagatggcagccccttaaggcagccctcaacc

SEQ ID NO: 98166 - DNA, 19370 bp, Homo sapiens
tggaacacccttcttcggaggagccagactctacctcccgtctagtcctcctcctcagaaccccagagaaatggctcccactgggcgaaatgtctaagaagaataatcacaagccctgggtgataatataggtggctgggagctgcctgagctgaggttcagctgtgggcagcctccaggaggctcaactggcagaaaggcccagagtctctgctcggctcggcccaaccttctccacctaggaagtgggcacgctagctggggcttcagcagagtaaagggggcaggagatgtgacaggtgggacaaggggtggctgtcaaggggccagagaggagggccatgtcactcctccctcgccctcacccgtcgaccgccccacccctcaccttcctctggatgggtgttggcaccttgtaccccttcttcatgatgcctttgaacaccgggtagctcaggcctgggagagacatgaaacggtcagggggccgagggagtccccacagcaccaaccccagagaactttacaggacaaatgacagcttcatcaacaataaacagcaagggaaaaaaaaaagcaataaagcacaaactgaaaggtgaaatgagacttaggagacagatctgactggggcacctgaaccttatctgattttctgatgtgaacccactcttgatgtcatgagacagcagggatctctgaacactaacggggtcttaggtgacactaagaagctgtgccttcgttttaggcgtggtaaggtcctgcgcctcttggaagtgtgtgtggacacaatgaggatgtctggaatgaacttcagaatcacccgggtgtggggagggactcttgtccctcttggtggtgagggcatggatgggagctcactttgttgcccaagctggacttgaactcctggcctcaagtgatcctacctctgcctccccaaacgctaagattacaggcatgagtcatcgcacccagcactcatcttgatatttaaatccttgctccagctgctactgatttgtaaagagtaacagagtcaggctttatttctggccagccaggtgtccccacaccacccacccattccatcctttccctccttctgaaatgtccctctgcaggcaataagtccccgactgtctttgcctgttcctgcatctgcattgcctttcctgaggcctgttctaactgccctctcctgtgtcaggcccgctgccccactagaaggccctgaatgactggaggaccacatctgctaccccggtctacccaaccacagtgctgggcccagagtggacatcagtgatggagtgcagaggcggggttgacctccagctgccactcccgcagagtccctgatgccaagttgcacccacccatggactggaagcctccagacttcttcttcttcttgttctgggcacgcaccatctcccgggtgtccggctccacatccgaggtgcattccgaggtggggaaggtgggcaggggtcttccaggtcccagctgggagggaaggacagagaggtggtgtcactccaggcacagtgggaccacagggggcagggaaggggcctgtgctgttgccctctctcccccattcaagccaatgatgcttccgccagatcacgtcacttttttgctagtaagttctcctttggctgggccaggacagaagtttagagtggggtctgcagatagactgtctcggtttgaatctcaatcccaaaagtaagtacattttttttttttttttaagagacagggtcttactctgtcacccaggctggagtacagcagtgcaggcatggctcactgcagccttgaactcctaggctcaagtgagtctcccaccttagacttctgagtagctgggactacaggcgtatactaccacatctggctaatttttttattttgtatttatttttttttttttgtagagatgaggtcttactgcattgcccaggctagtcttgaattcctggcctcaagtattcctcccttcttggcctcccaaagtgttgggattacaggcatgaaccaccacacccagcccctaaatacattaaagagccaatcgaaatgcctactatatgtgaagtactagacttttccaagatctcccgccccctacccccgccccatcagccgccaaccaatctcctttctgatctctggtctgtctcatgcctggcctcctttctgctcacccaggacccacttgtcctggcacagctaaatccaatccagacacctcctctggggaaccttcttggactacagggctgtcccctttctcttaaaaatagcattcatggccaggcgtggtggctcacgcctgtaatcccagcactgggaggctgaggtgggtggatcatttgagcccaggagttcccagactagcctgggcaacatggtaaaaccccatctttaccaaaaaagaaaaaaaaaaaagcatttacggagcagcaattcataagagtggctgaaacttacaaggtatctactataagctaggtgctgctctgagaattatacaaattaacccacttaatcctcacaacaatctgatgaagtgggtactattgttctgtccattttacagagaagaaaactgaggcacagagatacagtgacgtgcccaaggtcacacagccagcaggtagtgggtgagggatgtgaaccctggcttcagagactgtgttcttttcactgtgaccctctaagattaactacaatcctctagggcagagccatggcctgtcttgaacagtctgtgagtttagaacggtttttactttttaaagggttgtagaaaagaaaaagaaatccaacaaaaaagacagtgatcttatatggcccaacaaaacctaaaaaaaagatttaccatctggcccttgataggtctgccaacccctgctctaggtacatgaaaacaaggtgcctgggacacacaggcgcctgcaatagctactgaatgtatgaacagcatgtccttcagtcttcttctttttttttttttgagacagtctcgttcagtcacccaggctggagtgcagtggcaggatcttggctcactgcagcctccacctcctgggtccaagcaattctcctgcctcagcctcccaactagctgggactacaggcacatgccaccagcccggctaatttttgtattttcagtagagatggggtttcaccatgttggccaggccggtctcaaactcccgacctcaagtgatccgctcaccttggcctcccaaagtgctcggattacaggcatgagccaccacgcccagcctcctttggtcttttcaacactttttttttttttttgagacagagtttcactcagtctcccaggctggagtgcagtggggcaatcacggctcacctagctcaggtgatcctcccacctcagcctcccaagtagctgggactacaggcacacaccaccatgcctggctaatttttgtattttttgtagatgcagtctcgccatgcatgttgcccaggctggtctcgaactcctggcatcaagtgatcctcactcctcggactcccaaagtgctgggattacgggcatgagccacggcaccgggccaacaacctttgaaacatatataatcatttacttgccttctacggatgtggaaacgggcacagagaggttaagcaacctctccaatgtcccacagccagtgcaaggttgggccaaatttgaacacagggcagtgccgtgagaagcccttggtctgaactacacttagactcctcttctttggtaataaccacctctgcccgcctgtgctgttcattacctttagtagtttctctacatttgttgagcacctactgtgtgccaggtactggctaggctggaagatgagagagggacagtgggatgaggtctcttctagttcctgccttggagtgtgatcctttctcttcatataaatgtccacttactcatcttgccctgagcctacctggtgccaggcacccgctgggaacaggactgtgggaaataatgggcgcagcccttctgccccattggtgctcacacccatcccttcatgtgcatacacatgacattcagtaatggaaacggcacaggccttggaatcagacagtctcaagtttgaatctcctggctcttgtactcacaagctgtgaggtcttggtcaagctgctttctctctttttttgtaaagatgggatctcccttttttttttttttctttttttggagacagagtcttgctctgttgcttatgatggagtgcagttgtgtagccacagctcactgtactctccgccgcccaggtttaagtgatcctcccacattgcctctccaggaggtgggaccacaggtgggcgccaccaagccaggctaatttttattttttgagacagagtcttgctctgtcacccaggctggagtgcagtggtgcaatatcggctcactgcaacctctgactcccagtttcaagcgattctcctgcctcagcctcccgagtagctgggattacaggcacatgccaccacacctggctatttttgtatttttagtagagacagggtttcaccatgttggccaggctggtcttgaactcccgacctcaggtgatccgcctgcctcagcctcctaaagtgctgggattacaggcgtgagccaccgcggccatcctaattttttaattttttgtagagacggggtctgcctatgttgcccaggctgatcttgaactcctgacctcaagcaatcctcccacctcagcctccctaagtgctgggtttacaggcgtgtagccactacaccaggcctttgactatttcttaaccctctaggcctcagtttcctcctgtagaaaaatgaagatgacagttgctggtggtgttagcacaacgttggtgtgaggattaaataataaggctcgtacagctcttagcatggagcctggcacatagtaaacggtcaacaaacacaaactggccgggctcacgcctgttaatcccaacactttgggaagcagaagtgggaggactgcttgaggccagaagttcgagaccatcctgggcaacatagggagacccccgtctctacaaaaaatttaaaaattatccgggcgtggtggcgcatgtctgtggtctcagctaccggagaggctgacgtgggaggatcgcttgagcccaggaggcggaggctgtagcaaggcgtggctacacaactgcactccggcatgagcaacagagcaagactctgtctcaaaaaaaattgttttaattcgtttcccagaggtttggaggcgtcacactgtctcaagccacgcagtctggcctccccttaattcaacctcccaagaacgctccaaactctcaaagtcagatcttctgcacccgcacttttcattgggcgaaagggagccaggatccgccccacgagcaggaggcagccaatgagagacgcgcgaccaaaacccggcaggaaggcccgcaggctccagccccgggatcccaaggctctggccgcggaaccctgagcctgacaagccccgagacacgtgctcaggccggcggtcccaagaccggtcctcgggtcggcagcctccctccccacactctgcggagcccaatccccagctggggaaactgaggcctcgaggcgctgcccggagccgggtctcgggcccgaacatgcgtcccagccccacgcgcctaccttccgggcccgggcgtcatcttccgcctggatctcaaactcgccgtcctccgagtcgctgccgcgggcctgggaggccgcgcctcggcgcttccggagccctttcttcttcctccactgggccatggcagctcgcgaccgaggtccagccgccgggcccttgtcggccgccattcgggccgcgcgctgggaacgcagaagggggcgtggcctgaggagcgcaccaactgcgtgggggggggggtaggtgcggtgaccacgtgacctccgctgagctttcgccagtgcctgcggccctcggcggcctagtacacacgcacctgagtgagtggcaccagaggaccctctccatgtttagggacctcctgggcctcaggagcgtggcgcccgcccctgggcggactccccccatccgcgggcgcgaatggtccgggccgcgtccgcagtgctgctggctgctccctggttgctgggtgcaaagtgctgggttctgggtttctggattcgcgggccgttcacacgtagcctgtgccggctcctcgggtgagtccgtccgcgcgcggtgccccgggackgcctaggctgccgggggtccggggccccaggcattccgggctgcagattgacggggatcccggatgcaccgcgcgcccccgcgccctcaccgacgggtccagacctggtgggaagaaggtgcggggacgggtccctgaggatcccgatgcctacgagccaagatgctcaggtaggagaacaacccaaaaatgcagggacctcgggcactttttaatcgggtcattgatttgggagtcgcagaatgtggggcggtgggggcggcggtgatctcccgatagcagtgtagccaagtacacaagctctggactcagatttcacttccaccgttttagctttataggtgtgacctacacatgtgacttcacctcagttttgtgatccgtaaaatggacaaattcgaagmtacttcacagtgctgttgagaggattaaatgaaacaatgcttgtaaagctctttgcaggaggtaggcatgggatccacgctggctgtcattgcccccacccccatcagtacacataggaaagtgcctgtctcccctaccaccatagtgtgttttctggttggtgcctaaatagacacaggtgtcatctctccttcaccgccagagtcattctgtaaataattgccagtagcccccctttcaccaccattatgacaactaaaaaaaagccaaagaaatttccaaaatgccccctgaagttgacagctcccctttgagagactggttgagagagaactaaacccttgggatgagaacttcagacactaccggtcttcctccattagcacttctgtggctcaggggtgctactctgacctcctctcacagggagcctcggaagcagggcctggccggcagagcacacctgctgtcaccagggaccacaggcagcatgaagacccccgtggagctggccgtcagtgggatgcagaccctcggccttcagcaccgctgccgaggtggctaccgggtcaaggccaggacgtcatatgtggatgagactctgtttggcagcccagcaggcacccggcctaccccaccggacttcgatccgccctgggtggagaaggctaacagaaccagaggcgtgggcaaggaggcatcgaaggccttgggggcaaaggggagctgtgagaccaccccctcaaggggcagcacccccaccctcacaccaaggaagaagaacaaatacaggtaatggggtagggagatgcaaatcctgtactcagtgcagccacctggattccagttacagctctggtgttcacctgctctgtgaccttgggcaagcatcttgacctctctgagccagtttactcatgtggaaaataggaccaattattcctacctagggggattgttgatggattaaatgagagaggggtctgcagtgcttcgcacagtaacctaatacttagaaagctgtcaataaatggtagtgttgatggttgtgatggtgaactccctatccccaaatgtcacaaactgggcatctgaggcccagaggagtcagctgaggcataagatcacagagaaatttgcataagcttattaatattaatgtgttcgatccttgaaatgacatagatgtggtgtttctgaagtcattttgaaaatgggttttggccacatggggtagctcatgcctgtaatcccagaacgtttggaggttgaggtgggatcacttgagctcaggagtttgagaccagcctgggcagcgtggtgaaactgtgtctctataaaaaatgcaaaaattagccaagtgtggtggtgtgcgcctgtactcccagctcccgggaggctgaggtgggaggatcacttgagcccaggaggcagagattgcaatgagctgagatcacgcctctgcactccagcctgagtgacagagtgagaccctgtctccaaaaaaaaaaaaaaaaaaaaattgaaaatggttcttgctgcatttttatgaacaagttagaaaaataggaactaatgcaaattgttattgttgttaattaattagattagaattagattatttggactgtttcagattaatatcagcctggagggaggtgtctagtggtgagccacagggctctgtcctgtttattgttatcagtggtttggacaaagacacagaagattagcacagtagttggctagggccaccatgacaaaataccacagactgggtggcttaaacaacacaattttttttttttttgagatggagtctcgctctgttgcccaggctggagtgcagtggcacgatcttggctcaccacaacctccacctcccgggttcaagcgactctcctgcctcagtctcctgagtagctgggactacaggcacatgccaccatgcctgacttaattttttttttttttttttgagacggagttttgctcttgttgcccaggctggagtgcagtggagccatctcagctaacctgaacctctgcctcccaggttcaagcgattctcctgcctcaccctccctggtagctgggattacgccaccatgcctggctaattttgtatttttagtagagacggggtttctccatgttggtcaggctgatcttgaactcccgaccaggtgatccacctgccttggcctcccgaagtgctgggattacaggcatgagccaccgcgcctggccacaacacaaatttattttgtcacagtctggaggctggaagcccaagatcaaggtgttggcaggtttggtttctcctgaggcctctctccttggcttgcagttggccacgttctcacagtgtcatcatagggccttttctcatttttttttaatccttcaattacatgcaagggccttttctgtatacacacacacccctgatgtctcttcctctcataaggacaccagttctattggattaggatcccctacccttataatgttatttagccttagttaccttttttttkttttttttttttttttttttttttttttttttgagatggagtctggctctgtcgcccaggctggagtgcagtggcaccatctcggatcactgcagcctccacctccgggttcaaggaattctcctgcctcagcctcccgagtagctggcattacaggtgcacgccaccatgcctggctaatttttgtatttttagtagagacggggtttcactgtgttggccaggctggtctcaaactcctgagctcaagtcgttctcccgcctctgctttccaaagtgctggaattacagatgtgagccaccatgtctggccagccttaattacctttaattaatctaaataattaaggccaagtgtagagacatttggggttagggcttcaacatatgaatttgggtgggcacaattcagtccataagaactggccagctaaagttagggttcattctgaaccacagggacatatttcagatgagagaaatgaaatgagaatgggaatgatacctattataaaaacaagaatcagttattgccagttctgtagacaaggcagggtcaggtggagattagcaacactgatacctacaacatggctgaaaacactgaggtaaagataggctgcattaggaagtatggtgtccatgaaaagggaggtgacaactccttgctcacctggagggtggaattttcttctggatgccaacaggtagagggtgtcaagtgaggggttgcataagaggtagagaagttattgagcaaaaaccttggcaccagacatatacaggcattagccaatgtggtttgagcagctaaaccaagtggcaaaagcttgccctttcaaagacttgcagtttggggatagaagcactttcagtcctggccaaaaaaactatgggcgtggaatcttgcaggtatgccgtgaatatctgttgaataaaaaaaaaaaaaaaaaaaaaggccagacaggctgactcaggcctgtagtcccagcactttgggaggctgaggtgggaggatcgcttgagctccagagtttgagaccagcctgggcaacatagtgagatccctgtctctacaaaaaataaaaatattagcagggcatagtggtgcatacctgtagtcccagctactctggaggctgaagtgggaggattacttgagctcaggagttcgcagctgcagcgagcgtcactgcactccagcctgggtgacagagtgagaccctgtctcttaaaaaaaaaaaaaaaaaaggccgggcgcagtgactcttgcctgtaatcccagcactttgggaggccgaggtgggtagatcatgaggtcaggaattgaagaccagcctggccaacatggtgaaaccccccccgtctctactaaaaatacaaaaattagctgggcatggtagcacatgcctgtaatcccgcctactcaggaggctgaggcaggagaatcgcttgaacccaggaggcggaggttgcagtgagctgagattgcaccactgcactccagcctgggtgacagagcgagactctgtctcagaaaaaaaaagaaaaagaaagaaagaaaagaaaatgggcacggtggcttactcctgcaatcctaacactttgagaggttaaggcagggggctgcttgagttcaggaactcaagaccagcctgagcaacataaatctgatctctactaaaaatcaaaaacaaaaaaattagctgggcttggtggcactgtgcctgtagtcccagctattagggaggctgaggtgagaggattgcttgggcccaggaatttgaggctgctgtgatctgtgactgtgccactacactccacttgaacaacagagtgagatcgtgtctcacaaagaaaagaaaaagtggaggctataaagactaaggttatactaattgtgactctcaattgcaagtgacagaaaacttattcaaactggcttccccaggagaaggcatgtggggctcctgtaacaggggctcaaactgtggctggaactgtctgtctccaccttagtgctgcttttccctgcatgcccttcaatcttcagtaggaaggagatagccacaagctgctttgggctgacatcctatcagcttagcaagaagtaaagtcaggtggcagaaagacatctctttcctagtggtttctgcaaggtcctaaggcagattctgattggacaggcttgggtcatctggccattcgtgaaccaatccatgtggccaggaggatggaatatgcaaattgtccaggcctggggcacatgtctgggaatggggtcaggatgcaggggcagtggatgtttcgcagggaaaatcagcagagaccgggggcagtggtgcttaagaggctgtggcctcgctgtaggtttcagactgggagacaaggactcctgggatctgcaggcaaccctcctctgctgctgccatcccagggtgggtgggagagctgttaaagttttgaggggttgttcatcccccagctcatggcgtttatcttccatttgccagacccatcagccacaccccgtcttactgtgatgagtcgctgtttggctccygatctgaaggcgccagcttcggggccccgcggatggcgaagggggatgcygcaaagctccgtgctctcttgtggacgccaccacctacccccaggggtagccactcgccccgccccagggaggcaccactgcgagccattcacccagctggtccctccaagacagagccggggccagcggcagactcccagaagttatctatgggtgggttacactcttcacgccccctgaagcggggactttcccattccctcacccacctgaatgtccccagcactggtcatccagccaccagtgccccccacamaaatgggcctcaggatctcaggccttccacgtcaggggtgaccttccggagccccctggtgacttccagggctcgctcagttagcatttcagtgccatctaccccacgacgaggtggggccacccagaaaccaaagcccccttggaaatgatactctttcatcagrgttgcctatggggccacrgygacaggtatggccccttgccagggtaggaggacattcatcacccagggaaccccaggtattaaagaagcccctgtgggggcagacagacatagcaggggtgggcagtgcctccctttatcctgacaatctctagtcgattcttgcctttttctcccgattgcggatttgggggccacctctaagatgcctctctccagccctgtctcaaccatactccaaattagtgccaacccaggggcctggcacctcccacatcatccattgtcttgctgccaagtgcgaataaacggygtgattgccaacctggagggtcccctcttatcccttcaagccaagcttcctgctcaggattagtttccagctaagtctgcaagccctagaggagtttttccaggctgtctgtgaagcctggggaacacaacggcaactgggagatttgtgagtgaacactgtttcatcttaatatgcttctgaatttattttcatgtactaaatagatcagctcatcaaagccatgaatgtcactttttttccccctcagggtaaaggccattgttaggcctgagttgatttaaataacaaagttaaatacaacagatagtacaaggatgtggcaggcaacatgacagcggtgagtgggtaactgaagtttgggaatctggggcttcgggaagcgctggactcttcctcccgtcggcttctggctaatgccactaacttgtggttggccggctcttccttagctcagagtacagacaatagtatttttttagttttgtttttaagtttgtttktgtgtgtgtgtgtgtgtgtgtgtgtgtgttaaggtgggaaataaaacacaatggctaggactttgccaagtggagggtccaagaaagccagacagtgacatgtgtgtctgcagagcacttaggatgcagcccaggacttaggaaaagcaacaaagcctttgcgcagatggaattgcacccagattgggcagtgtgggctgggctctgggcctctccttgcccccgtcttcctgtaaggcacctccaggaggcaccaggattttagggagtccagttggaagccacatcatctggttggtacgtctgccttggggcagggaagagtggacactgctggggagggagacctgcagtgcccaggaccagtgacacacagaaacacctgtggggtcaggcaggccagctgtgctctcatgcaaacatgctttgttttttgtttgtttgtttgtatgtttgtttgtttttggtgtttcttttttttgttttgttttgttttttaagacacggggcctcgtttccttgcccaccctggagtgcagtggtgcgatcatagctcactgctgacttgacctcccggctcaagccatcctccccctcagcctcctgagtggcggggactacatgcatgcaccaccatgcctggctaacttcttttaaaaatttttttggactgggcgcggtggttcatgcctgtaatcccagcactttaggaggccgaggcgggcggatcacgaggtcaggagatcgagaccatcctggctaacacagtgaaaccctgtctctactaaaaatacaaaaaattagccgggcgcggtggcaggcgcctgtagtcccagctacatgggaggctgaggcaggagaatggcgtgaacccaggaggcggagcttgcagtgagccgagatcgtgccactgcactccagcctgggcaacagagcgagactctgtctcaaaaaaaaaaaaaaaaatttatagagagggatttcattccttccagtaagaaacaagaaaaaaagggaaaaaaaagagacatgagtctcactatgttgtacaggctggtctcaaactcctggcctgaagtgatcctcccgcttcagcctcccaaagtgctgagattacaggtgtgagccacctcgcccagctgcaatgtgcattttaaacatatagaatgtttaagcttcctggaactttcactaacaattagttactcacgcccacctcagtttttcctgaaacatccatctctcttttgccttcccatcttcccctttgtttccacagacataggccagaaataacctctctttcctggctgggcatggtgactcatgcctgtaatcccagcactttgggaggccaaggtgggtggatcacttgaggtcaggagcttgagactagcctggtaaacatggcaaaacgctgtttctactaaaaatacaaaaattagccaggcatgatggcgcatgcctgtaatcccagctactcgggaggctgaggcaggagaatcgcttgaaactgggaggcagaggcagtagtaagctgagatccaaccagtgcactgcagcctgagcaacagagcaagactctgtctaaaaaaaaaaaaaacaaacctctttcctcctcccaactacagtaaaatctggcagtagcccaaggtgacactaaagggcaacggacaccaggctgtggtgtatgtaaggcagttgggggtggtgaggatgggggcgacttactttaccatctaatgggggctgctgctgctgagccctaggagatatgcagacctgggatatctggatgattagatttttttccagaaaagggagagtgttggatttctacatggtagccctcagttttttaaatgctgacaaataatttaaagataattgttcaggccgggggtgatggctcatgcccgtaatcccagcactttggggggcccaggcaggaggatcgcttgaggccaggagttcaagaccagcctgggcaacatagtgagaccctgtctctacctacccttttttttttttttttttttttttgagacagggtcttcctgtgtcactcaggctggagtgcagtggcacaatctcagctcgctgcaatctcgaccctcccagactccagtgatcctcctacctcagcctcccaagtagctgggactactgccgtgtgccaccatgcctggctaattttttaattttttgtagagacaaaaaataaaacatggggttttgccatgtttcccaagctggtctcaaactcctgagctcaagtgatctgcctgcctcagcctcccaaagtgctgcgattagaggtgtgagtaaccactcctggcctaaaaattttttactttaaaaaaaaaaagttgttttaaataattgttcagctccctggaatgtgaggctgagggctgctgtgacctcaggactccctctgagctttcacagtgctagagcaggggaagttgcaagcaaattaatcccagaacagggttaggggcagcctgaaacctgaggccccgctcctcctggagttccctgcctgcttctttgccccctatgggcagctgtgacccacaccccgctgccctggtgagtgatgtgtccatcatggccatggcagcttccgggctgcagctggggtctggtttcccactaaggctgaagtaaggaaccataatctctgggctgacaccccaggctgcacgctcctcatggaaacaccatctgtgagctggacacacacagcccacagccctgggtaaagagatttattcgtagagcgttcccttcaatgtggcttcaaatactttttaatttattaaataaaaacatgaaagccgtgaatttagtgctctccatctcgggccttcctggcctggtctctgggaagataagggtcaggagcgggctgggtggagagctcatttcttgcccttgcccttctccttgcctttctgcttgcccttctccttgtcctttgctttgcccttgccccgcttcttcttggatctgagcagggagcgcaccagatagcccttccatagggcctggatgagcgtggccgcccgtaccatgcgcaccatctcctgctctgcctccatccttttcttggagttgatctcccgctcttcccggatctgcgcaaactctcccaccagcactttgtgcctccgcctgagctcctccagcgagatcttctcctccctgtgaacagcgtccagatcctccaactcctcctggggtgaggggtggggctggggtcaccacacatagagtgcctcctcccaccctcctccctgaggcccccttacccttcccaaatggtcttctgccccagcgatgcccctaagctaagctgttcagcatctctcggtcccagtgacatggatggggagaggggatgggctccatcctagctctaggaaggacccaactgaaataatttcaggaacaggaaaagaacatgggcttgtgagttgggcagacttagttttaagtcccagctctgccacacctcaactgacttcacctttcgggccttcgtttttcctcatctgaaacatggggacgattccgaagccaggggctgtttctaggattaaatgacccgatggacacaatgtactggacatgatgccaggcacacagtggggacacaagaaatggaggctgctgccatgaaagcagtctgttccacaagacaccagaggagaaggaactttctcaggcctcaaacggagtcccagagttcttccttatgtctaaccatagcctctcctgctgtcatttacacccgttttccttccttccactgatgttttcccagcatctacaaaaagcagagcactgccagaggacacagagctgggtggacaaagtccctgcccgcaaccaacccacaaccctcatgggacccagagaaatgagagcccccgcctgcaaagctcccctctccaggccctgatggttgcccaggacaaggttctgacttgcccttctctgaagagcacacctggctttggctcactccagcgcatattacctccagtgctctccagtgctccccagtcctccctggcccctgggttggagccatgggccaccaatgttatcccagtgctgggtgaagggtttgggcgtgtctcgatttgaaggttaccaccccctgagcacttccctccaggccagaccctgtgctgggcacacacacttgcagccatggtgtctcaccgaatccccgccatggtcccaaaatgggaattactgcctttgctaatcagatgcagaaacgggcttgggaaggtcaagtaccttgcttaaggccacacagctggcacatctcaggtgctcaataaaaactggctgagtgactgagtgatgcagtggaggcaggctcccatctgagtctgtgggaaggagccccaccttgtaggggtgctggcaggagcccatccagaggagtatgggatgtggacactagatggagccatgatcattaggcccagtgtcagagtgtcaggcccttctagccagtcgctttttttttttttttttttttaaattaatagagatggagtcttgctctgttgcccaggccggtcttgaattactgagctcaagcgatcctcccacctcagcctcccaacgtgctgggattacaggcatgagccacagcacctggccttgcagcttctggctcttttctttcccacctctcactctgccccaggctggacaaaccctttaaacaaagggaagtgctccctgcagagaggctcagaagtttgcccactccatggaccatcccaaggctacttttcccattcatcccattcctagaaggtcttgggaaaagcatgcgagagagacttattcagcgacaaatacctgcttctcacccatctctgtatcatatttctggatccagttctcgatttccgtttccactttatatttcttctagaaaagatccaatttgtcattgtttgatggaatatattaacaatcaacagcactgagcactctctgcatcactaggctctggcaggtgcttgacatgcctcgcctattgaacaaggaggttcccttttctccatttcacaggggagagaactgaggctcagacatgctatcttacttgcccaaggtgacagagctaatgggtggcagagcctgaatttgatgccagcagcctggttccaggacatcctaggcagagaaagcagcaggtgcaaaggccctgaggtaggaacaagcttgtgctgtttaaaggacagaaatcagcctggcgtggtggcttacgcctgtaatcccagcgctttgggaggctgaggcaggcgggtcacttgaggccaggagtttgagaccagcctggccaacatgccaaaaccccatctctactaaagatacaaaaattagccaggcatggtgatgcacacctgtaatctcagctactcaggaggctgaggcaggagaatcacttgaacccaggaggcagagtttgcagtgagctgagatcatgccaccacactccagcctgggtgacagagcaagactgtctcaaaaaataaaaattaaaaaaaaaattaaaggacagaaatcaagccagtgtgactggaagggagtggcgaggaggaaagtggtccccaacaaggtccaaggaaaaggctgtgtcacagagggagtgtcagcaagaggaggctgtattctcaggaaagggtgaggtgaagccactgggtgatttagatgcagtggagggacatgatctaatcttgtttttaaaagattatttccaccataaaaagcagtgaagcactgatccatgctacaacatgggtgaaccttgaaaacacagtgctaagtaaaacatgccagacacaacggccacagaagattccattcatatgaagtgtctagaataggtgaatccacagagacagaaagcacattagtgattgccagggacagggggaataagggaatggggagtaacttcttaatggatatggagttttattttgaggtgataatgttttggaactagatagaagtggtggaagtgggggtggcacaacatcgtgaatatactaaatgccactgaattgctcattttaaaatggttttatgttatgtaagtttcacctaaattaaaaataagcaggctgggccagtggctcatcccaaccatttgggaggccacggtgggaatgggagaattgcttgaggccacaagttctagatcagcctgggcaacagagcaaaa

SEQ ID NO: 98167 - DNA, 15982 bp, Homo sapiens
gcttcatgtctattatagcataaaatcaggacagaactgtttatgtaacattagtatgtaatcatacagctttttcaaacttatatacatatctgtatattatttaaatgcaaagtatgtatgtatatatttatatgtatataatgtattttatttttattggctatttttataaaaactttttttaactagaaatttaataatttcttccatttatatatacatgcaggaaatactaaagaatgaaaaacacagagaagaaatcaaaataaaaagccaagatttttatgaaaaagaaaaactccttagtaaagagaccagtgaggaactcctgcctccaccagttcaaactcaaattaaaggccatgcctctgctccatactttggaaaggaagaaccctcagtggctcccagcagcactggtaaaacctttcagccaggatcctggatgccacgagatggcaagagccacaatcaatgaatgcattatggtcaaatcttttcatgtatatggatgtgactattttaacaaataaaagaagtgaaaagttatttaccttgtattttctgaatgtacaatagtttcctattctattaatcttaagagttcatttttagtatgcacaagaaatgtgagattatgtactatagaaacctaacttcttttagacttaaatccttcatttgacttagtcattgttatttatgaatttgcttagatttgtttttccctctttggattactcccttgagaaggatcctgtagctgtgaatgcttagtacattttggatctttatgatcatttgggaaccactcatagatagaactgggtacaaataatgagggtaaatatttttccctctttggattactcccttgagaaggatcctgtagctgtgaatgcttagtacattttggatctctatgatcatttgggaaccactcatagatagaactgggtacaaataatgagggtaaaatagtgagctctcccaactgatcaaatataggagaaaaaagaatgaagattcttatttctggagaggtgacctgtaagattctaaaagactaatcaaaaatgtgaacttggataaaacatgtagaggcaaagaaaacttagttgataagtgaaaaaaaccactaagaccttgatgagaggatgggacaaaagctagcttatggtgggactctggttggaatttgaagagaggaattaggaccaatagaagtatacaatccataacaaagtctgaaaggacagtagagaaagaaataatgcaataactggagttccatgagaacgaaaattactttgaaaaaatagaaaattggggaaagctctcaaaaagcagaaattaatttcactagaagacagaagacaatgtacatgttaaaacattacatacaaaagtacattaaagggccacacattttctggagtgtacaaccaagtttttgttgttattctaaaagtttttctcacaatgtttggcatacaatagatgctcaatatttgctgaacgaatgacccaaatgtgtgtgtgtgtgtgtgtgtgtgtgtgtgtgtgtgattacaaatgcttttcttttgtatttttttattattatactttaagttctagggtacatgtgcacaacatgcaggtttgttacataggtatacatgtgccatgttggtttgctgcacccatcaactcatcatttacattaggtatttctcctaatgctatccctcctctagacccccaccccgcaacaggccccagtgtgtgatgttgccctccctgtgtccatgtgttctcattgttcagctcccactaatcagagagaacacgtgttgtttggttttctgtctttgtgatattttgctgagactgatggtttccagcttcatccatgtccctgcaaaggacatgaactcatcctgttttatggctgcatagtattccatggtgtatatgtgccacattttcttgatccagtctatcattgatggacatttgggttggttccaagtctttgttattgtgaatagtgctgcaataaacatacgtgtccatgtgtctttatagtagcatgatttataatccttgggtatatacccagtaatgggattgctgagtcaaatggtatttctagttctagatccttgaggaatcgccatactgtcttccacaatggttgaactaatttacactcccaccaacggtgtaaaactgttctatttctccacatcctctccagtatctgttgtttcctgactttttaatgatcaccgttctaactggcatgagatggtatctcattgtggttttgatttgcatttctctgatgaccagtgatgatgagcattttttcatgtgtctgttggctgcataaatgtcttcttttgagaagtgtctgttcatatcctttgcccactttttgatggggttgttttttttcttgtaaatttgtttaagttctttgtagactctggatattagccctttgtcagatgggtagattgcaaaatttttctcccattctgtagattgcctgttcactctgatgatagtttcttttgctgtgcagaagctctttagtttaattagatcccatttgtcaattttggcttttgttgccattgcttttggtgttttagtcatgaagtcattacccatgcctatgtcctgaatagtactgcctaggttttcttctagggtttttatggttttaggtctaacatttaagtctttaatttatcttgagttaatttttgtataacgtgtaaggaagggatccagtttcagctttctacatatggctagccagttttcccagcactatttgttaaatagggaatcctttccccatgtcttgtttttgtcaggtttgtcaaagatcagatggttgtagatgtgtggtgttatttctgaggctctgttctgttccattggtctatatatctgttttgttaccagtaccatgcgttttggttactgtagccttatagtttaaagtcaggtggcgtgatacctcctgctttattcttttggcttaggattgttttggcaatgtgggcaaaaaaaagatttttggttccatatgaaatttaaagtagttttttccaattctgtgaagaaactcagtggtagcttgatggggatagcattgaatctataaattaccttgggcagtatgaccgttttcacgatactgattcttcctaaccatgagcatggaatgttcttccatttgtttgtgtcctcttttatttcgttgagcagtggtttgtagttctccttgaagaggtccttcacatcccttgtaagttggattcctaggtattttattctctttgtagtaattgtgaatgggagttcactcatgatttggctctctgtttgtctttcttggtgtgtaggaatgcttgtaatttttgcacattgattttgtatcctgagactttgctgaagttgcttatcagattaagatttttgaatgacccaaatttttatgctctgaatatcttggttaagcattaacaatgaatgcctaaaaacacataaattaaaatttttacttaatagcaggtaaaaattttaactgcctaagaaatacactacagaaacataaaactgcataaaacatttatactaaaacaagtaatcaaatgacaaaatcaccacacttaatgacaaaaagcccaacattccagcagccctgttatataatatcaggttaaatattttatcttattacatcattacaaagtgatactacattttaccacagaggcaaaaaaggaactagtcactaggtaatatgaaaggagatctatacagccagcagggttgctcagacctgtaattccagtgctttgggaggcaaagatgggaggattgcttgaggcctggcatttgagaccagcctgggcaacatagcgagaccccatctctataaaaaaaatttttttttttttgagatggagtgcagtggtgccatctcggctcactgcaaccttcacctccagggttcaagtgattctcctgcctcagcctcctgactagctgggattacagatgggtgcaaccacacccagctaatttttgtacttttaatagagacggagtttcatgaccccattcgagaccatgttggccaggctggtctcgaactcctgacctcaggtaatccagccgcttcagcctcccaaagtgcttggattacaggcatgagccaccacgccctgcggcaaaatttttttttaattagctgggcatgatggtgtgtacctgcagtcccagctacttgggaggttgaggtgggaggatcacttgagcccaggatttcaaggctgcagtgaactatcatcaggccactgtactccagcctggtgacagagcatgactctgtctcttaaaaaaaaaaaaaaggagatacaatttgtgatatagttgggactgtgaattgagattaagatgttcttaactcctagactggattgtagagaaaactgtaaatgttttaacacactagtgtttctactgccaaattcctgttatctcattaattgcattccatatacaccttttgcaaatgtttaccatatagtctgtgtttcccaaactttgggtatttgaccatgtgatcccttttaatatgtttgagaaatgcagaatttgtccttaaatatttattccagatatgaagtaaatcagcatgattctataaccagtagcaaatataaaagcaatcattcctaaataggatcaaattgcctccaacttagaaccatataaaatataaggtctatttcaacattaggtttccagcccacagcttcctgtgcttttttttgagacagagcctcgctctgtcgccaggctggagtgcagtagcatgatcttggctcactgcaacctctacctcctgggttcaagcaattctcctgcctcagcctccccagtaactgggattacaggtgcacgccaccatacccagctaatttttgtatttttagtagagacggggtttcatcatgttggccaggctggtcttgaactcctgaccttgtgatctgcctgccttggcctcccaaagtgatgggattacagacatgagccaccgcacccggcctcctgtgcttatttctagtttgcttattataaacaagtaaaatttaaaatgtccttatatatctgataactagtaatatgctgaaagttatcatggatactatggctcaagttctgacatacaaacttttatttatttgctgatttttgataaaatgtttgttagaggcagccaggggacagctttctttctcccccaagaccagctttagaatggtaattgattgtacttagttctcagaacttcagaaacaatgtaataagtaaacaatttcttaaaagtattctagataatagcaaatgggattctttaacaacagtactctgttgcagtgagaggtgatttttctgaagaatcccaaacctcacaatattctctatactccagccccttacacacacacacacacacacacacacacacacacacacacactgtaaagtatgaatctcacatatatagaaaggctctctaaatgatggaaaaaagtggaaaaaaaaagcatatgtcaaacaaatacaaaactggcatgtgttaagactaataaattatagaaaaacagacctttaaatacctttaagttgttacaacagaactgatgaaaccataactttagtaggtaactgagaattatgactatatcctttgcttcaatacttttactctaaaatgtgaccctaagtaaaacatgtacataaattctttccatgaacagcttgattgcagaaaaccaaacatattatagatatatcttaacactgaataatttcagtgccttgagttataatgtgttgctcacactggcaccaagtagagactgataatctaaaagaatagcattaagtgttattcaaactggtccataaacattctcagtggtccttaggttctgagagatacagtcctgaaattttacaagtatgcttagctgtaactgaaattctaacttgcataacataatgtaacttaaaatgttagttcctccaaaaaaaaaaaaaaatccaggacctctttataaaaaattatcaaatttattttaatgtctagtttcatttttaaactgtagctgctagacaattttttgtaatttaaaattcattaatgggtacagaaaacattaataagctgacagtgaattaaatactaacagkgaataaaattattggmccatgcatttataaaagccatgtttaatagtaaaacgttccagttctactaaactgaaagaaacatcctttagctccctacttccaattacagcacattctcattttgatataatttatccttttcacccaatcactactatgcccaacaaaatgtttccaaattttatacctttctttaccacttatgaagtatggcgtaactgttacactttaagagttctttaaaagaaatgtgaaatttaacgttttactttgaacctgtttgatcagaaagtattaaatatcactaccacatgagttaaaacaaagaatgaaataaaaaacaaatggtgtctttgtaatcggcgaattacttgataagacattttaactattttacagttctgcttagcacaagaataaactgggttccaaggtactacagtgtttggcatttttactgcaagctttaaaccatagtgttactcctctcaagccatctctaagaaaatggcagtgtttgtgagtacaaaaattgttctgtccagtaggtggtattctacatagtcgagataagagaattctttataaaattatgttttaaaaaatggaaaatgacttataattaccagctgtctcaaaggctgtaataagaaaaatgcagcaaatagaagtactcattaatattattttgttttgagaaagccagaaatgattctaagaaataaacaataataataaaagatgtaattaatatactgtatcccttttaagccaaagcacactttttacctcaagactgttctgacttttacattcttaatttcctttgtccaaaataggaccccattttaaatagagttcatttgaattgagttcataatctaaagtcacttttccccacaagatgttttcatttcagtatataaactgctaagcggcaaatgactaagtcagttataaagaatttgtaccacagtaaatgctaatttacaataactgtcaatagaaacctataaacttctacacccacgcctaaaagttactatagtattgaggtcagaactaacatgattcttccatttggtcaaatttcatttactaaatcatactgtcaagaaatccaaagaagaaactttagtggattcttccaaagctgtgtaattttccaaatgattttcctctggttgcaaagcctgttcagtccttcaatccttttttagtcgtttagcttttgcaatgttttcttggcgtttttgcttcttcttttgctccttctccctggcctcaatcatcttggccaatttccaagacagtacagcacttgctargaacagtggagtaagggccaaaataacggttgtaaggaagccataggggtcctttgcagcccattccacaayatactcagcccaagcctttatatcaaacatcttcacagcagtcttatgaaaactggggctrggggaggcgggtggagaacacagaggaaaaaaacaggagaaaagactatgtggttaatcaaattttgaaaaagtttcctcacacaaccagttaactcaggattccattatcactcagtttgcttttttaaaaagtacaacttagtactattgtaataaggactagtatctctggttaggaaaaagtaattcatctagtacagccagaatagtgacacttcaaagaggtaaagttatagaagawttaaaaaagccatgtgactctgtcataaggactatgcattctcacatgcctcctatatycaagacaaactttatttaggaggaggcttttataaaaatcttgagttttctgtggtcattccaggaaacagctgaatacagtttgtcattttttgacatatccttagtattactaattaacaaaaatacaaatcagcaaatttggtgtttgaaaaggacaagcaacagagcatgtgaaatgctcgcagagaaggagagatgactatttccccgaatgggaaggagagggtaagggagtcatgacatcgcattaatatgccaaagaagcaaaaagtactgtgctattttatgccctttcagctttgaggacctctgttggaataagcctaatttaataaatgagaaagtagccttaacagatgccatgtgttttgttcctttttgagtgtaaggaaaaggcaactggcaaatgaggattatgtgacttgagtgacgttttctattttgccccagaggcttttctccctttcatgtttgtgtcaaccgctattcaaagtggagaattagaatacctgggtagggaatgagtgtatatacatccacttacaatttcaactggaatttttttaaaaaaatcatctaccttatgcttgagtagtgatcccttaactttgtcctggtgttattagtgacccaatcacgacttcagatgacccttggtagtctgtcttcttgagttctactgtacacatctgagagacggtttaaattctgtacaattggctagttggaaagaatacaaaaaataaaacaaaatttaagtcacaatttcaggataattgtaataaaattttaaatggaaaatttctatattgtatatatgcaacctatatgacatctaaaattgcctatccggtatagtaacttaatacgtttcttcctcatttgaatttacaattgcaaatgccctgtaagaaaatcctaattactggaaatcaagtattttactaagttacttatttcaataataaaatttttttagttcattgacatacgggagacaagttggctcactgactgacttacacagcgtatccgytcctagattttcaatttttatactaaaaatgttgccactcatttatttactggattaggtacaccactacaaaatcaaacagctcatcttactctttataaaggtktttttgggtccatcayacaatttgtgtcctttacttaaaaaattagaagacataaccaaacaaattatagtaattcacccacagtcccattaccccaagaaaactgtgactagttttaattatatcttccccacgattttcaactgaacacacatgaragtgcmtaatacgttaaatatcttagctcstggacttcatacgacctcacccayacagttagaattaggtactactgagatcgatctgccttcaccttctccagcccagtagcgaataaacaatgtaagtttcagaaataagcaaaagaactttgcagtaaaagagccatggkscacaggccacacatctccctgcaactcaacttcggacccaaacgctcgcgcctccacactttcaggaataaatcctactcttycgcccaaaacggatcgaccaggctcgatctcccaaccagacccgcgtggcccctgcggctgcaacgggtagcacttgacggccgtccgcacttcctcctttgtstttcccttattccttacgtttctcccttgctcactcttccctccttaccctatcggggctgcagacccacggaggccacgttcactcctgcccgtcggccttggcaagcgcgggccccttgtcgcgcasagcggagggtcctgggagatcctgggttggcccagccacaccttgcgccgccgccgtttctgctggacaccaggagaaaaccacggcagctgcagccaccaacttyccctacatagccccacgggatcggatcccactccccactcaccgccagaccggaagcaggaaggcggaagtcgcggcctttgcgtcccgcccacaggcgacccgagccgccagccgggcgtgagtaagtctagggcccagtttccggctgcgccattgctgtgtgggtcttgggacctcgagttggaggacgcgggagggtgggggcgggggcagggcagcgctgagatttccggggagcggcaggtgaggccgcgcggggcgggtgacggcacccgggcgggctcctttccaggctggagcccgagactgccacgtcctgcggggaccaagtggtgggcgaggaggcgtggagcggcttcaggactcgaggagcggttccgaagcagctagggacttttgcctttgccccccgaggtcgatcggaagacaacccccatcccctgctgtagcgggacagttggagggtcatgggtgggtgaagtgtttggctgagggaaactcagaccaaagagcagcggcaagaaagcagttgggtccccacaaaacgcccgaagtcaaggtgagggtcacacaacgactcttgacgattccggcgagttcatcctggtgcacatcccactccatgcctctctcttctggttggacaatagttacatccttacgaaaaggaggcaagctgctgggccttggtggatccactcaaccttgttaccaagggacatgccgccatgctatgtgaaaaggggggttttgttgtttgtttttaatttaagtatctaattcgtttcacgaaagaatgatcaataccggcccagagtaaacttgataagtaattaaactgtcagggcatagagttcccatagaggtgcttgttctttcaatacacaaataaagggatgcaaaagtcaacatgcagaaagggtgagttaatattgtcttctcatctacaggaactgaaagattagctaatctggtttggttggtgaccaaattttgtgattgcttgcactgtttgactacctctgacaaatgttgcaagacctcttcactgattctccaaagactatagaatgttctctttcaggagcaagctgcgacatgtttaactagtttaggtaaaacaacaataactgttatttaccagggaacaggcttttggcagataatctaacgatctacgatactgttcgttgggcatatgttaatgtttgtaatgttgtattaccagcagttgttttcttactcctttttatttgaaaacctggatgatagtttcaaagcctatgctgcttaggcctagcctgtaccttagtagccagaaaaagtagactcagtcactggattgtgtgcactgaatacttacttgagataactgatttttctaaaacttccccaagtcttgaatccaagatgtgggcagaatgtattattttaacatccttcgttccagaggccaatgcgtgttttattttaatcatgatagatggttttcccagttactgcctccggatacttgcagtgctgcatccctagttaaaagcccagaagtcttgggcaggaaggaagggcatataaagagaaagcctttgtagttctttagctgtaatctagaccaggggtccccaacgacggactggtacctggtttgcagcctgttaggaacggggccgcacagcaggaggtgagcgatgggtgagtgagcatttccgtctaagttccgcctcctgtcagatcagcagcatcattagattctcatggtgcgaaccgtaatgtgaactgcatgtgcgagggatctaggttgtgcgctccttatgataatctaatgcctgatgatctgaggtggaacagcttcatcctgaaagcatcccccatccccgtccatggaaaaattgttttccacgaaaccagtcctggatgccattaaggttggagactgctgatctagaccatgcctttacaatctaagtttgctcatctagcttcaagttacaggacagtctgcaagaccaggaacagcataggggttgccacagtggagctccttactgcagtctgcattgccttaactaaaggtggtgtcaggattgattcaaatactgtgaactactttccataaagagaagtctgagctcgtgaactgagattcacagttgtggtacagtaatgttatgtatactctgataaatcactctgagtgtgtttccacttagatatgtggaaagcatactaggcaatctccaatgccctttcagctttaaaatctgtaaattggactggatttggtcatttttcttaaataaatagcatagtaaggtatttgatagaaacattattgcaagttttcttaaggtcttttttttttttttttttttaattttgagacagagtctctgtcaccagggctggagtgcagtgctgcgatcttggctcactgcaccctccacctcccaggttcaagcgattctcctgcctcagccttctgagtacttgggactacaggcgggcatcaccacgcccagctaatttttgtatttttagtatagatggggtttcaccatttggccaggatggtctcgatttcttgacctcgtgatccacccgcctcggcctcccaaagtgctgggattacaggcgtgagccaccaccgcgcctggcctttttttttttttttttttttaaacacggtcttgctctggcccagctggaatgcagtggtgcgatcatagcccactgcctcttcgaactcctgggctcaagggatcctcactcctcaccttctgaatagctgggactacagccacaagccaccatgcccagcttagcatactcattattttttaaacctatgaccagtgttaattttctgcttaatgtattcagttctaagtcaagcccaactagagagaatgagtttcagtgattttttttttttttttttttgagacagggtctcactaagtcacccacgctggggtgcagtgggtccatcactgctcactgcagccttgactgcctgggctcaagcgatcctcccacctcagcctctagagtagctgggactacagatgcatgccactatgcccaactaatttttaaaaatttttttctagaggcagggtttcactctgttgcccaggctggtcccaaactccttgcctgaagtgatcctcctgcctttgtctttcaaagtgctggcactacaggtgtgagccactgttccaggacaagatcttatttctttgtttgaaaagatccttaatcaggtttttattctctcaaatgtctgtcagaatacgaatttagaataacaaggaaataaggtctgctttatttacttttaagaaataaaatattattcatgtaagtttagccaaactaactaaacctgatgctgttaatgaaatagggcctgcctttgcataagataattcctgtgtagtatatcacaccaccagcctcttcagcactagtgtactctattgcaattatattttataagtagagccttataaaattcttttgtctattgagaatggaagtcctgtggcagtcccatgccattttttttcttaaaaagtatttttcccttgattggtgcaaaattatatctcattctaacccatgtcaaagttgtaagtagtgaaaccagaataagattcagataatattaagataataatatagtttaataataacaattgagtgtgtctaaaagactttgagagttctcttacctgcatcttactttgatggaattggtttcttccctaaattttattttgtgaggttttttacttccattgaaacataatgcaaaacatttcttaataggcacatttatgtaatatttatttatttttatttatttatttattttgaggcagagtctcgctctcttgcccaggctagagtgcagtagtgcgatctcagctcactgcagcctccacctcccaggttcaagtgattctcctgcctcagcctcccgagtagttgggactacaggcgtgcaccatcatgcccagctaatttttgtattttttgtagggatgggtttttaccatattggacaggctggtctcaaactcctgatgtcgggtgatttgcccgcctcagcctcccaaagtgctgggattacaggcctgagccactgtgcccaggcagtgatttttttttttttagcataatcagattttagtgatatttgaaagtttatacagaagaataattttttttaaagctacttattgtggccaggcgcattggctcatgcctgtaatcccagccctttgtgaagcagaagcaggtggatcacctgaggtcaggagttcgagaccagcctgatgaacttggtgaaacccgtctccactaaaattaaaaaattagctgggcgtggtggcacatgcctgtaatcccagctacttggcaggctgaggcaggagaattgtttgaacccaggaggtggaggttgcagcaaacagagatcatgccattgcactcctgcctaggcaacaagagcgaaactccatctcaaaaaaaaaaaaaagctacttattccagctctttgggaggccgaggctggtggatcacctgaggtcaggagttcgagatcagcctgaccaacatggagaaaccccgtctctactgaaaatacaaaattagccaggcatggtggcgcatgcctgtaatctcagctgcccgggaggctgaggcaggagaattgcttgaacccaggaggcagaggttgccgtgagccgagatcgcgccaccgcactccagcctggcagcctgggcaacaagagcaaaactccatctcaaaaaaaaaaaaaaagttacttattgagtacttagtatgtaccaggtgctgggctaggtgcttcacacttattatcactaatcctgaaactaaacaacaccacaggattgtatttttatactaattttacagatagggaaccagagactttaaaaataaagcaggaattttaagtatatctggccaaaatctctgctcttttttaatcgaaaaacaaaaccattgtagaatcaaaaaacatgctttcattctatgaaatcagcgttttttgtctttcatttttcttgacaaaaaatgctgattttataatatgaaagtatgttttttgattctataattgttaacagataataactaaaatccccccaaacttcaaaattgcctattgcccaggtggtggcagcatgtctcagagagccaatgtgctggggaaggttttctccaaccttgccagttgatcggcttcttcatcccacatacatgacattataaacctctcaattctctgttgggctctttcactgctattagaccaacccatcggtggttcatggtcccattagcctcatcttctgaatgggtcatactctgcctgtttcagcctattttccctgcaaagtgtgaccaaattgttttctggaaaactcatttaggcctatcctataagttgtttcagttagtatttttccaaccattattaaatgttgtttggcagaaacacctcctaaactgttagttaatattattaagaaatgcttgtttaaattagaaggcatgtgtctcaaactttggaatacaccaattaaaggagataatgaaaagcttataaaagatagaggccgggtgcggtggctcacgcctgtaatcccagcactttgggaggctaaggtgggtggatcaagaggtcaggagatcgagaccatcctggctaacatggtgaaaccccgtctctactaaaaatacaaaaaaattagccgggcgtggactaaaaacacaaaaaattagccaggcgtggtggtgggtgcctgtagtcccagctactcaggaggctgaggcaggagaatcacttgaacccgggaggcggagcttgcagtgagccgagatcgcgccactgcacttcagcctgggtgacagggtgagactccgtctcaaaaaaaaaaaaaaaaaggatagaattagtcttcaaaataagaacaataaaattcaatagggagcagtacaaggttatataa

SEQ ID NO: 98168 - DNA, 87871 bp, Homo sapiens
catagtgagacctcatctctacaaaaaataaaaatgaagttaaccaggtgtggtggagcatgcctataatcctagatactcaagaggctgaggcaggagaatggcctgagcccaggagttcgaagctgcagtgagctatgacttagccactatactccagcctgggcaacagagtgagatgccattcttttaaaaaaaaagaaaaaaaaaaagaatgtagcctcaatagagaattatttattatgtccaaaagagcacaatgaaaacatccccaacaacacataaacctatatataaaatatagaatatctccagtatttttactttatatggcagcacgccaatatatgcaagagaacatattgatggggcagggggaaaactgatccgggcaatgacacagtcaggcattacattcggagaccaggtaaacagcaattttaatctgaaaagcagtatgagaagagttcctatgaagctgggatttacatacttcattctccgttcctggtcatttcatccacagcttgactgttgtcaatcatggttccttgcctttggagtggtactataaaggtacagagaatgcccatctcagtaccaaaatttcaccatgaaaaatcataacagaaatgacaaagcttaaagaaaagtacgccggatttcagaagtatttaccataataatttttaagaaagcttaccataaatacttccaaaaacaacaggctttacaaaatattatacaacatcctgtgtacagcagtaagtatactactcaggccatttgtcaagctgtttagtaattagtttctcatgtaccctcttgtctcaagaaggtcaataatcatctgatttcctctctagctaatgatctgttgttagcctacttttaacaatggaagaaggaactggtatatgttttaagtcaaccagttctccttaagtctcatagtttctgtttcaacatcatgttattgtgtacttacagaagcaatctctcagttaggaaaaataaaatcagtttcagggctcagaaagtaaaaagggaaattctttcccaatctccccctccctcccacccggctttttttgtttaaaaaattaaattaaatttaaatgtacaagaccaagcacaggcactttccaaaaaacaaaactgaagccaaatcacaaaactactcaatagttatagaagacagctctgattttggggggtcatctctggttgcctcagcacaagcactgctctttggctgctctggcacttcttcctctttttctgccagcccaccaagagaccccaagggaaaagtgctttcacaattctgggttgaggagacctgtgaaatgacaggcatttgaacagaggagttgctttcaaaaccgtgttctccaagatcatattgaacaagggtctcttcttgttcctggtttaagtagtccggtactaggaaatcactagataagaggcaaaggatgaaatatggaattaattttcaaaccagtaatagataagcaacagtaaaaagctctgatttatacaacaaaattgggactcttcatttcactaattgttcagtgaagattaaaactcaggaactttcaacttataaactttcctaaatatgaaccaaaacatccattaaaaccaaaatgtatcaatcttccccaccaccaatacatcaggttaattatcactttcattataactctggacaccttaacagcctttcttgttctatgtagaggagtttctatatacaaaacaaatgtagcatgctcacttaaacaaagatcatctgagtaactttaatgctaaacttttcttgattatacattgagtaagagatatataaacctagctttgtattactaaacttgacataggttagttaagaaactaagtccttatgcataaatgacctgatacataatctactataaagttgggaaatgtagaaagtaatttatgtgtatcctgctattacatttggtatatgaaaatactaataaagaatttggaaatgaatgccttgagattggttatgtgataatcctcaaaacgtgttcaattattggtccccacaggcaacatggacagtaaaatatactaaaaacagtggctactttccttaagtgatgaaatagaaaatattttaaatttcttcttcatacttttctgtatttcctaaatttcctacttataagcatcttttggtaattgaaactaagtatgtgaaataagtcttatcttagaggctttatttaaatctttattactgaactaagaacttcattataccataattgtcaataatatatgtacttagacttgataaggttattttataatttcattgttcagtattaataaaaaattaaaatctgttcatctgcaaagtaatttagaatgccctatgttatattttctaaaaagtcttcattcaggtgttagagaagaagaatggagaatacagggctctgtacagggacgataaagataacatgagtagttaacaggaacactattttagtcctgaacaaactatgtttaatatgatatgtataacctaaggtttagtgatatggcaaccacacattcagaattagagatgactgcattaaacaaaatgaatgtctggtttgaagggaaaaacaaaatctacgcaggaataatttggaatttgtttacaaataaggttttaagtcaggggtggtgcccacacttgtagccccagcaggagaactgcttgacctcaggagttcgaggctgcagtgcactatgattgtgtctatgaacagccactgcacttcagcctgggcaacactgcaagaccctatctattcaattaaaaaaaaaaaaggttttaaaaataagggtgatttaaaatgtaaagatttgggctgggcatggtggctcacgcctgtaatcccacagcactttgggaggctgaagcaggcggatcacttgaggtcaggggttcgagatcagactggccaacatggtgaaaccccatctctactaaaaatacaaatattagctgggtgtagtggtgggcacctgtaatcccagctactcaggaggctgaggttgcagtaagccgaaatcgtgccactgcattccagcctgggtgacagtgagactccatctcaaaaaaaaaaaaaagaaagatttgtaaaaatttcattttatgagaaactaaggattcctacagaagtacaattcttataaacaatttaaaacaacagttttatatctagagaaggccttagaaaccatcgtttaaagcttacattttatctttctctaagtttcaagctttttcatgtgtaaagtgacaggtttaatcaacagcagttagtggcagagctagatctagaagctgatttcctgggatgccctataaatcagaaaggtaattctattataaattaatattacaagaatagagctctaaactgaatgaaaatagcaatgacttcatgatctaaaccatcacacccactatagttgcctttgaaatttttcttactggccaatggctattcctttatatagaatatttttaaatagagagaagtggtaaagaattttattaacatctagagtctggagtaatccagtatcactaagcatcatctgacatggtaaaatttccagtaagatctatttaaggtccattacagaattacttaaaccttgtattatttaaaaaatatctcaagaggacaagtagtctacttctgcaggaaaatatttttaataccaactataaaatgtttataattttatatacgtagaagactcagcaaaattttatcagatcaggagattagagtatgaacagtgggaatccgtaacaaatgtgactgactagctggcaacctgatgtaaaaacacagaaggctgccctaaaagcaggaaaagagagtttagaaagcagttttcctggttgggttttcgttgtgcacctcacctgctctggaagtagtttgctagctctgatgcttcatggttcagactcctcaggtgcacgattaaatttccagagttggtgaacatggcgccacatgttttgcactcgtaaatccgaggcttgcggataatgtgccgggaaaccctcatgtggtgtttatattccccgaaggaagtgaaagtggcactacatatctggcaccggaaacagcgtttaccttcatgctttaggcgatgcatctttagcgagtaagccctggtgaactttttcccacagcggtcacactgaaatggtttaattcctgtaaataaagcaaaacaaaatatctaaaaacaaaaataaactgaaaagtcataaaccctacaaatttctgaactatatttctgtagcaacagatcatctgaaaaggcaagaattaccagcaaaaacatattctaattgagtatctcagaaaatgtgcagaatatgtgaaaagtcacaagtgcttaaaaaggaaaagaaaaaaaggcagtaggggaggcaaactaggtaacgtctactgaagctgatttttgaatgcttttctagatcatctattttactaacttcaaaacacaatttaactacagtatgtagacagaacccaaatccccactaacagcacatattatttcatttcattagaggtttacattgaacggatatgaaaatcatcagtacctactctctgttccctatctcacagagaaacgagaagaaagaacaattttaacatctctgaatgtaatgagcatgacagaaccatcatttgatataatgggtttttttgggtaatatgatgtaatattgatagaaataaatgagttataaagtgtattaatagtctcctcaaattcattatcacagtgttttggggaaaaaattttaaaacctttcaaaacacagtctacggattgaacaaagtcacagagaattggtgctaggacagggactgtaagacctatctacagaaggggaaagtgagatagtaactcacgcagctgaaaacagcagcaaagatctcttactcgtcagaggtcagtgttttacccacaagaatcctgttgccttcatgtgattactgaactaaaatttcaaatcccctctatacatttatccaaaatctctgttatgtttaaaaaaatacaaactacaaagctgactcatcagggcacacagagatttaggactgtagaattgaaagtaaattagcaagaaaatattacatttttaaacacacttttatttgggaaaaatttcaaacttaaagagacattataagaagaacagcacaaagaacacccatacagacccttttaaccctatttgctttaccatctgtgtttgtgattctctatctcacctctatgtgcacacctaatatgtctttttatttacaaagtactcactccatatcaccttatgttcttttaatcagaatactcaacacccgtggcaagcagctttctgacactgcatcatttcagcaataaaccttagctaatctgttttcatttgacttcccagagttttttttaaaactcagaagcccctgttttctattttaactgggactgcaaaataaaatgttttagagcgttcacttacgcaccaacagggaaggtgacattacctgagtggatgagcatgtgctgctttaggttctgaatacgggtgaatcgcaccccgcaggttggacactgaaaaggtctgtcgggaccatttggacttggtcgctctgtactgctggtggaaggagcaatgtagagttggtagggatactgaacattttccaatctaaaaaaaacagaccaaagaaggcaaccaggctctgatttttaaactgaataaacactgctataggtcaattttaaatgaaaaaagataaaacacttaaagactttttgaaacagtttaactgttagacttcaagttttactttaacaatatgaaaaacaatgttaatgtccagaatgccttttgttttttttttttattttttgagacggagttaggcagaagtcatatcgtgtagggctttagaaggcatagcaaggcctatagattttaggtatgaataaagaatgttaagaatctatagcttaaaacagtgacataatctgacttaattaaaaaagaaaagatgattttggctgctacatggaaaatggattaggggaagaatgcaatcagaggctactttgaaggttattgcagtagtcaaggcaaaagatggtggtgacttakagtagggtggctacagtacagattagaaaagtagacagggatatattttataggcagagttgacaggacttaaggattaactacgagggagatgaagagtggtaaggaaaaaagattaagaacaatcctcagagattttgcttgagaaattaggggataatgatgatgcttactgaaatgggagaaaggctggagaagcaggattcagacaaggagttagaaatcaagagttctgtcttggccttgttaaatgtgaaatgccctttatacatttatgtggaaatatcaagcagggagggagttatgggtatacagatcagactttggcagatgtttttcacagcagtcygtacagcacacattctgactttgcacaccatacagtctgtttcaaccactcaactctgccatccacaaacaatatgtcagcaaatgagcctggttgtgttccagtaatacttgatttacaaataaaggtggtaggctggaattggcctgtggttcatagtttgccaacacttggtacagatacgatttaaagcaatgggactaggtagttttggaaatgctggggaaaaaaaaaagccttgtataggtactctaatttataatgtgatgatgctacttcattactttgaaaagtatactgaagtgaggttgtaataaacttctacaactcttgagatgaaatgcttgaatttggagttgtaaacacaacccttaagaggtaacgaaatgctatgttagtactgaccgatcatcatcatccggaggagcattagtgctagacgtgctttgaagtgtaggcaagccctcagaaacgccttcatctactgagcctgtgaataagagaaagaggaccactgtaatcctttggtgtgaataagccaagattgtaactgaaagctatattatatctaagcctctgacatatattatctagtgttcatatcctgaattattaatccaaagtagtgttctacattttttttttttttttttgagactgagtctcgctctgtcgcccaggctggagtgcggtggcgcgatctcggctcactgcaagctctgcctcctgggtttacgccattctcctgcctcagcctcccgagtagctgggactacgggcgcccgacaccacgcccggctcattttttgtattttagtagagacagggtttcactgtgttagccaggatggtctcgatatcctgaccttgtgatccacctgcctcggcctcccaaagtgctgggattacaggcgtgagccamcgcacccagccgtgttctatatttttaaatgtttgtgatttwaaaraaaaaccacatgtaagataatagtcttatattactatttaagttcttttagaaatatttctttgacacatttcagaaagcaagcagggcaattcaaaagcgaacaaaaatccacataaaactgagtaattaaccatttaaggaaacactgaaattcttattttttaaaacttattgaagacatacaacttgttgcacaacttttatacagaatttaacagataaagtgaacacccaggcaacctccacacacaasccacacgaaagcacggccagcatcctggaagtccccattcatccttccctgatcataaacccctcccttctccaaaagcttcttatggttatcattttcctcctcccattctctcacttttaaaagtaattttatcttgaatacaagtatccataaggtaggtattcgttcttgctggaacacaactttggctggactagggctgcttctgcctacagtggcagagtttagtagcttttggttgtgacagagaccatgtggcagttatgtctaaaacagttatcattttgcctttaaaggaaagtttgccaaggcttgccataaacaatactttttagtgttgtctggctgttttatataaaccgggtcatactatatgtattcttttgtcttgcttctttcctccaacattgtggactcatcgtttttacgtgtaaccaaagtttattttcattgtttataatattcatcattatccattttactcttgatggacagttttttggctattaagaacaatgctgctgtgaatatccttaatgcacataagcatgcttttctccatggtaaagacttaggaatggaggtggtacatatgtaggaatggaattgctaggtcactgaacacatttatcttcaactttattagaaaatactaaactctttccagagtgactgtactaaattcacatcactgctagtatatcagagttgtgctgctccatatccttacctccttaccaacatttggtattgctggatttttaagttattaccactggtttttaaaattattaccaacctggtgtatgtcttacaatatttcatggtggtttgaattgcatttcccttataactactggggtgaatctagtgtcacatatttacggaatctcccttcctccctcttttgtgaaatgccagagttgtctgcctttttagcataagagttcttttcacaatttgtatataagcccttggtcagtgatacatactacaaatatctttccccatcccatggctttttttttcaccctttctaatggcttcttctgatgaacaaagtttaacattttaatttaattaatccttttctcattgttatggcttttkggtcttgtttttaaaaaatctttccctgtctgaaattatcttatgaaaagtmtcatgttttgtgccttatgttttttctttaacccattggagttgactttgtgaccgaatgtcatgaaaggtctgccttctctgctctgcagtgcctcctgtgttgtatgtcatgtataaatacataggtctgttttcgggttttctrttagttccatctgcttatctgtccttgtattaatgccaatctttagttactgtagctttataataaatcttgctatcaagtagagaaagttctctgcccttgttcatttgctttctgaacattctggctattttttgacttctgcattcctgtatacatttgagaatcagcttgctgaatacaagtggaaataaatattccatttctccccttctatttgtttagaagttacacaatattttcctatttctttgtattggttgccttagaaattagagatatactttgtttaccaaagtctaaagttaaaacctttacttccttctggataatacaaagatcctagaagctttaactccatttcccaccacttccatcctgccatttacaaattgtctgatattttacttctttgttctgattaagccccacaaacattatcatatatacatgttctcacatttacctctgcctttgctgttcattcttgcaaatgaaaccactcatctatgctcacttcacttctgccaaaagtccattctttataacttttttggcaatgatttgctgatgatcaattctttttgtttgaaaacatatttattttcaaatataaatatttcatttatatatttttcaaatataattcattcttgaaagacatttttaccctgtgtagaaatctagactgggagctattttctttcagcacactgaggatatcatcccactggtttctggtggtggtaaaaagtcatattcttttgaaggtaatgtctttttacatttttttccctgaattttctctacaatgtatctaggtctgtgtttctttttactattcctgtttgggactggtgtctttcatcaaatctggaaaattctcagccaacctctcctctctctttagagcttccatcaaacctacatttgttgtcttccgcacccttctcctctttgctactgcagtttccaccactgtgtctctctctgtgtagcactgaagtaatttcttctagtttatcttttaatttcctaattctcttctgttgagtgcaatgtgctgccaaaatgttcacggagattttaattttggttatcatttttcttttctaaaagtcccatttggtactccttaaatctgctrtgtcmctttttatagtttactgttctctgcaattattgttcatgtttattttgttaaatacagtaagcatatttactttatatctgtgcttgaaaactacgccaagtggcaatgccaatatatttctgctgcatttaaaaaacacattttttttttcctgttggttctctctctgccttgttttcttgagtgctctggtaatttttcgactggttattgcccttgaaaattatttgtaggaaattgagttgctgaggtcaggatacataatgcccttttccagagaagttttatgtttgcttctgctaggttcctgggcagcattagctatatgagattcactgtttgagattccttggcctacccactcaaagtctgtgttgtaacaatttgtaagtggtctagcagtaacttctcagggatgtgttttcctctctttttccttttctagtcygctcattgccaaggcaggtttttctacagtcccctggagtttggaggacagggagcaggtttagttctgacagtacaatcccaaaggacaatgcacatgagcatgcttttctccacagtatatacttaggaatggaagtggtatatgtgtaggaatggagccgctaggtcactgaatacatttatcttcaaccttattagaaaatactaaattcttttctaaaatgattgtactaaatttacatcactgctagcagtatatcagagttgtgttgctccatatccttaccaacacttggtattgcaggatttttaaattattaccaatcaggaacgtgttacaatacacacattaagcrgggagcaggtttagttctaatgtaaacctgctccctgcttaacgtgtggggcaacttttctaagactttacaacttttacacactctgagctttcagtttcatttctcctgctctttgagttgatcaaccaaagcccatttgtgttttggcaaatgtcttaaaggcaaaactgattttagtgctctgatgatctacttacctccctgggccaggctttctcccctaatttaaccttgcagttccttggccatcttttcagcttttcaaacagtttaaaagtgaatttttaaaaacttaaaatttgttgtttgtggtgggacagtagactcaaacaacctagcttattctcattaggtaatgaactctttactgaacacaaaccagctgtgttgcaccaaatgaacaaatctgagcctctgagaatttcggtcttttaatagcaaacaagcttttggttataatattttaatgaaaatgaaaatgtggccgggtgcagtggctcatgcctgtaatcccagcactttgggaggccgacgtgggtggatcacaaggtcaggagatccagaccatcctggctaacacggtgaaaccccatctctactaaaagtacaaaaaattagccgggcgtggtggcgggtgcctgtartcccagctactcgggaggctgaggcaggagaatggcgtgaacatgggaggcagagcttgcagtgagccaagattgcgccactgcactccagcctgggcgacagagagagactctgtctggaaaaaaaaaaaaaaaaaaagaaagaaaatgtactaactgtaacagtttgtacaccactacatacatgtgaacatttaataagtatcatctgctaatgaacatacgggatgaaatttccttctgatgaagatttggaatctaatacttaagtttccctctttggaacacttgaattgctgtcattaggaaacaggtacatcatccacttaagtaaaaagcgttttaaaaaactaaattttaaggcatycaaactttatttaatcacttgtactggaaaacttgtgacagggttacattttgccttgacttcttaaatgaaggacaccatatagaacttattttttgtttcttgatgactcaccacaatcataaagaacactcattactatacagtgttctaatacttgggtatactctgaggcttttgaaaatacgcaggactatgtgtgtttacattcattcccaattgcacccccattctttctggtctccccattccatcccttctggtgtatgtgtagcatttctgtgtgtgtcttttctttttctttctctatcaaacggcattcctgcttttcccctatgtctacttatgcaagttactcccaggttcttctgacttgtttttaatccagatgtaggacagagaaccagataatgctgcattttaagaaagaactgtttacttgtcagtatcttcccattctcagttttttccttaaagaaaagaaaaataaacattaacttttcaatcagtcctgggctaagaaactggaaaaacaccagtatttagcgttggtcccatggacatcaagacctatttgacggtgctctgaacttattcagagcacagacagtattaaagcgtacagacaaaggcttgccccaaaacgcctggagttgtgataagggtaggccaagaagactggcatctgcttctcactatcagcttgtgataagggtaggccaagaagactggcatcggcttctcactatcaggttgtgagaagggtaggccaagaagactggcatcggcttctcactatcaggttgtgagaagggtaggccaagaagactggcatctgcttctcactatcaggcaggccatactctttcgaggagggaatggactcttggtgaggtgagaataaaaaccacactgtctgggaccgattctagtaccgtcaaaggtttgtttaaaaagctggttgaaaagaactaaaatgcagtacaagatacatctagcagatggcccttcttaaaacaaatccatctctacattctaaaatgtctagatcccctgattcaatggatagtgagcatgcaaagcaaagcaaaactattttccctcacccatggctactgaatgcaccaacagctaaaaatgaaagccactccaagctaaaatgagttaaaacagacttttggaattctatgtatactgtggaggtaaacacatagtgttatatcacttatgcaactatcagcaaaaaataaattttgtgcaactgtttttcttgaaatgatggtttttgcaaataacacaagtaatcatatgaattggaatttcagttaaactgatttaacagcagaatatatacacatatatatacacacacacatatatatatacacacacatatatatgcacaatattactttcctgaggtgacagtgatgtttcttaaattattaaaatgaagtttcctttctaccctatagggattctgttctcagtggtagtgaggctaagaattctggtcagacacttttcaccttgtgaaacagtaaaactgattcacagagacaatcagctttatatgggtcagggctagcttatcaagacagagtcgactctctccccaattagaagtgctgtatgatagcttctgttgcatcaaactcaagttgctgctgccactgttcaggtattcaagatacttacaaagatccctctggaattgaaaagcaattacagtggtcatctcctactgagtatttaccatgtgccaggcattgttctaaaaggttttcaatataagatctcaatttatacttgaaaaagagaaacatcttccaacattcagaaacaggcttggcactcatttaggggtggggcctggtccttacagccacagtattctcctggggaacataaacagtctcacaaaacaacataaaatcaagtcactctgtgacccttatttaaagcgagactaaaaaacacttttatttgtgcaatsacaaayataccagtcatccccatctctcgctggctaatgagtcactactgctatagattcactttagtctgcattcctagatagtatttattaagatattcaataacagaattctctctcctttctgacatcaccagtcctgagcaaacctcacttccttgaaccctccctaatggagagtaagcatccctgaaatcacccaacacaaggccaaatcctgcgctaaggcctttttaacaccttcttactgacaaccagccctaaaaaccccatggtgtataatctcccttgttgcaaatgagcaacaaactcaacctgttcaatcataggtggtctttggctatagggcccaggcagaaataaagatccactgagattcagctaaattccttgttgcttcgtcctgggatcctggatgagagggcagatataaaatcccttttgaggtgccacctgcccttggctgggatgtaagttcatgctgaattaagctcaaatagttcaatgawgcccttcactgtcaggtttgttttgttttcctagaaacagtcttttgaaaatattttggttattcagattgtgttgctccttggtgaaactgttttctaggctaacacctgctctgaagatcatctgcctgcctgcctgctgtgttaacggcctacaagagaaataaacgataatgagaggatgaacataggttggattagttcatctgaactggccctggaggccaagttcagatctctgactggcaaaaccatttcaaaactttacaaggyataacacagatgaactgtgaaaacattatggtaaaaacataagccagtgagaaaaaaaaacccacgtatttcatgatcccactgatataaaatatccagaataggcaactattaatatttacagtggtttgcctaggagtggggatggggttagaaggactagagagttatctttttaagtaacaaggcccaacctaaaaccagcagtcttttttctcctttaaatttgttgtatttattgcttttatttgctgcaagttgatactgaattttacaacctttccatgggcaagtggmaacaaaaggaacttaaaacagcaggtaaaatcctatctgaactaatttcatggataatcaaattattattttggaaatttgaaaataatacactaaacattatattttctatccctagaaagacaagatacctctcagagatgttctttaacaaattagtaagtaaaattaaatactcttatggaacttacaggggaaaaagtaccatgcacatcttccttttctccctctcaaatttactgactgccttcaataccgcaaggaattttctgtatggctttgttttagtatgcaagtttggagttaagattggtttgttgagagtgattagtacatttgccatgaaggcaaggaaaaaacatcatattggagttgggcatggtggctcacgcctgtaatctcagcactttgggaggctgaggcaggcgatcacttgaggtcaggagttcgagaccagcctggccaacatggtgaaatcctgtctctactaaaaatacaaaaattagccaggtgtggtggcaggcacctgtaatcccagctacttgggaggctgaggcaggacaattacttgaactcaggaggcagaggttgcagtgagctgacatcacaccacagcactccagcctgagcaacagggcaagatactggctcaaaaaaccacaaaaacaaaacaaaaaaacacaagaaacaaaccacattgggattatctgattcagagcagttcccatgtctgctttatagaatccatttataataatatataggtaacagattctacttatataactgaaagatttgttctacttattaacttgttaataacatcataaagggctgggtgcagtagctcaggcctgtaatcccagcactttgggaggctgaggtgggtggatcacttgaagtcaggagtttgagaccaacctggcccacatggtgaaactccatctctactaaaaatacaaatattagcygggtgtggtggtgtgtgcctgcagtcccagctacttgggaggctgaggcaggagaattgcttgaacccaggaggcagaggttgtagtaagctgagatcatgctactgcattccagcctgggtgacagagygagactcagtctcaaacaaaaacaaaactatcataaaggcaaaacctgaactgattatatatacttgggagtggtaaaggatgactatttcacatgcctaactcaatatcttagatatttagacagattaatatttgggttcctactttcttaaatgattaaaattataattattcagtaggcagttcgttactcagaaggtaccaaggtgttttcaattactgactctggtagtttagtaaaaacttggttgtatcaacaaatagctatgatttcttgaaattaaatattttgttggatgtgtgttcatgtaaattcttcacaactattttgaccccaattcaggaatatgaacttcagtggctgctgtgggtgacattatttcccccagaaagacactacgtcttggctgctggcaagatggccgaataggaacagctccagtctgcagctcccagtgagaccaacacagaaggcaggtgtctgcatttctaatgaggtaccctgttcatctcactgggactagttaggcagtgggtrcagcccacagagggtgagcagaagcagggtggggcgttacctcacccaggaagtgcaaggagccaaggaaagcagtgagggactgtgctatctggcccagatactacgcttttcccacagtttttgcaatccgcagaccaggagattccctcgtgtgctacatcactagggccccgggtttcaagcacaaaactgggcggctstttgggcagacaccaagctagctcttcttttttcacacaccagtggtgcctggaaccacagtgagacagaaccattcacagaacctttgcagccccctgcaaagggggctgaagccagggagccaagtggtctcactcagcaggtcccactcccacagagcccagcaagctaagaaccactggcttgaaattctcactgccagcacagcagtctgaagttgacctgggacgatcaagcttggtcgggggagggacatccgccattactgaggcttgagtagttggttttcccctgayagcgctaaaaaggcctggaagttccaactgggcagaactcaacacagtgtkgcacagtggctatggccagactgcctctttagattcctcttcattgggcagggcatctctgaaagaaagacagcagccccagtcagggcttatagataaaaatcccatctcactgggacagagcacctgggagaaggggcggctgtgggcgcagcttcagtggacttaaacgtccctgcctgcaggttctgaagagagcagcggatactcacaaggagggttctaccagcacagtgcttgacttctgctaagggacagactgcctcctcaagtgggtccctgacccccatgcctcctgactgggagagacttcccaacaggggtgacagacacctcatacaggagagctccggctggcatcaggccggtgcccctctgggatgaagcatccagaggaagcagcaggcagcaatctttgctgttctgcagcctccgctggtgatacccaggctaatagggtctggagtggacctccaacaaactgcagcagaccttcaaaagaggggcctgttagaagaaaaactaacaaacaaaaagcaataacatcaacatcaacatcaacaaaaagaacctccacacagacgccccatccaaacccatccaaaggtcaccagcctcaaagatcaaagatagataaatccacgaagatgaggaaaaaccagcacaaaaatgctgaaaattccaaaaaccagaatgcctcttctccaaatgactgcaactcctctccagcgagggcacaacactggacagagaatgaatttgacaaatcgacagaagtaggcttcagaaggtcggtaataacaaactcctctccactaacggagcatgttctatctcacccaatgcaaggaagctaagaaccttgacaaaaggttacagcaactgctaactagaataacccgtttacggaagaacataaatgacctgacagagctaaaaaacacagcaygagaacttcacaaagcatacacaagtatcaatagctgaatggatcaagcggaagaaagataacagagaatgaagatcaacttactgaaatgaggcatgaagacaggattagagaaaaaaagattgaaaaggaacaaacaaagcctccaagaaatatgggactatgtgaaaagaccaaacctacgattgactgaggtccctgaaagtgacagggagaaatgaaccaagctggaaaacacacttcagaatattatccaggacaacttccccaacctagcaacacaggccaacattcaaattcaggaaatacagagaacatcattaagatactcctcgagaatagcaaccccaagagacataatcatcagattctccaaggttgaaatgaaggaaaaatgttaagggcagccagagagaaaggtcaggttacctacagagggaagccatcagactaacagcggatctctctacagagagtgggggccaatattcaaattcttaaagaaaagaattttcaatccagaatttcatatccagacaaactacgtttcataagtgagaaataaaatcctttacagacaagcaaatgctgagggattttgtaaccaccagggttgccttacaagagctcctgaaggaagcactaaatatggaaaggaaaaactggtaccagccactgcaaaaacacaccaaaatacaaagaccaatgacattataaagaaactgcatcaatgaatgtgcaaaataaccagctagcatcatgacgacaggatcaaatttgcatataacaatattaaccttaaatgtaaatgggctaaatgccccaattaaaagacacagactggcaaactggataaagagttgagacccattggtgtgctgtgttcaggagacctatctcatgtgggtcaaagacacacatagactcaaaataaaggaatggaggaatatttaccaagcaaatggaaagaaaaaaaagaagcaggggctgcaatcatagtctctgataaaacagtctttaaaccaacaaagatcaaaaaagacaaagaagggcattatataatggcagacggatcaatgcaacwagaagagctaactatcctaaatacatatatacgcaatacagaagcacccagattcataaaacaagttcttagagacctacaaagagacttagacccccacacaataatagtgggagactttaacaccccactgtcaatattagacagatcaacgagacagaaaattaacaaagatattcaggacttgaactcagctctggaccaagcagacctaatagacagctatagaactctccaccacaaatcaacagaatatacattcttctcagcaccgcatggcacttattctaaaatagaccacataattggaagtaaaacacacctcagcaaatgcaaaagaacggaaatcgtaacaaacagcctctcagaccacagtgccatcaaattagaactcaggattaagaaactcactctatcagaggtacaaagaggagctggtaccattccttctgaaactattccaatcagtagaaaaagagggaatcctccctaactcattttatgaggccagcaccatcctgataccaaagcctggcagagacacaacaaaaagaattttagaccaatatcactgatgaacatcaatgcaaaaatcctcaataaaatactggcaaaccaaatccagcagcacatcaaaaagcttatccaccatgatcaagtgggcttcatccctgggatgcaaggctggttcaacatatgcaaatcaataaacgtaatccagcatataaacagaaccaaagacaaaaaccacatgattatatcaacagatgcagaaaaggcctttgacaaaattcaacagcccttcatgctaaaaactctcaataaattaggtattaatgggatgtatctcaaaataataagacctatttatgacaaatccacagccaatatcatactgaatgggcaaaaactggaagcattccctttgaaaattgacacaagacagggatgccctttctcactcaccactcctattcaacacagtgttggaagttctggccagggcaatcaggcaggagaaagaaataaagggtattcaattacgaaaagaggaagtcaaattgtccctgtttgcagatgacatgattgtacatttagaaaaccccatcgtctcagcccaaaatctccttaagctgataagcaacttcagcaaagtctctggatacaaaaatcaatgtgcaaaaatcacaagcattcttatataccaataacagagaaacagagagccaaatcatgagtgaactcctgttcacaattgcttcaaagaaaagaaaatacctaggaatccaacttacaagggacatgaaggaactcttcaaggagaactataaaccactgctcaatgaaataaaagatgatacaaacaaatggaagaacattccatgctcatggataggaagaatgaatatcgtgaaaatggccatactgcccaaggtaatttatagattcaatgccatccccatcaagctaccaatgactttcttcacagaattggaaaaaactactttaaagttcacatggaaccaaaaaagarcctgcattgccaagttaatcctaagccaaaagaataaagctggaggcaccacactacctgacttcaagctatactacaaggctacagtaaccaaaacagcatggtactggtaccaaaacagatatagaccaatggaccagaacagagccctcagaaataataccacacatctacaaccatctgatctttgacaaacctgacaaaaacaagaaatggggaaaggattccctatttaataaatggtgctgggaaaactggctagccatatgtagaaaggtgaaactggatcccttccttacacattatacaaaaattaattcaagatggattaaagacttaaatgttagacctaaaaccataaaaaccctagaagaaaacctaggcaataccattcaggacataggcatgggcaaggacttcatctctaaaacaccaaaagcaatggcaacaaaagccaaaattgacaaatgggatctaattaaactaaagagcttttgcatagcaaaagaaactaccatcagagtgaacaggcaacctacagaatgggagaaaatttttacaatctactcaactgacaaagggctaatatccagaatctacaaagaactcaaacaaatttacaagaaaaaaacaaacaacaacaaccccatcagaaagtgggagaaggatatgaacagacacttctctaaagaagacatttatgtagccaaaagacacatgaaaaaatgcttatcatcactggccatcagagaaatgcaaatcaaaaccacaatgagataccatctcacaccagttagaatggtgatcattaaaaagtcaggaaacaacaggtgctggagaggatgtggagaaataggaacacttttacactgttggtgggactgtaaactggttcaaccattgtggaagtcagtgtggcgattcctcagggatctagaactagaaataccatttgacccagccatcccattactgggtatatacccaaaggattataaatcatgctgctataaagacacgtgcacacgtatgtttattgtggcactattcacaatagcaaagacttggaaccaacccaaatgtcatcaatgatagacaggattaagaaaatgtggcacatatacaccatggaataccatgcagccataaaaaaggatgggttcatgtcctttgcagggacatggatgaagctggaaaccatcattctcagcaaactatcacaaggacaaaaaaccaaacactgcatgttctcactcatagatgggaattgaacaatgagaacacttggacacaggaaggggaacatcacacactggggcctgttgtggggcggggggagggggaagggatagcattaggagatatacctaatgtaaatgacgagttaataggtgcagcacaccaacatggcacatgtatacatatgtaacaaatctgcacgttgtgcacatgttccctagaacttaaagtatagtaaataataatataataataaaagaaactcattcaaaactgcacaactacatggaaactaaacaacctgctcctgcatgaccactgggtaaataacgaaattaaggcagaaataacgaagttctctgaaaccaatgagaacaaagagacaaggtaccagaatctccgggacatgctaaagcacagttgagagggaaatttatagcactaaatgctcacatcagaaagtgggaaagatgtaaaatctataccttaacatcacaattaaaagaactagagaagcaagagcaaacaaattcaaaagctagcagaagacaagaaataactaagaacagagcagaaccgaaagagacacacgaaaagcccttcaaaaaactaatgaatccaggaggtggtgttttgaaaagattaacaaaatagacagactgctaaccagattaataaagaagagagagaataatcaaatagacacaataaaaaatgataaaagggatgtcattattgatcccacagaaatacaaactaccatcagggaatactataaacacctcttcgcaaataaactagaaaatctagacgaaaattcctggacatatacaccctcccaagactaaactaggaagaagctgaatccctgaatagaccaataacaaattctgaagttgaggcaaaacctcaaaaaaaaaaaaaaaaaaamaacaccccttcatgctataaactctcctgaaatagcctaccaaccaaaaaaagcccagcaccagacagattcaccagacagattcacagctgaattctaccaaaggtacgaagagaagctggtaccattcctaacaacagaaaaagagggactcctccctaactcattttatgaggtcagcaacatcctgattccaaaacctggcagaggcacaacacaaaaaaagaaaataccaggccaatatacctgatgaacattgatgtgaaagtcctcaataaaatactgacaaactgaatccagcagaatatcaaaaagcttatccaccaggatygagttggcttcatccctggaacgcaaggctggttcaacacacgcagatcaataaacgtaatccatcacgtaaaacagaaccaatgacaaaaaccacgattatctcaatagacgcagaaaaggccttcaataaaattcaacaccctggctgggcgtggtggctcacgcctgtaatcccagcattttgggacgccgaggcaggcggatcacgaggtcaagagatcgagaccatcctggccaacatggtgaaatcccatctctactaaaaatacaaaaattagctgggtgtggtggcatgcgtctgtagtcccagctactcaggaggctgaggcagaagaattgcttgaatgagctgagatcacaccactgcactccagcctggtgacagagtgagactccgtctcaaaaataaataaataaataaaaattaaaaataaaaattcaacaccccttcatgctaaaaactctgaataaactaggtattgatggaacatatctcaaaatattaagagctatttatgacaaatccatagacagtatcataccgaatgagtaaaagcagaaagcattccctttgaaaaccggcacaagacaaggatgctctctctcaccacccctattcaacacagtactggaagttctggccagagcaatcaggcaagagaaagaaagagtattcaaataggaagagaggaagtcaagggtattcaaataagaagagagaaggtcaaattgtctctgtttgcagatgacataattgtatatttagaaaaccccactgtctctgccccaaaactcaagctgataaacaacttcagcaaagtctcgggatacaaaatcaatgtgcaaaaatcacaagcgttcctatacaccagtaatagacaagcagagagccaaatcatgagtgaacttccattcataattgctacaaagaaaataaaatacccaaaaacacaacttgcatgttcagcacatgcatcccagatcttaaaaaaaaaaaaaaaaaaaaagaaaaagtacatcttaatccttgctaccaatgtatgtgaccttatttggaaatagggtcttagcagatgtaatcaagttaagatgaggtcatgctggattagggtgggacctgaatccaatgactggtgtccttttagggagagagagatttgaagccagtggcaaaacagagagacagggaaggtcatgtgaagacgaacgcatatactaaagcacaatatcatatactggagctacaagccaaagaacaccaaggattgtgggcagctgccacaggctggaagagacaaggaaggattcttccctacaatcttcaaagagagaaagatccttcaaagggaactaacacctgtcgttcagatttctggcctctgactatgagagaataaattttttttaaaccattcagtttgcggtactttgttgcagcagcccagggaaactcacacagagggtaaaagcacaagaaactaacaaagttaatatggtcttcccggttctccaatattttggacaaatctttattattcactagtggcttttcttctatcccttcccaaacctgaatataggtattccccaaggtatccccttggttttggctcttctgtttttcctattgagattgaatttgccactactagtagaaaagtcccaagttgggaatctcacttatcttttctactgcttttgaaatgacactgcttgatcatcatccaagcacaatttacacagaagtgaccttgataatttactctcamaactggattcccaccaccttccactgattttcatacggcactaactacatttaatagatgctaaaatgctattgattcatatgattgccattattctctatagcactaaggaagaaaaaagcaactgtagaagactgccaactgtaagacatatctggattcagaaataacaaaatatgaaaaattgtgacttagaatcaatggaatataataaagtgttaccattatttcctagtcatcagagtactttaacctctcctgttctttcaatatacatattcagtatcatcaggtactaagtctttctttacaaagtcttgtaatatctattttctttcacatggttttaagtcttcattcacaccaagataagtgcactgcaattggtctctgagactgtctctgtaaaaccaaactcactgcatgtcaataacagttttcctaaaatatctgcatgtttttgtttttatccctttaatgtagactccttactacctaccactaagataaaatccaagcttacttggcctacttgtggcagacaytgctagttgcatactcaatatccatttkgctctaattttgttcaaggcatttaggtacccaactaatatacattatcttcccagattcccttgcagctaggaaagactatgtgacacagactagcagaagttttttagggatttctgagaacataggtgctttcttgatacaaagcattgcccctttctagaatacaaagctgaagatgaaatgagcatcttatggatgaaaccaacaaagtaaagatggcagtttataaatatacaagttgcctaggccactgattatattgcagattcactgtaccagccctggacttttattcctgaacactttgtgataaaaaatcacaagcattcctgtgcaccagtaacagagagccaaatcacgagtgaactcccattcacaattactacaaagagaataaaatacctaggaatataacttacaagggatgtgaaagacctcttcaagaactacaaaccactgctcaagaaaataagagaggacacaaataaatgggaagacattccatgctcatggataggaagaatcaatatcgtgaaaatggccatattgcccaaagtaatttatagattcagtgctatccccatcaagttaccattgactttcttcacggaattggaaaaaactcctttaaatttcatatggaaatttaatgagataccatctcacaccagttagaatggtgatcattaaaaagtctggaaacaacagatgctgttgaggatgtggagaaataggaaatgcttttacactgttggtgggactgtaaactagttcaaccattgtggaagacagtgtggcgattcctcawgaatctagaaacagaaataccattcgacccagccatcccattactgggtatacacccaaaggattataaatctttytactataaagacacatgcgcacatatgtttactgcggcactattcacaatagcaaagacttggaaccaacccaaatccctgtcaataatagattggataaagaaaatgtggcacatgtacaccatgaaatactatgcagccataaaaaagaatgagttcatgtcctttgcagggacatggatgaagctggaaaccatcattctccgcaaactatcacaagaacagaaaaccaaacaccacatgttcttactaataagtgggagttaaacaatgagaacccatgtacacagggagggggacatcacacagtggggcctgttgggggatggggggctaggggagagatagcattaggataaatacgtaacgcagatgaagggttgatgggtgcagcaaaccaccatggcatgtgtatacctatgtaacaaaactgaacgttctgcacatgtaccccagaatttgaattaaaaaaaagaaaaaaatactgccagagaaaacaactataaatcattttattttcaatctaaaaagataaataaataaataataaagaaaaaataaataaaactctgctacagttaagttactgcagaagggattccatcacctgcacttaaatgcaacccctactgaaactaggattcgaggctctttacagcctgcgctcaaccactccttttgtctgatctcccactattccctacagtttcaggcatctgtacttacttacatcattttgcactgaattcactgtttaccaaacacacaatgctcttccatacctctgtgtttgcatatatgttctgtgtttttatgttttcacagaaatgacattcccacacttgggtaaactcttacttattgcataagacccactcaaacatatagtgtaacttgctctttcctttgttgcaaccatactactttgttcacacctccagatgagcacttttgatagttcactgtaatcatttactttcatatctgcttccccaattagatgattaacctaattgtcattgcagggactatgtgtttttctttatgtatcataaatgtttgcttggcacatggtaagttttcaatacatattttaatgaagaataaaacacaaactggatttaactgcttttttgtgtatgtgtatctgcctttgtcccagcagataccattcaattatttttatcttccccaatgtgcaacttgtaaaaaataaacgatagtgctaatagcatctcaagcaaatccagttaccatgttttactcttctttatatttcctatatgaccgagcacaaaactttttatctaacaggaacttaaaaatgtttgaattgactttatagcaccaagaaaaacacagaaggcattatacctatagaggaagactgtggactaatcagaaggtcctcttggacttgttcacttcctggaactgtctgctgatcactcagcgaactctgagatgcactgacaggctgggacacttcctcatggacctcctcatcacttaatctttctactttgacccggacatcttcttcggtacctaaaggcaaggtagtttttgtgctctcacaagtcacataatcagccattcttctaccggtctcagatgggccaggtaattctaaagtccgggtattttctgcttgcttaactttctcaggctgaatccttcgatcaattccaaaaggaaaagtccaaggaaaagctaaggaagagtcaactggttggtttctattttctgagtaggaagctgaagaattcaatacctggggtgagcttgtttgtgtgccacactttacaggactttcaggagacataacaatgtagcttttgcgctttctccgggattctcggcagacaggaatggttctttctacmacactgcactctgaggacacgggagaaatgctcccatctcgagaagtaaaattgcagttagaattattttcttgtccagcatctagacccttttcaggttggctgttgggtgtattccataaaatgcttgatttcatgaactctgagcaggtgctggcaacactgaacatttgcatatagctggctgctgctagaacatcaataatattttctgtgttaattgatagagtggctgtgtaagcatattctaaaagaggtataaagccagtcactgtaacatgatgcagatccaacacattcttgttctcatcctcggcttggcctacaagtttggtgcgaaagaaatcactgcaagctgctagtaccaccttatgtgcccggaagattttgtcctggacacgaatagtgatatcacaaaaatgtccatcatttcgcagcatatttagctttccaagcatttcctggctgtgggaagaggagctatgagtaaatgttttcacacccatcttttacttcctcttctacagatgctcttcaaggatgcaaataaatcagaaatgtcctaaaaaatacataaaataaagcattaattgatattttagtggtttaaaatgtgatttagatcattttcatgtggccactgtactaaattaaaaagctgaaagatggtagtgacagagaaacttcaaggtagggactgtatagaaatatattctccttatctgccttccaaactgtccaatcagtgaagtctgtgaaccaatgtttttttttgttttgttttgtttttgagacagagtcttgctctgttgcccaggctggagtgcagcggggtggtcttggctcactgcaacctctgcctcccgggttcaagcaattctcctgcctcagcctcccgagtagctgggattacaggcacccgccmtcatgcctggctaagttttgtatttttgtagagatggggtttcaccatgttggccaggctggtcttgaactcctgacctcaggtgataggcctgcctaggcctcccaaagtgctgggattacaggtgtgagccaccatgcccggcctgkgaaccagcgttttaatgagctgcagggctgcaacagtttgtaaataatgacaattatagagtgtcttctatgtgccagacagtatttgaaatgcttcacatttaatagttagttgattgtcatcatatctctatcagtaggcgtattatcattcctgtttctaaatgtgagcatgcagcaggcaatgccagtgtaaacactgaacaatccattacataatcatccctgttaatgttttatgcaggtaaatgtatagaggaaaagaaagatgggaaaaagaaaaaaaggaagtggaaagaaaaaaaaaaagatttcaagatgaatttaaaaaggttgccaggtgtggtggctcacgtctgtaatcccagcactttgggaggccaaggcaggcggattgcttgagctcaggagtccaagaccagcctggccaacatggcaaaaccctgtctctacaaaaaaacacataaaaattaggcgggtgtggtggcatgggcctgtagtcccagctattcgggacgctgatgtggaaggatcacttgagcctgggaggtggaggttgcagtgagccgagactgcaccactrcactccacccttggtgacagagtaagaccccgtctaaaaaaatataagtcacagactattctaacttgagaagacaaaatgatcaatttgagactgttccatgtcagacttcacaaaaggataaggcataaatctctgttccaaagcagccaggtaaagctactgaaataattatcttgaccataattagtaacagaagttcgaatgtaaactgagtgctccacatacccttcctgaagtcaactgaccacaatgagacactagacagccagggactggtctacgcaaaccatcatgtaacatatttgctgatttaggtctcacaaaaatgagatgaaagaaagaaaatgggagggctatatataaagcgttttgttcatttattgcatcccaggagactagcttctgcttttaaagcatggccttcgagagtgcttactttgggatcatgtggctgagggaagaaacatgctttcagagcaagtgaattagttataatccagggaccatctgcatgaacaaaggtgtgaaggcaagaaattaaacagcatatttggaagacatgtgcatcggagtattaaaatgaaaccatttccatcttgaataggccccaaacaacagataatgtactacgttctcaagtgaggcacaagggcaccttatacaaggggtagtggaaaactattttcaaccttgagttacatccaccttcagtcatcttccgtgttcaaagagtagatatgaaaaggatttttgctgagagtaatcagtttgttgtgagttgcaaaccccattctacttccctgcttactcccctgcagggaaaggggcttcaaggcatgctgatcctttacctcaaatctatggaaaatatgttacaactgaaaaaactctgaagggcacataagtctgatttaaacaacaatcaaggccaagacgtatgcctactatctcccaacagtatataaaggcatcacagtggagtggttgaaagcacagactctggagccagaatgctcactctgcatgctggttctgctatttttacctgtgtcaccttaggcaagtcattaaacaaaccctctgtatcttactatattcagtggtataagaaatataacacaacacacctcatagagttctgaggattaaatgacctaatatatgttaagtgtttagaakagtaactagtaacataatcaatgctatagaaacattagttgctgctgctactaacattgctatcaaagaccttttcttcctgaaagggccagaaaccacagccagcaaatgaagagaagtgaaagaagaaagttggggaagagagaaagaaagaaaaaggaggtaaaccacacctaactcttcaactgcaggcctgtagtaggcctgaggtgggaaaggagggaaagcttttactctaagtttattagttcttgaaaagattgctggtatttcctgaaagtgatcagaacagttattaaaacttactctccaggaagctggagaactaactccacagaagaaataaaatggctcatgagtacctcccgtaagtcatgcttgttcacatatatggtacgaagtctgatayacttagaagtatgggatgagaagaaggtgatgatgaggaaatgcattctctaccatatatttatcacatgcatttcccaatatgtctgcagaaactcaggcccaagatatgctccataatacaaacttatatggacaaatatattttggatacagagacatacctcatcttcttgcactttgctttattaaactttgcaaatattgtgttttttacaaattggaaatttgtggcaaccctgctgtcagcaagtctactggtgccactttccaccagyttgtgctcacttcacatttgtgtcacattttggtaattcttgcaatatttcaaaatttttcattattattatatctgttatggtgatctgtgatcagtaatctttgatgttactactgtaattgttttggggtaccacaaactgcacccatataagacagtgaacttaatgttgtgtgtgttatgactgatttacccactagtcattcccccatctctctcctcctcctcaggtctccatattccatgaaaaacaaggatattgaaattagaccaattaataaccctacgatggcctctaaatgaccaagtgaaaggaagagctgcacgtttctcactttatttttttttatgagacggaattttgctctgtcacccaggctggagtgcagtggcacaatcttggctcactgcaacctccacctcccagattcaagcaattctcctttcagcttccagagtagctggaaatacaggtgcatacaacaaagcccagctaatttttgtatttttagtagagagggggtttcaccatgttggccagcctggtctcgaactcctgacctcaagtgatccacccgcctcatgtttttcactttaaatgaaatgctagaaatgattaagtttagtgaggaaggcatgttgagagctgagagagcctgaaagctagaccttttataccaaacagctagccaagctgtgatagcaaaggacatattcttgaaggaaattaaaagtgctactccagtgcacacacaaatgatgagaaagtaaaacagccttattgctgacatgcagaaagtttgcctggtgtgcacagaagatgaaaccaaccacaatattcctttaaatcaaagcctaatccagcgcaaggccataactctcttcaattctatgaaggctgggagggatgaggaagctgcagaagaaaagttggaagctagcagaagttgattcatgaggttgaaggaaagaagccatctccataacataaaagtgcaaggtgaacccacaagtgctgatgtcgaagctgcaacaagttatccagaagagctagttaagatcattgacgaaggtggctacactaaacagcaggttttcaatacagacaacacagccttacactggaaacagacacatttaggaatttcacagctagagagaagtcaatgcctggcttcaaaacttcaaaggaygggatgcctctcttgtaagcggctaatgcagctggtgacttaactggaagccaatattcatttaccattctgaaaatcctagaccccttaacgattaggctcaatctattctgcctgtgctctgtaagtgaaacaacacagcctgatgacagcacatctatttacagcatggtttactgaatgttttaaaagcccactgttgaggccgactgctcacaagactgctttcagtatattactgctttccaacagtgcatctggtcatcgaggagctctgatgaggatgtacatgactgatgttgttttcatggctgctaatataacatccattctgcagcctatagatcagggagtcattttgattttcaagccttattatttaaggaatacatttcaaaaggctatagctgccatagatactgattcctctgacggatctgcacaaagcaaagtgaaaactttctggaaaagattcatcattctagatgccattaagactgtttgacattcatgggaggaggtcaaaatatcaacattaacaggagtttggacaagattgattccagccttcatggatgactttgagaggttcaagactttcacaaaggaagtaactacagatgagttggaaactgcaagagaactagaattcaaaatggagtctgaattgctgcaatctcatgataaaacttgaacagataaggagttgctccttgtggataagcaaagacagtggtttcttgagttggagtctactcctggtgaagatactaggaacactgttgaaatgacaataaatgatttagaaaactacatacaccttgttgataaagcagtggcagggtttcagaggatcaagtccaatttaaaaaaatttttaattaaaaattttttttagctgggcgcaatggctcaccctataatcccagtacttcaggaggctgaggtgggtggatggcttgagctcaagagttcaagaccagcctggcaacagggtgaaacaccatctctacaaaaaatacaaaaattagctcagtgtgacgtcacatgcctgtagtcccagctactcaggaggctgagactggaggactgcatgagcttgggaagcagaggttacagtgagccgagatcaagccactgtacatcaacctgggcgacagagtgagaccctgcctctaaaacaaattcagaaaagctggcagaggttggttggttcatgaggttgaaggaaagaagccatcctcatagcataaaagtgcaaggtaaagctgcaagtactgatgtcaaagctgcaagttatccagaagagctaggtaagattataatttttgttttagaggcagggtctcactctgtcacccaggctggagtacagtggcatgatcatggctcaccgtagccttgaagtcctagggtcaagcaatcctcctgtcttagccactcaagcatctaggactatggtgtgtatcaccacgcctggctaatttttaaatttttttatttctttaggtagagataggggtatccctatgttgcccaggctggtctcgaactcctggcctcagcattgcaaagtgctgagattacaggtttgaactactacacctagcaatcaactctgattttgaaagaagtccttctataagtaatatgctatcaaacagcatcacatcctgtagagaaatcctcgtgaaggccgggcgcagtggctcatgcctgtaatcccagcactttggcactttgggaggccagggcaggtggatcccctgaggtcaggagttcgagaccaacctggacaacatggtgaaatcctgtttctaccaaaaatacaaaaaattagccgggtgtggtggcaggcacctgtaatcccagctactcgggaggctgaggcagaactgcttgaacccgggaggtggaggctgcagtgaaccaagatcatgccatgcactccagactgggtgacagagtgagactctgtctacaaaaaaaaaaaaaaagagaaatcctcacgaaagaaagatccaggttgggtgcaggggctcatgcctgtaatcccagcactttgggaggctgaggcaggaagactacttgagcccaggagctcaatgcaatggagtgagacccacgtctaatttaaaaaaaaaaaaaagcggggggtggagtggggtaggggaagaaagattcaacccatgtggcaaacttcatcactgtctcattaaacaaactgccacaactccaatcttcagtgacctccatccagagcagtagcacccatcaatatcaaggcaagaccttccaccaacaaaaagattatgacttgctgaaagctcagataattgctagaattttttagcaacaaagtatttttaagatatttgaaaaatgtgccaagtatagtggcatgcagctgtaatcccagctactcaggaagttaaggtgggaagagcccttgactccaacctgggcaacacagcaagaccctgtctcaaattttattttattttattttgagacagagtctcactctgtcacccaggctggagtacagtggcactatcttggctcactgcaacctccgcctcccgggttcaagcaattctcctgcttcagcctcctgagtagttgcgaatacagtcgccagacactacacctggctaattttttgtaattttagtagagatggggtttcaccatgttggccaggctggtctcgaactcctgacctcatgtgatccacctgactcagcctcccaaagcgctgggattacaggtgtgagccatcacgctcggcctcaaattttaagagagagagagagagaaaaaaagaaaatgtcatacataatatggacagttgagaaaccacaaggtataacctgaagtttttataagttagccaagtctctttaaaaaaaaaaaaatctcgccaggcacggtggctcatgcctgtaatcccagcactttgggaggccaaagcgggtggatcacctgaggtcaggggtcaagaccagcctggccaacatggtgaaaccccatctctactaaaaatacaaaattagctgggagtggtggtgtgtgcctgtaatcctagctagtcgggaggctgaggcaggtgaatcacttgaacccgggaggtggagattgcagtgagccgagatcacactattgcactccagcctgggcaaaaagagtgaaactccactaaataattaattaattaatctcatttatctctgtgtgtagatgaatatgtatatgtgtagttataagtttaatttggaggtcatttaaaattcttgagtaaagatcagtattaactacaattactaatttagactttgtgcagcatttacaagtaataaaaatgtacttgtagcagtttgcaatttgaactattcagtaattcaggaagtttacttcccacccattttattccaaattactgatgaaatactgctatcacacattcttgtgaaagtggtatgttgctaaacaacatataatttaagggaatacaaaaaagaacctacaatttttttttacagttgggttgaaacaattttgccaaataaggtatacagcctagttgataaagtagattggtttaagttagacaaatcttaggttttaaattttcacttccccatttaccagccaggcattaaatctgagtcaagttgttcacctctctaatgatgcttctgttttttttctcatctgaaaaacaggaatcatagaaattatacttccaagatagccaagaggattaaattagcacaattcctggcataaagcaagcattcaataaacgttagctatttattcacactagaaaaagtgtgaacaaaaattaaatgtagatcaaattttaaaatgtctatttttcacagcattttaaaaacctgtattttgatatatagattagctgataaaaattatcagaagatttgagattaaaacraagtagctcttagcatataaagtgacgtggctgcttaacatgatgaaagagaaagtaatgagactgttaaccttggaagtaattttagttggatgggaaaagttgatatttgaaagaatgtatctatttaaatatgcagccacatctcaaaactggaagctaactttcaaaagatactaaccaggttttaattatgctaaaactgaactgagatcactcactcgcagcttatattctaattaaaacccatgaaggacagaaaaggttaaggagaggggcatataagtttaagatgcctgtaagaggaatatccaggtggaaatttatacataaacttgtctgtattggcttttatcaactatgctccagatagaacactaggggctttagatatgctatctcacatgagtttacattataataccctgattttacagatgaggaaactgaggccagaaaattatttggttcaagaccacttatgtttataccaagcttcagacctacaatcttcttcaaaaagtacaggtagccacatgggagtagaagagtcctatctgccttttaagaagatttcttggtggcagcagtgaggataaagaaaatgcatctgagaaatatttagaatggaaaaccacctaggcatgattttgtactaagggtgggtggaacagtagctaaaagagtcagatggttttatctctaactttgttttcaccaaacaagacaaaagaagagctggtttcgataggggttgatgatggggaaagaaatgtttcaattttggatatactgagtttaaaatacctgagaagaatatccacatgtaaatttatacatgaagttgcccattctggcctgcagttcagggaagaagtcacgataaatttcattctgctgaatttatcagagctgaagacatgtaaagaatgtacggggacgaagggcagaaaggcacgttgttagaagcttggagcagatagagcaaaaggccttggtgaaaacattttgtgtctaatttctctcgaccctgtccagtattgcacataacatacaacagagtgaaatatatgaatgaataaatttatgttataaaatttctgtctggttttgctatataaaatgcctatatctattcattataaatagttaaaggaaaaagttgcaatttgagtttacagtcttgaatttcacattaaaagcatcagtatgaaatgataatgtacttaatctctagcaatgaatatggctagcacccagaatggcttctaaattccatttctcatctcaaaaaaactataaactcatgggtccttagagaaatggctgattccatgtctcaggcagtaaatgccttctggaatatctgaccagataacaaggaagctaccaaagattactcggggtatgtcaaagctcaagtcaacttgaggaggttcccaacagacaaacctaggagaaccccctccaacttcctgccagccctaagcaatcactaatctattttttgtctataaacttccccatccaagactttcatatgaatggaatcatataataatgtggacgtttggggctcacttcacttagtataatgttctaccatgtatcatgcctcatttacatttattgctgaaaaaatactccactccatattccgcatttttattatctacaggttaatggacacgagttgtttccagtttttggctattatgaataatgctgctataaacaatcgtgtaagtttttgtgtggatgtatgttttcagtttgttgggtatatgtgtaagacaggaattgctgggtcatatggtaactctatatttaatcatttgagaaattgtcagactgtcttccaaagcagccacacctttatattcccatcaagagtgtatgaggaggctggatgcggtggttcacatctgtaatcctagcactttgggaggtcgaggcgggtggattacttgaggtcaggagtcaagaccagcctggccaatatggtgaagcccgaactctactaaaaatacaaaaaaattagctgggtgtaggggtgggcgcctgtaatcccagctgctcgggaggctgaggcaggagaatagcttgaatctgggaggcggaggttgcggtgagccaagatcacgccactgtactccagcctgggtgtcaacgagactccgtctccaaaaaaaaaaagagtgtatgaggattctgatttctccacatcctcaccaacacttatgattcaactttgtttctagtcatcctagtggatgtgaagtggtatctcactgtagttttaatttacatttccctgataagtaacaatgttgagcatcttcatgtgcttactggacattagtgtatcttccttgtccatttggagctctgcccattgggttgtctttttgttactgagttgtcagagttctttatatattctagttgtgagttgcttaccagagaaatggtttgcaaatattttctctcattctgtgggttgtcttttatgacggtgtcctttgaagcacagaaggttttaatttttatgaagttcagtgtttttcttttgctgttcatgcttttggtatcgtatctacaaattccttgccaaatacaaagtcatgaagatttactaatatctttttttttttttcaaggagttttaaagtttcaggcctttaacctatttkgagttattttttgtatatggtcccacctcgttcttttgcatgtagctatttagttgtcccagtaccatctgttaaaaagcgtattcttttaccactgaaagatcttggcatccttgttggaaatcagttgaacacaaataggtttatatctggactctctattccattgatttatatgtccttgtgccagtaccacaatgctttaattactgttgttttgcagtaagttttgaagtcaagaagctgagtcctcttattttgtcctttttcagtactattttggctattctgggtcccctgcaactccatattaatttcagaatcagactgtcaatctttacaaagtcagcaaggattctgataggaactgcattgaatttatagattagtttggagaatactgctatctttacaatgttgaatcttctgatccatgaacatggggtgtttttctatttatttagattgtctttaatttctttcagccatgttgtaagttttcagagtatgagtttttctttgttaaatttattcttttgatgtcaccatgaataaaattattttcttaattttttttttttttttttttgagacagagtctcactctgctgccccaggctggagtgcaatggtatgatcacggctcactgaagccttgatctgctgggctcaactgatccccctacctcagtctcctgagtagctgggactacgggcatgggccaccaacatgcctggctaatttttgtattttttgtagagatggggttttgacacattgcccaggccggtctcaaactcccgggctcaagcaatccacccaccttggcctcccaaactgctagaattacaggcatgagccactacctccagcctgttttcttaatttaatgcttcactgcaagtgtataataagacaactcatgtttgtatactggttttatattctgcaaccttgctcaacttgtttattagtcctatactttttaaatgaattccttacgattttctataaacaggttgagtatcccttatccaaaatgcttgggggccaggcatggtggctcacatctgtaatcccagcactttgggaggctgaggcaggtggatcacttgaggccaggagttcgagaccagcctggccaacatggagagaccccacccgcccaaccccggcccatctataaaaaatacaaaaaaattagtttgacgtggtggcacatgcctgtaatcccagctagtaggggggctgaggcaggaaaataatttgaacccaggaggcggaggtttcagtgagccaagagcacaccactgcactccaatctgagtgacagagcaagattgtctcaaataaaaaaaaaaaagtttgggaccgaaagtattttgaattttagaatatttgcattacatgttattagttgaacattcctaaatccaaaaacccgaaatccaaaatgctctaatgaggattttgagcgtcatgttggtgctcaaaacactttgcactttggcgcatttcaaattttacatttttggatttgggatgctcaacgtgtataagatcaggtcatctgaaaacagtcttacctcttcctttccaaactagatgccttttatttatcttgcctaatttccttacctagagtctccagtgcaatgttaaacagaaatagcaagagcagatatccttgtcttgttcctagtcttagaaggggaaattcccagtctgttatcactgattatgttagctacgaggttttcatagatgccccttttcaggttaaggaaactcttctctattcctagtttgctacagtgttactatcactaaagggaattcaatgagtcaaatgctttttctgcatctattgatataatcatgtaatttaaaaattattctattaatatattccattaattaattttaaatgttgaactagccttggcaacctggaaaaaatcccagttgatcatgtatgatacagtttgttttttaaaaaaatatgttgtgggattcagtttgctagtactttgttgaggattttcacatccattattcataagagatattggtctggagttttcttgtgacgtctttgtctggctttattgtcagggtaaataccagccacataaaatgatatgggaacagcagttccctcccctcccgttttttggaagagtttgtaaagaatcggtattagttctttaaatgtttggtagaattcactgtaaagctatctgagcctgggcttttcattgaaggtagtttttaaattactaatctcattacttgatatagatctattcagattgtctactgcttctgacatttgacatatgacaattatattgctataaaatttttcatagtattcttttatgatctttattatttccttccttatgcctccttaagtaggtttgctctttttccagtgtcttaaggtggaggggcgaggtcattcatttgagatctttcttcttccttaatataagcatctgtaactataaatttccctctaagcactgctataactacataccgtgagtgtttgtaatgtcgtatcttcatttttattcaccatagaacattttcttttttaaaatacattttaaaaaatagtgacagggattcactatgttgcccaggctggtctcaaactcctgggctcaagcgattctcctgccttggcctcccaaagtgctgagattaaaggagtgggctaccatgcctaacccactctagaatattttctgatttcatttggatttcttttttgatctgttggttatttaggaatgcattgtttaattaccacatatttgtgagcttctcaaattttttcctgcttttgatttctaatttcattccatatggtctcagaacataatctccatttttttttgagacagagtctcactctgttgccagactggtatgcagtggcatgatcttagctcactgcaacttccgcctcccaggttcaagcagttctcctgcctcagcctcccaagtagctgggagtacaggcgcgtgccagcatgcccagataatttttgtatttttagtaaagacagggtttcaccatgatggccaggatggtctcgatctcttggcctcgtgatcggcccaccttggcctcccaaagtgctgggattacaggcatgagccaccgcgccaggtcatttgcattaaaatctattggccaggtgcagtggctcacgcctgtaatcccagcactttgggaggccaaagcgggtgatcacctgaggtcaggagtttgaggctagtctggctaacacggtgaaaccccgtctctactaaaaatacaaaaattaaccaggcatggtggcaggtgcctataatcccagtgactggggaagctgaggcaggagaatcgcttgaactcgggaggcagaggttgcagtgagctgagatcacaccttggcattccagcctaagcaacaagagtgaacgtgaaactctgtctcaaaaaaaaaaaaaagaaaaaagaaatcagaggtttgtttcatggctagcatatggtctataatggagaatgttccatgtgcacttgagaagaacatatactctattgttgctgggtgaagtgttccatagatgtcagttaggtctagttggtttatagcgtctatttacttgttgaccttttaattttctatacgtttcttttttttttcttttttttttgagacagagtcttgctgtgttgcccaggctggagtgcagtggcatgatcttgactcactgcaacctccacctcctgggttcaagtgattctcttgcttcagcctctcgagtagctgggattataggagtgcaccaccatgcctggctaatttttgtatttttagtagagatagggttttaccatgatggccaggctggtctcaaactcctaagtgatctgtcygcctcggcctcccagagtgctgggattacaggtgttagccactgtgcccggcctgttctatacattattaaaagcggtatactgaagtctccaactactaatgttgaattgtctgtttcttcatttctgtttttgcttcatgtattttggtattctgttattacatatatgcaacataactgttacagcttcctgatgaratgacccttttatccttataaaacgtctctagtaacactttttgttataaagtctatttgctggatacgagtaaaaccactcycgctttctggtggttgctgtttacatgatatatttatttccatccttttactttcaatctatttttctttgaatgacaattatgtctcctttagctagcatacagctggataatgctgtttataaacttagtctgacaatctctgtcttttgatttcaatccgttcacatttaatgttatttgtatagttagattcaaacgtgcaattctatgtcccatgtctgttttgttcctctactattcctttagtgcttacttttgtattattttctaatgtagcatctgcaggtttaaaatgatttttaattatattttttgagttgtttttagtagttgctcaaggttttagaatatataccagaaccagcttcagatctatactagcttaattcttgtgacagacaaaaacatgactactatatatgtcaattccctcccccatttatagtagcattgttacagatatcatatctgctcatgattacaaacacaatatgtggtcatgattactgctttcccatctgtagtcatttccttagcccaacacagctttgctcctacccacttatttttgtgctgttactggcagatatattacagatttattacatttctttgttatgggatcagcattacatatatgtatatacatataaaatagcttgctttttaataaacttataacaagaaaggagaaaaatgttaatttcttttttttaaagtaattatataattaccttttctgatgctctatttttttgtgtgcattcaaattaccatctagggtcatttgccttcagcctgaaaaaattcctttgatgttccttgtaaagtgggtcagctagcaacaaattttcgtttttatctaggacagtctttattttgctttcatttaaaaaagatagcattgttggatataagatttttggttgacagttttcttccctcgtcctttgcacattttgaatatgttctcccaacgccttctggcctccactgctataagaagtcagccattaatcctacagtggttccattttgagtgagttattttcttactattttaaagattttccctttttaaacttttagcgtttttactgtatgtttaaattgctacatttttcttacttagaaaaagattttcagtaaagatgctccaatgtatggaattatatccaataagcccattgttagttaaaaatatcaaagtcgaaaatgcatttaatatacctaccttcctaaagatcacagcttagtctagcttaaagtgctcaaaacactgacattagcttacacagttgggcaaaataacctaacacaaagtatttttaaataaagtgttcagtacctcatatgatttattgaataccacattgaaagtgaaaaacagagtggttgtaagggtacttgaagcacggtttctactgaatgctttatcactttcacttttgtgctatcatacactaaaaacttgtaagtcaaaccatcattcgtttgtatgggaagttttctgccactatttgagtgtttttttctattgctatatcattttctattgttatcttctttctcttcctcctctccttccagaactcccattactcttaagtgtttaatggtatgtgggatggtgtcttatgttttgctgaagctctactcattattatcttatctctgttcctcagtttgcataatttctattgatctatgttcgaattcactaaacccatcttctgccagtgaagaagagcactgctagtgaattttcggttaattatttttttcaattccagaatttctaattgttttttcaataatttttatattcttattgatagcctctattttatgcaaaattgtcactatacccacttttacctctttatgctttttctctagttctgtgaacacacttatgatggctattttgaagtcttttctgttaaatctgacatgtggtctctctcacacaggcagtttataaggtctgctttttttctggtgcatgagtcataatttcttttttctctgcatgcctcataattttttgctagacactgacatttttgataatatagtatagcaaatccagttactgttcctttcttctacctccctctttcttggtgcttcttactgtttcttgcttattttttagtgactagccgaattattttagcaaagtctatttccccacttccccaacctccacaatgctaagccttggatgttgatccacagagaggtacatttttgggtacgcccacagtcaccctggacttacagtgatattctagctcttatcacaccaaggtgttaaactccactaactgttctactgttatttaaaaaaaaaaaaaaaaaaaagccctgggtttatattctacaaattaattgaaatcaaaatgtggctcaggttgggtgcagtggctcacacctgtaataccagcactttggaaagctgaggcaggtggatcacttgaggccaggagttcgagaccagcctggccaacacggcaaaaccctgtctccattaaaaataccaaaattagctgggcttggtggcatgcacctgtggtcccagctaaccgggatgctgaggcaggagaatcgctcgagtccaggaggtggaggttgcagtgagctgagatcatgccactgcacttcagcctggacaacagagcgagactctgtctcaaaaccaaccaaccaaccaaccaaccaaccaaccgtagctcatttgaaggaacagtttgaggtctatctgatatttcttcttgctacagtagagcttcacttagctgtcttattctggtcttttctatagtcctctcccacaactaccaccatttttgagagtgcccttagctttgaaattctacacattatcttcccaattaagtaagctgcattcagaagagattaagaactattggtctacttctccccaccacaaaaaatctctgagccaagtctctaaagctggggatggaaataattgcaagattctctcagaatgaaatccctgctctaggagctgagtacttggcagaaagggggacagcaacctgaagacttctaggcttgactcaatcattgcttcacaagccagcgcaacggcaatttttgtcccagtattctcagggtgtcaagcccaaagtacagccttcatttcattagcaggggatgggtgtaagaagggagcctctacctctaaagtgcatttgcaattataataaatgcaaatgatttaatcacaacaatgaaaacacagagacagcacgaggagaaaaaagagaaaaaccatgatctcaatgtagtctgtttataagtaactaacttcaaacatatcttaggtacgttaaaggggaaaggttggaaaagaatacataccatttaaacactaatcaaaagaaagctgaactggattaactcatcaagtgaaacaattctgtgtatataccttaaaagacagcatcaaaatacatgaagtaaaaacgacagaaatgaaagaaaaaatatacaaggccctaatcttagagactttaacactcctgtctcagccatcacaaaactagtaggcagaaaattagcaaagacataacaccatcaaccaactggatctaactgccatttatagaacattctatgcagtaacagaagaatagtcagtctttctaatgtatgttctctgaccctaatggaattacaacacaaaaattggtaacagaaaggtaattaaaaaatcaccaaacttctttacgttgacttgttcctgtcattgattagttctagcacgctttttgtatttttaaaaaattacttgggtgtaaataatcaggtctctcaataagaagttttgttttttcctttcatatctctatgcctattatttttcttgcctttttgcaccagtgaggacttttaatataatgtttaataggattggtgggaatagaacttgagggaaaggacaatctcgcctttttagcatccagtcttactatctctaggttttttgtaattgccctttgccaggttggggaagttctctcattaacacaacacacttctaacaatccataaatcaaaaggcaagacacaagggaagctataaaacgttaaaatgaacaaaaatgaaacacatctacatttatggaatgcagctaaagtagtgcttatagggaaattcattcccttaaatgattataattagaaaatgagtaaggtctcaaattaatcatccaaagtgtctgccttaagaagccagaaaacaggccgggcgcggtggctcacgcctgtaatcccagcactttgggaggccgaggtgggaggatcacttgagcccaagagttcaagaccagcctaggcaacacagtgagaccctgtctccacaaaaaatacaaaaattagttaggtgtggtaacataagcctgtggctccaggtacttagaaagctaaggtgggaggatggcttgagcccaggagttcgaaacagcagtgagctgtgattgtgctactgcactctagcctgggcaacagagaccctgtctcaaaataaataaataaataaataaataaataaataaataaataaataaatattttaaaaagtagttttattgttgttgttgttttttgggggggggatggagtctcgtctcactctgtcaccccggctagagtgcagtggtgtgatatcggctcactgcaagctccacctcccgggttcacgtcattctcctgcctcagccacccaagtagctgggactacaggctcccgccaccacacccagctaattttttgtatttttagtagagacggggtttcgccggggtttcgccgtgttagccaggatggtctcgatctcctggcctcgtgatccgcccgccttggcctcccaaagtgctgggattataggcgtgagccaccgcgcccggcctattgttttgatgatgtgcccatgtcattttattttgtaaaagttctccaataccctatttgcatgagcccaggaattcaaggttacagtgggctatgatcatgccaccacactccagcctgggtgatggagtgagacccaatttcttaaaatgaaacataacaccctattataaactaaagcctacatcatctaagttacttaataagcagcagttaaggttatttttgtggcagaatatacacaaaatttactgttttaactatttttaagcatacagtttgtatgttcacattatatacattcacactgtggttcaaccatccatcactatccgtctctggagctttgtcatcatcccacagtgaaacacagtactcattaaacaatagctccccattcttcccatccccatgttcctgtagtcactgttctactttctgtctctatgaatttgactactgaaggtacctcatataagtggaagcattcaatatttgtttctggcttatttcacatagcgaagtgttctcaaggttcttccacaatgtactactgtgtcaagatttcttcctttctaaagctgaatataaaccacattttgttcatccattctwctcatgctggacacttgagtcttttctacagattttaaatccctgacttaaccaataaaaggtttgaatcacaaacttaatttccaggtaaagagcaatgttgaaggccacctagccctacagccttctactaattaaatcacttgactgaagttaccccaaacatagaattctgtattttgcagtattttgagtaagagtggctaccaccttaaacggttcacatttctctcttccacgttggcaattatcacctgtattttatttagccacgacacacgacagcagatgtcatgtgtgtgacacacctccctgggcaaggagatttttgtttaaattagagatggggtctcgctatgctacccacattggtctccaattcctgagctcaagcaatcctcccatatcagtctcctaagtagctgggactacaggtccccaccactgtgactagctccaatatttttttaattgtggttaaaaaaaatataaaataaaatttgccattctaaccttttttttttttttttttttttttgagatggagtctcgctctgtcacccagactgctggagtgtagtggcgcaaccttggctcactgcaacctccatctcccaggttcaagcaattatcctgccttagcctcccaagtggatgggataacaggtgtacgggactcacctggctaatttttttgtatttttagtagagaggcggttttgccatgttggctaggctggtctcaaacttctgacttcaaatgatccacccgcctcggcctcccaaagtgctgggattacaggcatgagccaccgtgcccggcccattctaaccattttaaagtgtacagttcagtgacattaagtacaatcacactgttgtgcaaccatttcctatttccaaaatttttcatcagcaaggccagatttttacaaaactcaaaagaactgcagggaacaaaagcaaagcgcaccagactttattttggcatgatcactgcaaaataatcttatgtaagaattactcaatttaaatttatatcaaaagattttcatttttaataaacacaattatatgttcaatctcattttaaaaaattaagctttattcgacaatgagaaggcatcttgattttttttcttgatattaaaaaggcaaagcaggccaggcgcagtggctcatgcctgtaatcccagcactttgggaggccgaggtgggtggatcacctgaggtcaggaatttgagatccacctggccaaaatggtgaaatcccatctctactaaaaatacaaaaaaaaattagctgggcatgatggcaggtgcctgcagtcccagctactcaggaggctgaggcaggagaatctcctgaatccgggaggtggaggctgcagtgagccaagtttgtgcctttgcactctaccctgggtgacagagtaagactccatctcaaaaaaaaaaaaaaaaaaaaaaaaaaaaaggcaagcagctgggcacggtggctcatgcctgtaatccaagcacatatgggaggctgaggtgggcagatcacctgaggtcggaagttcaagaccagcctggccaacatggcgaaaccccgtctctactaaaaatacaaaaaaggcaagcaagcaaacaggtaggtaaattttttcacatttaatattagaattcatgcaatttatagaattatactgtatatgatgttaattgcaaattttttcattgtatcattcttgctcataggcaatacggacaaacaactcacactttgcagtcatcctcctcttattaaaagtttattcattggtaaaataaaattcaagtaactaataatcacaaacactttggtaatgtataattaccacaactgttcatggtacctcaacaaacatttactggtggcatatacttgtgctaaagcccagaaaagtaaaccaagtcagttacttaatgtcagttattaacgtcagagctagggatgtcagttacttaatgtcagggctagggatggagcacagatgacttggttcttaagagtccactactttgtacaaaaagcactgttggccaagcgtggtagctcacccctgtaattccagcactttgggaggctgaggcgggtggatcacgaggtcaggagttcgagaccagcctgaccaacatggagaaacaccgtctctactaaaaatacaaaatttagccgacgtggtggcacgtgcctgtaatcccagctactctggagactgaggcagaagaatcgcttgaacccaggaggtagaggttgcagtgagctgagatcatgccactacactccacagcctgggaaacagagcgagactacgtctccaaaaaaaaaaaagtccactgctttgtacaaaaatcactgttaaaaacaggacctgggggccaatctctctaaattttaagtatattttgacttcttttctttgtgaaaatcatcacatccatatacacaaaacgatctgaccataatgcagtcactgactgtggctccttctatcttgcggcatctgggattctggctgaaaggttttaccagtgctggtgggaaccagtgagttcttcctttccgaagtatggagcaaagccatgtcctttgagtttgaactggtggagccaagagttcctcactagtctctttactaaggagtttttggttttcataaaaatctttgctttttaatttcttctctgtatttttcattctttagtatttcctccatcgtaggtggagttattcttgttttcttttttttttttttttttgagatagagtttcgctctcgttggccaggctggaatgccgtggcacaatctcggctcactgcaacctccgcttcccgggttcaagtgattctcctgcctcagcctcctgagtagctgggattacaggcgtgcaccaccatgactggctaatttttgtatttttagtagagatgaggtttcaccatgttggccaggctggtctcgaactcctgacctcaggtgatctgcctgccttggcctctcaaagtgctgggattacaggcgtgagccaccacacccagcctcttttttgttcttctgatctaagcttcccattctgttggaatatcccctacttcacagtctaattttttatttgctgcttctacaattcttttctcttgaatagtttgtcctcacctctccagttcttgtactctggaatagagtagtatttgttcccaaaccagttcatgcccacatgctcctatacttcttttgacagtgatatccacaaggcacacaacaaatcctgagaccaacccgtgctgtccactctgctctcagaactgctagcagccagtatgcagcaggggtaatgctccagccactgatccagcccacctacaagtattctttctagtgatttgataatagtgtaagaaaacttgtttctataaaggaactgttcttgttggaataaaaatcttactacttctaaaactcatattcgatctgttcaaagcagtaaatcaactatccgaaaagtgacaaactacacaactaaaaagattgatgtggaaaaatgttaggactcattacagtcaattcctttctaaattatcagactgagacgaaatcaggcaaattctgtaacaaagtgatctttaaaaaaatgaaaaaatcaccaatgggccagaatattaaaagctgagtccttagctgtagttatttgctgcctaacaacctaaagagaaaaaagtgactgtgaaaatgacagatattagcctattctgattatctgaatatcccagaaaaatacatactttttgacctgtaaatgtatttttaaaattacaataaacttaaaaaaaatctattaatttgaatagtctctgaaacttactacctgaaattttccccataaattatatctcacactataactactcaattcctattaaggtttctaattctagatctgccatagacactcgtggtatccctgtccctttgaactacagaagattgctccaaggataaatacatttgaatcttctgacacattactaagcattaattaaaagaattatagtcttttcatattacccaaaactcagtgacagatttcttcacctcatgcataattaggctttgagtatttcacattcaattcaattatcaatgaatatattaacgttgcctggagacagcatgtccactaggtagaacaacagctttttagttcagacagacctgcatgttaatcatggttatatgactgtagtggctggatgaccttaaacaagtgagctttctgaggactgtcatacagattcaatgagatgagtctatgtaaagagcccagtgcccagcacagactgtttatataagaatatggtgcagcagtgattaacagataagctatcattattgacagatctctgactctaccacctttgactaaaatctcagcaatatccctctgaatgtcaattctgggcttctactgaccagctagagtgctagacaattccatctgaatgtgttcgccatcttgcaaattcaatgtctgaaaacaaactcaaattattacccaactaacataccactacagaatttcttaatctgttaatcatggayaccttcaattgctcagtcacccatagcttaaaatctagtactcatttttgattctccatgccccatccctcacctcccatcaaaactgggtatcatccatcaggcactctcccttcacagccaagtttataaaaattacagatactccccacttataaatgtttatcataaatcaaagtcatttctcagagcaagagtgttaactatgcctattaccaagagatgataataatggacttgtgtggtcatgtaagtcttagctctctagtcttcattagttttttctctgtgcttagttttgaggtatattactaaatccagcatgttcgataagcacaaaaacagtaagaatggtgaaagtactaacaaacagaggtaagtgttggaaataaaatgcagagacatattaataaagaataagaaagcttctgctcccataaatgggatcaatattaaatagaatgaatgactctaaagtacttgcaacaaatcctgcaacatatgaagatgatatacctacatgataactgataatagtaagagaaggaaataatgattggagaaatggaaaaactttggagtatgtggttagagtgrgattaacactagacagcggattttaaactcgaatctcaggcctctttacactcttaaaatttattgagaacccaaaagagcttttatttacatgaactatatctaaaaatatttaccgtattataaattaaaacttagaaatttaaaaaattattcacctaaaaataacagtacattttaagacaacatagttttcaagaaactaaattttctcagacaaaaaaaaaaaaaaagaaagaaaaaggcaagagtagcactgatttttgaaaatctctttaagtctggcttattggaaatcagctgaattctcacatgtgttaagtctgttacagtatcacacttcagctgagcacagtggctcacrcctgtaatctcagcactatgggaggctgaggcaggcagatcacctgaggtcaggagttcaagaccagcctggccaacatggtgaaacccccgtctctaccaaaaatataaaaattagccgggtgtggtggcgcacacctgtagtcccagctacttgggaggctgaggcaggagaatcacttgaacccaggaggtagaggttgcagtgagccgagatcatgccactgttctccagcctgggtgacagagccagactctgtctcgggaaaaaaataaataaataaataaaataaaataaaaaaataacatttcaagtaggtagcctctggaaaactccattgtatatctaagaataagaaagaaaaatggcaagtagtgtcttaaaacactgctagaagactgttttaatctcacgtactctctaaaaggttctcgggatccccaggagagtcctcagactacattaaccactgctttcaagtttaatgttaaaaatcaggacacaggcctggtgcggtggctcatgcctgtaatcccagcactttgggaggccgaggcaggcagatcacctgaggtcaggtgttcgagatcagcctgctcaacatggtgaaaccctgtctctactaaaatacaaaaattatccaggcatggtgacacgcacctgtaatcccagctacttgggaggcagaggcacgagaatcgcttgaacccgggaggcggaggttgcagtgagctgagatcacaccactgcactccagcgtgggtgacagagcgagactccgtcttaaaaaaaaaaaaaaagaaaaagaaaatgaggacatggttaggaatttgtagacaagaacttaaaacaagactaagcaaggtgaatggactgctgtttaaataaaccacagaaagacagttccacatctgcaagattctaccaaatctgcatagcaaaaagtagtaaaacaatgtgatgtgggaagtgctcaagaggtctgttttgccatttgtcactgaagatggatgggtgtaatgtttgtgtatttgaggcaggggtcccttacctgaacaaatctgcaacgtagatataaaaaatttaggtggctgggtgcggtggctcacgcctgtaatcccagcactctgggaggctgaggaatgtgggtcacctgaggtcaggagttcaagactagcctggccaacatggtgaaaccccgtctctactaaaaatacaaaaattcgtcaggcacagtggcgcatgcctgtaatcccagctactcaagaggctgaggcaggagaattgcttgaactcggaggtggaggttgcagtgagccgagatcccactgcacttccagctccagggcaatagagcaagactctgcctcaaaaaaaaaaaaaaaaagatttaggtaaaagayggtggtcaagagaatgtttatctggccaagaaaaatagaagctaatgggtagcttcagaagttaggtttccttgcagactttaaaaaaaaaaaggtgggggtggggcacacaaaacaagccaactaaatttgcatatctgtattgaaggcctagaattgtggggatcgttttgttaccataggagagccagcctaaggatggcaaagcaagaacgtatgtcctcaaggatgtcactgaattgctaatttaaccaactctgaggctgttttttgttttaaataaatgtccgtattgtttaagccacctgattcgaggttttctgataacataaattgaataccctcatacacatggcccataggtacttcagcagatcccaagtgaattcattatcatctctcaaaaatgcattcttctttttcaagtactctggtcaatgacaggaccagctccaaaaagctaaamcccccaaatgtccatgttctaatcccttgaatttgtgaatgatacctttatggctttgcagatgtgatgaaatatcttggaatggggagattatcccagattacccaggtgggccctaaatacagtcacaagtctccttatacaaggaaggcagatgtagacttggcacacacaggagaaggtgaaaagtggggaagaggaggtggtgtagcaacgtgaagaccagtgatgaatgatatagtcacaagatgaatatgcctgcagcccacataagctgcaagaggcaaggaatggtttctctcctagatccttcggagggaaggagcacttgccaacatcttgatctcaacccagttatgattatttcaagcttctgtgaggaaattacttcgttgttttaagccatctaatttgtgataattaattacaacagccacagaaaactaatacaatttctcttccccttttcctcctaacacagacctggtcaccaagacctatctcaaatccatcccttcctttctccactgccactgcctctgcctctgccttggactactgaaacagcatcctgattgatytccttgccttcagtctcaccggccttatattaatctttactgttatttaaactgtctctaaaatacaattatctgagtccagacacttattagccyacagcttgataatcacgctgaactatcaacagtacttggtacttttcagtactatcctacactctatcacatctgacatggactgatttaaatacataaaatccttgagatctggcagaactattattatctcccattacattgatggggaaattgaggctcagagaattaaatgacttggctaagcttacagggctagtaacagcaacttatatcctgatggtaaactttctcgctattttataatctctctattatgcttttagatactttaggctgctatctctccctccctgctctgcaaaatgaactctttgccctaaactgcttttgactcatcattttccatatgtatcatacatattcccactctcccagctctggtccctttttggaattccctcctcactgatctccacaggtcaaattctactttattttgttttcccttctaagctaaatgtcaggaaagcctttgttgtttttttttttgagacggagtctcattctgttgcccaggctggagtgcagtggtgcaatcttggctcttgaattgcttgaacctctgcctcccggattcaagcaattctcgtgcctcagcttcctgagtagctgggattataggcgcgtgccaccatacccagctaatttttgtatttttagtagagacagggtttcacyatgttggccaggctggtctcgagctcctgaccttgggatccgcccacctcggcctcccaaagtgctgggattacaggtgtgagccaccgcgcccggccagccttccatttttatgtcactttcagatgtactttcaaatatattctttggatcttaaaatcttaatgaaactaaagatgagaaaaataaagattagagaaaatatggcctaacagggattcaaattcagagcctctgactttaattaaatcctatcctcattttatcattaaaccaagctgtctttctctacactgaactctggtggtagttctgttgggactcactgatcctgtgtttgatagcatatcaatttaggtttaccagggtatacactctaatctctccaaggattattccaatatatttatggaatcaatcacatctgtacttccagcataggttctttaaaaatcactttatgaatgctttcctgatataattcatgtacaataaactgcatagtggacaatttgatgagttataacatatatatcaccaccacaatcaagataaggaatactgccacaatttctgtaagtttctttgcagtctcaccttcctgtccttgccaggaattatcaatgtgctttacactttagtagctccattttctagaattttatataaatgggattatatagtatgtactctttttttctggcttctttcatggacataattattctgagattcatccatgctgttgagcgtaaggatttttgttctttttattgctgaatactatttcattgcatggatgtaacacaatctgtttatcatttaattgttgatagacttgagttgtttgcagttgggctattacgaataaagccgctatgcacatttgtgtacaagatttgtgtggacaaaccagcagatgttcttaattatttctgtttctataccatttatgtgttatactcttaatatggcttattatactgcagtgattccataaaaaaagtcactatccaccagtataatactttacatacaagtgatcagtaagtagtttacagattttgctcacccatgggcctaatgagacttgacagaaaaggctgagccttgtctatattctataactgcctaaaagagtacatacactggtatgcaacaagatcataagaaaaaaattaaaaattaaaaaaataaataaaagtgtgcattgaaaaattgctgaataaatgttcttgatttacggtgcttatttttgggataagygtattattcttttatgttcaatcacattattattaaaagcttaattgcaaatgataaacaaaacatataaattagtattttaagagtgtaacatacacaacatacaaacgttttgcaggaaacctgttaaaacaattgatttaggaatggaagaaccacagctcaacgtagaaacttcatgttaaacttacatggaaaatgtatacgtgtactcaaactagtgaaaattacaactcacccaccccaccaaaagttattaaaataagacgtttctcactattaagactcttttttactttacaaatagagcagtacctcatattttatattttgctctaaacttgtcactcttatcaatctaagtaaaggcattttcccatgatatgaaccaagtttttagattagatttacatgagaactcatatttgggaacatgctttttctttttctgaacactactgaaagtgttttgtgatctttatttcacactagtttacttcccttaagtgttttttaagttttcaaggagaatttcaaatggactactttatctgagttgtaaaaagataattttaggcctggaacaatggctcatgcatataatcccagcactttgggaggccaaggcaggaagctcatttgagcctaggagttcaagaccagcctgggcaacacagagagaacttgtctctactaaaaattaaaaaaaaaaaaaaaaattagctaagtgtggtgctgtgcacctgtagtcctggctacacaagaggctgaggcaggaggatcacttgagcctgggaggttgagactacagtgagctgtgatttcaccactgcactccagccgggatgacagcaagatcttgtatcaaaaaaaaaaaaaaaaaagaccatttggccgggtgtggtggctcacacctataatcccagcactttgggaggccaaggtaggtggatcacctgaggtcaggagtttgagaccagcctggccaacatgatgaaactccatctctacttaaagaaaaaaaaaaaaaaaaagaaagaaattagctgggtatggtggtgcacgccgtcatctcagctacttgggaggttgaggcaggagaatcagttgaacctgggaggcggaggttgccgtgggccaagactgcaccattgcactccagcctgggcaacaaaagcraaattccatctcaaaacaaacaaacaaacaaacaaaaaaaccattttataactagttgtttttcaatgaaacaaagattctaatcattttactctatgaataagccctttctagttcagagatttgaaaaagtaatggagagttatcaataaatcaattaaatcagaaacattaaatgattagaatttcctctccttgttagtagtcaccaagtcatgctgattgttactttctacatcaagagaagataaattaatgtacattgaataactcccaccaagtgtcactatctcactctggactcacaaactctggtaaaaggattttttawatccagttataggccgggcacggtaactcacacctgtaatcccagtactttgtggggccgagatgggtggatctcttgaggccaggagtttgagaccagcctggccaacacagcgaaaccccgtctctactaaaaatacaaaaattagctgggtgtggtggtgcacgcctgtaaccccagctactactcaggcgcctgaggcacaagaattgcttgaacctggggggcagaagttgcagtgagctgagatcacgccactgccctccagcctgggtgacagagagagactctgtcttaaaaaaataaaaataaaaataaaaataaatccagtgttaaatgaggagacagaaaatcaaattaaattgtccatttccctataactaagttaacaaaaccaggatttacacaaaggtctatatgaccaaaaaaaaaaaaaaaaaaaaaaaaaaaaaaatcttcaattcccagttatttctccccaccccattatgttgttgtttataataatttaacccatttatgccagaggttgcaattatttgaatttttgcaatcagaccttagcgatgaccttgagcaggacagaaataactcccacatgcttagtgttccaataatggaacggtaggcaaaacaggttaatcagagtacttaagggatatctgctattcacatcatattattttatctagaaagaaagactgaatagagggcctatctatcttattcatccatttggctccttacatgagcaagtaaaattcaagtcagttttagtcaactagcatttaaagagctccttattttccctaaagagtttttaagcgtccacaccaagtactcaagagttcaactgcatatacgctttaaaatatgtatacaagtggaagcaacgtcagccccgagaactgagtagctgtactgtgtgacgtcgtgatctaggcacttcttggacagcaatgtctcacctgccaatgaaaaactcctgcgcaagaagatcaagaagcagaaactcaaactgcggcaccagaacctaaagttgcaggggcctcaaatctgaccctgtcagaaactcaaaatgsagatgtgtctgaagaaacaatgagaggtagaagggttaaaaaatgaaaacattctatgaatgtgggcttatcagaagctccaaatggagacatgtctcaagaggcagtggaagatataaaacctaaaaaatctccccagaaatccaccgtattaaccaatggagaagcagcaatgcagtctcccaattcagaatcaaaagagaaaaatggtgaatgatgctgggactgatacaaaaaaagcaaaaactgaaaacaaagaggaatctgagaagaaagtgccgagactcctaaagaaacagaaaataacgtagagaagccagataatgatgaagatgacagtgaggtgcccagcctgcccctgggactcacaggagcatttgaggatacttcatttgcttctctacataatattgtcaatgaaaactctgaagttaaaaaaaaaaatgggttttaccaacatgactgaaattcagcatgaaagtatcagaccacttctggaaggcagggatcttctagcagctgcaaaaacaggcagtggtaaaaccctggcttttctcaaacctgcagtagaactcattgttaaaattcatgcccaggaatgcatccggagtccttgttctctcacctactagagaattagccatgcaaatttttggtgttcttaaggagctaaagactcaccacgtgcatacctatgggttgataatgggtggcagtaacggatctgctgaagcacagaaacttgctaatgggatcaacatcactgtggccacaccaggccgtctgctgtatcatatgcagaatatcccagggtttatgtataaaaacctgcagtgtctggttattgatgaagctgatcgtatcttggatgttgggtatgaagaggaattaaagcaaattattaaacttttgccaacatgtagacagactatgctcttttctgccacccaaactcgaaaagttttgaaggttggcaaggatttctctgaaaaaaggagccattgtatgttagtgttgatgatgataaagctaatacaacagtggatggtcttgagcagggatatgttgtttgtccttctgaaaagagattccttctgctctttacattccttaagaagaaccgaaagaagctcgtggtcttcttttcatcttgtatgtccgtgaaataccactatgagttgctgaactacattgatttgcccgtcttggccattcatggaaagcaaaagcaaaataaatgtacgaccacattcttccagttctgcaacacagatttgggaacacattgtgtacggatgtggtggcaagaggactggacattcctcaagtcaactggattgttcactatgaccatccggatgaccctaaggaatatattcatcgtgtaggtagaacagccagaggcctaaatgggagaagacatgccttgcccattttgggcccagaataattgggttttcttctacttgaaacaatccaaggttccattaagtgaatttgacttttcctggtctaaaatttctgacattcagtctcagcttgagaaattgattgaaaagaactactttctttgtaagtcagcccaggaagcatataagtcatacatatgaggttatgattcccattctctgaaacagatctttaatgtaaataacttaaatttgcctcaagttgctctgccatttgatttcaaagtgcctgcctttgttgatctgaatgtcaatggcaatgaaggcaagcagaaaaagcgaggaggtggtggtggatttgactaccagaaaatcaagaaagttgagaagtccaaaatctttaaacacattagcaagaaatcatccgatagcaggcagctctctcattgaagacatgcctttctttcatcttgaataactgttctaaaatgaattttttccccttgatttaataagatttttgtagcctttagaatttaaacttatctaacaagagcataaattgacttgggttgcaagcactgagcactgtaacttctatcaagtctctttttatttttgggatataaaacaggctctaattttcttggttgcccaagagcagagcaagaatattaggtctttcttgtgattatataatattttaattttaaatatccctccctcatacacacaaatgtatgttactgttttaatataattaaatttttgtaccttttaaaaaaatatgtacacaagtactgtggctttcgccaacttacctctgcacaagcagttaactttatatatgtcttggtatggggttgaattgggttctctaaaaagatacgttgaggtcctaaaccccagtgcctcagaatgggaccttatttggaaatggagtctttatagaggtaatcaagttcaagggagatcattaaggtgtcctcgtataaaggggacatttgtagacagacatgcacatagggaggatgccccatgaagacaagccaaggcactaccagaagcaaagagacgtggaacaagagatgcttccctcatggtcctcaggaggaaccaaccctacctatgcctgatttcgaacttcaaggctccacaactatgagacaaaaatttctgttaacagccacctacttcgtcatagtttgttacggcaccctagcaaactaatacatgttgctttttaataaactaaatgttttgactaaaagtcacagattgtcagaagagataaaagcattctcaaatatatgttttttataagaaacacactttaaataaaaaaagacagatatggaagaacatatatcatgcaaacagtacgtacaagaaagctggagttggcttactttaatatcagataaagcagacttaagacaaagtattatcaaagatagaggtgagtaataaaaaatgtgtatgcttcaaaataaaacactgacaaaattaaagggaaagataattccacaataataattgatgattttttttttttgagatagggtcttactctgttgcctagattagagtgcagaggcacaatcacaacacacacagcctggacctcccgaactcaagcaatcctcccaccttagcttcctgaatagctgggactacaggcatgcaccacctcacccagatgatttttgtattttcttgtagagacagggtttcattatgttgcccaggctggtctcaaactcctggggctcaacgaatccacccaccttagcttcccaaagtgctgagattacaggtgtgagccaccatgcccggccaaaagttgaagttttttttttttttttttttttttaaagactgagtctcgctctgtcacccaggctggagtgcagtggcatgatcttggctcactgcaaccttcaactcctgggttcaagcgattctcctgtctcagtctcccaagtggctgggactacaggtacgtgccaccacgcctggccactttttgtatttttagtagagacggagtttcaccatgttggccaagctggtctcgaactcctaacctcaggttatccgcttgcctcagcctcccaaagtgctaggattacaggcgtgagccaccacgcccagcaatagttgaagattttaatatcacctctctgcaattatagaactgaaccacacagacacacagacacccagacacacacacacacacacacacacaaaaccatcagtaaagataaaagatctgcagcttgggaaacatggtgaaacccatctctacaaaaaatacaaaaattagccacacatagtggcatgcacctatagtgccagctacttgggaggcagaggtgagaggatttgttaaccctgggaggtggaggttacagtgagccaagatcgatccactgcactccagcctgggtaacagagtgagaccctgtctcaaaacattaaaaaaaactgtaaagggcaatcatcgtcaccacattgacatttatagtacagaatatacattcttttcaagtgcaaagtggtatgttcaccaagaaagatcatatgctgggccataagacaaatcttaataaattttaaaggaatgaatgcacagagtatgttctttcaccaaaacagaaaaaaataagtaataaaatatcaagaaagccctaaatatctggaaattaaacaatgcacttctaaataataacccatgggctggtcaaataaggaatcaacaaaggaaactggaatatatttttaactgtaattcagctaggcatagtggcacgcacctgtaatcccagctacttgggaggctggggcaggagaatcacttgaacccaggaggcagaggtcgcagtgagccgagaccgtgccattgcactccagcctgggtgacagagcgagacttcgtctcggggacaaaaaaaaaaaaaaaatgatggtctctaaatatcaatgacttaccacctcatacccatttgaatgtctaatgtaatagtaaaaaaaaaaaacaaaataacaagtcttggcaaggatgtggagaaattaaaatccttgtgcatggttggtgggaatgtaaaatggcatagccactatagaaaacagtatagaggggctcctcaaaaaataaaaaatagaaattaccatatgatccagcaattccatttctgggtagatacccaaaagaagtgaaagcaaggacacaccagtatttgtacattaatattcaaagcagcattattcacaacagccaaaaggtagaagcaacccaaatgtccacaagagatgaatgaattaatgagatgtggcataaatacacaatggaatattattcagccttaaaaaggaaggaaattcagatacatgctgcaacacaaacaaaccttgaagacattatgcgagtgaaataaaccaataattaaggaacaaataccatatgattccgattacacgatgtacttagaggacactcaaattcagagacagaaaagtagaagggtggttgcctggggatgtggggagacagagatggggagttactgtttaacgagcacagttacacttctgaaagatgaagagagttctgaaagatgggtggtggtgatggttgtataataatgtgaatgtacttaatgccactgaactgtacccttaaaaatggttatgatggcaaattttatgttacgtgtatttcaccacacacacacacacacaaatcaatggtctatgtgtctaccttagctagaaaaagagcaaagaaaacccaaaataaatagacaaaacaaagcacagacataaattaaacagagaagccataggaaaaattaaagccaaaacttggttctctgaaaaaaataagcaaaattgataaacctttagctagaccaattaagaaaaaaaagaggaaaaaagtgaaggcggggtatcagaagggaaacctgtgaaagagatagatacacagaataaccagcatagtaggagttacttcagaaaccaagggtacaaggtatttcaaggagtggtgattgacagtgtcaaatgctgctgactggtcaaataagatagaaaccaaagtctatttgatttagccacagaggaatcactgatgaccttataatagcatataagaaaaaagtagaattagaagcaagattgccatagaaaaagaaagaatatacagacatgaggaagtgaaaactgtgagtaaagataattcatcataaagtagctaggttctaaaaatagagcaagggggttagctggacaaaagtaaggggtcaggcgaggatactgattttttacagaatggacaagctagaaaatgtttttttcccttgttactctctcagattttttttttattaaagtaaaatataaacagaatgttttgatttttgttggaaaagacacagaaaagagggaaaggttaaagatacaggaaacgggtgataacagatggtataaggtccctagataggtagaaggaaatgggattcagaggatgagtgaaaggattagccttaaacaggcggaggcccaggctggggagatggggagaggaaagaaagagtacagctatagttaagtttattggtggcgtggtgagaagtagctagagttcttgtctggctttggctttactcctctttcaagttttaagaggcagactcctgagagaaaagatgatgaagtagaatttttaagaaaatgaaacatgaaaaataacacgtggaggccgagtatgctggctcatgcctttaatcccaccactttgggaggccaaggcaagcagatcacgtgagcttaagagttcaagaccagcctgggcaacatggtaagatcacgtagatgcgggcatctacaaaaaatataataatccgctgcgtgtggtggtgtgcatctgtggtcccagctacttgggaggctgagttgggaagatggcttgagcctaggaggcagagacttcagggagcagagactgtgccattgcactccagcctgggcaattgagccagattctgtctcaaataaataaataaatgtggagaaaaaagtagaaggatgtatgataagaggcactgaagacccaactgctttgaaccattttatattaaaagtagtaacaataggcaaggtgcagtggctcatgcctgtgatttcagcactgtgagaggctgagttgggcaggctgcttgagcccaggagtttgagaccagccaatgcaacatggcaaaaccccatctctagtacaaaaattagatgggagtggtggagtgcacctgtagtcccagtcactcaggaggctaaggtgggaggatctcttgaacccggtgagcccaggagatcgaggccataatgagccacgatcacaccactgcactccagcctaggcgacagagggagaccctgtctcaaaaaaaaaaaaaaaagtaataataatcattagtttatagttaatacttacatagtacccaatatgtgccaagtattgttctaagtacgctttacatattatgtaacttaattttcacataaacttttgtgatagctatcaccaggtatcttcatttaccagtgaggaaaaggcagcatagacaagttaaggaactagccacacaacaggtaacagagtcaagagttgaacccagctagcatgctaactggtgctccttacactatgctatactgcctctcaaagtgaagttaggtaaaactagtggcggaaagtagaaagaaggaaaaaacaataccaagtggacacaaagacaaagagaagcactgattcctgtaaataaaaataattctcttggaagaatgggttagttttatacagcatgtgaagtgcaccaaagacaaaagaaaccgtcctgattcagtaatggaaagccacaaaaaggaaatgagcagtgggaaggtccaaagcagaaagtaagaagagcaaagagccaaagaaaaagtaaaacccaggaaaaatgtaaaaaggagaaaaagctgtaagtagaagaaacacatacacacaacagtaaccaccaccagtaaaaaagtgaaatgagggccgggcgtgatggctcacgcctgtaatcccaacactttgggaggctgaggcaggtgatcacctgaggtcaggagttcgagatcagcctgcctgacatggtgaaaccccgtctctacttaaaaaatacaaaaacctgctgggtgtggtggtgcgcacctgtaatcccagctactcgggaggctgaggcgggagaatctcttgaacctggaaagtgcaggttgcagggagccaagatcacaccattgcgctccagcctgggggaccagagtgaaactccatcacacacacccacacatacacaaaagtgaaattaaagcaaagtaagtaaatctaagtccctgaaaaacttattctttattttcttatcaaagagcacgattatttaataaaatacactattggatatgcttatctgccaagaataggcaaggatcagatacctaacaggttaagattggaataaaagaaaataatttttaaaaggaatcatctaaagttgtttcagaagctagagggtagtagttccacaaaaactagattccagagactcacagtcttagttacacgttgccaagatgtttgtagttatgctgagtgcgtaaaaaactatcaaaaccaaatcaatagcaaatcacttcagcattaaaaaatacataccaaggccgggcacagtggctcacacgtttaatcccggcactttaggaggccgaggtgggtggatcacctgaggctgggagttcaagaccagcctgaccaacatggagaaaccctgtctctactaaaaatacaaacttagctgggcgtggtggcgcatgcctgtaatcccagctactcgggaggctgaggcaggaaaattgcttgaagctgggaggtggaggttgtggtgagccaagatggcgccattgcactccggcctgggcaacaagagcgaaactccatctcaaaaaaaccaaaaccaaaacaaaaaaacccaaaaaaacaccccccaaaaaatatcatttaatacctgtagaaggatagcaatatcctgaagtaaaagaatatcaaaattgtaaaaaggccaggtatcaaacatctgtaattttaagttttttttttaaagctatataaggaaagtattaaaagggaagaatattcaatgtggagacaaagaaggatgttattctctaattaataagcttcagccacccatttcactcttgcaagacagagttatcaacgtgaaacaacatgataatacaagtcagtgatttactccagggtaagttatgtaaaactgtgccagccaatatcaacattgtaactaataatattagtgaaaaaattaatttaacactcaatgtggccttcaagcataatacaaatctaatgtatttttttaatttttaaaggcacacatacaatcaytattttaaatcctatggcttggaatatttctagctcattgcttaaaatggggtgaagtatttctactataaagaacaaagaaaaactaatgtaacttttagcttaacaggagataaattttaaacaattattctgaagtaccaaggactatccgttacagttgtgaatgtggtagcacttaaaaagcaaaaacaccccataacgcttatatagagtgtattcaataggggttacaaaatgtcaggaaaccacaggcggaaatttgatatatgaaatatttataagagtattaaaaaatcatattggaaggagcttaattagaagcctcctaagtaatgagggaaccctctttacaacagtctttaatgcttgaccattttcagtgataaaagactaggaagagttaataaatttttcagaggatcatcgtacacagacatggaggatacagcatgttactggtttttacacagctgccaatactgctttataataagaatatacatatatttttctcttttttaaaaaaaatattgatttttccagtgctctacatattcagagaaacttctctagaaacaaactatagaaatgatccctgaaagtacagtcctaagaatatatttttagtcagtaacattttattttgaaaacttttagatacagcaaaatttaaagaattttataccaagctgcaaaggaggaagtcaaactgttgctgtttgctgatgatacaaacttatacctagaaaaccctcaagattcatttgaaaagctcctagatctgataaatgaattcagtgaagtttcaggatacaaaattaatgtacacaaatcagtagcactgctatacaccaatgatgaccaagccgagaatcaaatcaagaacgcaatcccttttacaacagctgccaaagaaaaattaaaatacttaggaatatacctaaccaaggaggtgaaagatctctacaaggaagactacaaaacactgttcaaacaaatcatcgatgacacaaacaaatggaaacacatcccatgctcatggatgggtagaatcaatatggtgacaatgaccttactgccaaatgcaatctacagatttaatgcaattcacatcaaaataccatcatcattctatagaactagaaaacacaattctaaaattcatatggaaccaaaaaagagcccacatagtcaaagcaagactaagcaaaaataacaaatctggaggaaccacattacctgacttcaaactacactacaaggctatagtcaccaaaacagcatggtactggtataaaaacaggcatgtagaccgatggaacagaatagagaaccccaaaataaagccaaatacttacagccaactggtctttgacaaagcaaacaaaaacataaagtggagaaaggacaccctattcaacaaacagtgctgggataattggcaagccacatgtagaagaatgaaactggatctttatctttcatcttacacaaaaatcaacacaaggtggatcaaagacttaaatcttaaggcctgaaaccataaaaattctggaagataacatcagaaaaactcttctagacattagcttaggcaaagaattcatgaccaaaaaaccaaaagcgaatgcaacaaaaataaatgggacctaattaaactaaaaagcttctacatagcaaaagaaataatcagcagagtaaagagacaacccaaagtggtagaaaatttttgcaaagtatgcatccaacaaaggactaatatccagaatctacaaggaatacaaacaaaccagcaaaaacaaacgaacaaacaaaaaccaccaatcctgtcaaaaaatgggttaaaaaaaacatagacaattctcaaatgatataaaaacagccaacaaacacatgaaaaaatgtttaacatccctaattatcagggaaatgcaaattaaaaccacaattagatactaccttactcctgtaagaatggctataatttaaaaattaaaaataataaatattggcatgactgtggtgaaaagggaacacttttacactgctggtggaaatgtaaactagtacaaccactatgaaaaacagtatggagattcctttaagaactaaaagtaggctgggcacgatggctcacacttgtaatcccagcactttgggaagctgaggtgggcggatcacctgaggtcgggagttcgagaccagcctgaccaacatggagaaaacccacctctcctaagaatacaaaattagctgggcgtggtggtgcatgcctgtaatcccagctacttgggaggctgaggcaggagaatggcttgaacccaggaggcagaggttgcagtgagccgagattgcgccactgcactccaacctgggcaacaagagctaaactccactcaaaaaaaaaaaagaactaaaagtagaactaccatttgatccagcaatcccactactgggtatctacccaaaagaaaagaagtcattatgtgaaaaagacacatgtacacacacttacagcagcacrattcacaattgcaaaaatatagaaccaacctaaacgcccatcaaacaacgagcagataaagaaaacgtggtatatttacaccatgaaaactgaatgaaatactggcttttgcagcaacttggatggagttgtaagccattattctaagtgaagtaactcaggaatggaaaaccaaatatcgtatgttctcacttataagtgggagctaagctacaaggacgcaaaagcatatgaaggatataacggactttggggacttggagggaagggtgcaagtggggtgagggataaaagactacacattgggtacagcgtacactgctcaggtgacgggtgcaccaaaatgtcagaaatcaccactaaagaacttatccatatagccaaaaaccacctgcacccccaaaactatcaacattcaaaaaaaaaaaaaatcaaagaacaagcaaaaaaaaaaaaaattatagttgaatacctgaatagccatacctaaagcccaccattaacattctactgtagcccgggtgtggtggctaacgcttgtaatcccagcactttgggaggccaaggtgggcagatcacaaggtaaggagaccaagaccatcctggctaacacggtgaaaccccgtctctactaaaaatacaaaaaaattagccaggcatggtggcaggcacctgtagtcccagctgcttgggaggctgaggcaggagaatggcgtgaacccaggggatgaagcttgcagtgagctgagatcgtgccactgcactccagcctgggcaacacagcaagactctgtctcaaaaaaaaaaaaaaagtctactgttattgttttatcacatacctatccatccatcaatccatcttgatttttactctacttttaaaatgccttttaaagtagtatctaaatgcagtttctgaagcaaggggtcagaaactcccgcacctatgagaaaggaaaatgatatacaatcatgcgtggcatgtgtccctcaatgatagaccacaaataccacaaccgtcccatattataataccatattatttttgagacaagagtctcattctgtcgctcaggctggagggcagtggtgcaatctgggctcactgctggaggaatcacattacctgacttcaaactatactacaaggctatagttaccaaaacagcatggtactggtgtaaccttccaggttcaagcaattctcctgtctcagcctcccaagtagctgtgactacaggtgcatgccaccacacttggctaatttttgtatttttagtagagacagggtttcactatattggtcaggctggtctcgagctcctgaccttmggtgagccacccgcctccgcctcccaaagtactgggattacaggcatgagccaccgtgcgcaaccctgtaataccatatttttactgcaccttttctaggtttagatatgcttagatatacatatactttccactgcattacaaaagcctacagcattcagtacagtaacatgctgtacagatacgtggcctaggagcaacaggctataccatataacctagatgtagagtaggccataccatcaagttttgtctaagtacactttatgatgttcatacaatgacacaatcgcctaacgacgcatttctcagaacatatccccgttgcaatctctgaggttgttacagcatcagtcatgtagttccgtattcatggtgactgaaaatttattcaatttttatgacttgttacatttagttgtgaggtggagcaaagcagctaagtgctaactctaaacagccttgaatttgaaacctgggtcggccacttattgtgatactctaggcaagtcatttaatgcttttagataccagtttccttactgcaaaataagatactagtagcaatgtcaaagtgttaatgtgagatttaaataagataatgtataaaatgtttagcacagctggcatacagaaagggcataacaaatgttagcattattatcaacactgtattagttcattcagcctacacaacaggttctagctgctacatggctacacatacccatgcaactgtttatagtattcttcttcatcaccttatatgttctaagaaccttgggtagtgtatgtattttactgagattaaagacagaatgagggtgaatgggtccaagtgcaagcattctccatcttcccactccactccctaatggaactagatgttcactctgttattgaaagcagtgattgtggagtcctagtaagggaaaaggagtcaggcgggtgggaaaagggtacagcaaaaagaaaaagcagataaggtataagtctgcctttcttcatggtccaagacacacagccctcttgcacaaataactcacaagctttctgcactcaacttatcaccagactctcagctgacagaaaaatgcaagttagctcactgcaaccttggccttatcagtactgcacatagccctctctgcagcacacagcagaagcatcatcctgtaacatgcccagcaagccattgtctcctggcagtcagcttctctcttgctgatctgcccgttgcacccttgcaaccaacctactttcatactttctctaataaatctgcccttctttacctacaattgccttggtaattcctttaccacctgcaacgccagcctcagctagtgtgacctatgacagtgaggatgaacacaggaaaacacactacaggcacagttttgcttttcagcacttggttgacaggaggctgataaactgcctaattgtgctctgcttactttagatgaacactgctccctcttaaaacttcatttgagatcacataattatgaatttatatcaaatttggtccaacccaaacaaaatgtgttatctccactgatcacayatccaaatgcctttttatctgtacatagcatatttatgccagttttgttgtagatggagtcacctgggcgcagtggctcacgtctgtaattccagcactttaggaggccaggattacacttcaggaggccgaggcaggtgaatcacttgaggtcaggagctcgagaccagcctggacaacatggtgaaaccccatctctactaatacaaaaattagctgggcgtggtggtacatgcctgtaatcccagctactagggaggctgaggcaggagaatcgcttgaacccagggggcagaggtggattgcagtgagctgagatcgagccactgcattccagcctgggcaacagagggcgactgcatctcaaaaaaaaaaaaaaaaagttaaaaaagtagatggagtcataaaacctctaccaactacctgcctctttaaagacatgatttaagtaaaagctacagttctatttttatggaatttttatttaaaaatatggtatctaggcctacggctacaggcttacatgtgtaatcttagcactttgggaggccaaggcagcaggatcacttgagctcaggagtttgagagatcagcctggacaacataatgagaatctatcactattttaaatcactatttaagaaaaagagctgggcgcagtggtgtgtgcctgtagtcccagctactcaagaggctgaggcaggaagatcccttgagcccagaagttctggactgtagtatcctatgccgattgggtgtctgcactaaattaggcatcaacatggtgacctccagggagtgagggaccaccaggttgcctaatgagagaagtggcccaggtcagaaacagagcaggtcaaaactcccgtgcttatcagtagtaggatcacatctgtgaatagccactgcactccagcctgagcaacacagtaaatcccccgtctttaaaaaaaaaaaaaagtaagcatggaatccacttctctgctaacttctaaaaactagtcttagttctctttgccagaggaagcagaatctaattttaaaatttaaaagtacttctatgtggcttcacataacataatttgtctattgctaattcttctgagcttgatgtgagaatgtagtagatactaaaaggagtatggtaaaggtaaacaatacttcatctttaaaaactaattttaatgaggtttatccaaatatagtttttttttgttttgttttgcttttgagatggagtcccgctttgtcacccaggctgcagtgcaatggcgcaatcttggctcactgcaacctccccggttcaagcaattctcctgcctcagcttcccaagtagctgagactacaggcatgtgccaccatgcccggctaatccaagtatagttttaaaacattattttgacttctacactatgtacatactttacatattcaaaaataaaatcctaagtaaaaactgaaacctatgaaccatatcaaattggtagcataaccagagaaaagtatttcaagtgacttttgaacacagtactcattatacattcttcatgcaatatagtctaaatacgaaaataaatgcaaagaaatcttaaactacatgaagcttattggtattagcaataccagcactataattttaaaatgattttatgtatacagtgggagaaagcaaataagtttattattttttttggagacagggtctcactctgtcatccaggctgaagtgcagtggggtatgaacatggctcactgcagcctcaacctcctgggctcaagtgatccacctgcttcagcctcctgagcagctgggaacacaggcacacaccaccacgcctgkctaatttttttattttttatagagatggggtctcatcatgttgcccaggctggccttgaactcctgggctcaagcaatccttccacctcggcctttcaacgtcctgggattacaggcatgagccactgtgcttggccagtttattaactgtattaaaaaccaagattttcatttaagacaagagacaaatatagagtcaaggaagaaaaagtctgcttgttaaataggaattggaatatcactctgaactcatgattaaacaagcaaaaacctttttcttagttctctcctctcaaagcacctagaagcaatgatactgcagcagcaacgaatatgccaaacatccagaacttggtttctatatacgatttctcattaaaaagaaccaagactccctggataaacagctctttccagaggtgagcaaagaaagtataagataaaccctggagtaactcgtgtcagaaagcactccaagattaatggggagcaggggtgtcaagacacacaatagtcagcttgaaatggttcctactgaccaaatctgggacaatttggtcattaaaaagaaagacgactgtaactggttataaaacaaggaataaattaaaacccatgagagtctgaagtggtatcattcacccctgccccaaaaaacatcattgggggtggctatttctccagctctttactatgaatattgaaaagtaaagagattaaatttaacatttaatttgcattttggggaagaacaatagtttacctgcacttaatgaaggaaatctcttccttacagagaacctccaataactgatttaagcaaaagtcatcatgggtgctaaaaaccactaagcaaaagattgtcagaaactgggtatttgcttagtgtccaagttttaccccaagattacatattaatcacaaactggcaaaccacacctttacaacagatcagtagtcagcactttaatcaaatggttacatttagcatcattaatagtgtgggaatctgacattgtgtgcctcctatattatgcaacaggaggtacacagcatcacctattaaatattcttgccaaaggaagttttactttaagctaattaagccttcctttacacctaacttccagttaataggaaattcagggagaaagaggaataaacgaaatgacattaggagggcacaaatccagaatgtgggtatattttacaagacaactggtttggtcaattacgtgtcagaaaaaaagaagggagggaatattcatcctatttaatttcccctgcaaaaagaagaggggatggatactcttcattttacaaaatgactaaagacttaatcaccaaatgcaatcaatgcatgaatcttgactgactacaactgggggcagaaccctcaaagacactttggaacaactgaggaattttgaagatggagttgttaattttgataggcattaataatgatactggggttagtaggagaatgtccctatttttaggaaacacatgccgaaatatttgaggattacagtgtttgcagcttactttcaaataattacacacatacagagaaagacaggaaacaatatggcaaaaatgctwatcactgagttggttattcattgcattgattagcatttttattcattgcatgaataaccgatcacaattgtatagaacgaacctctatacgactaaaatttttcataacaaagttaataaaattgtacttctattgagaagtacggtagaaagtacacgaaagtacatctatactggaattatatttgggttgaaatctaaactatcttactagttgtgtgccctaaggcaagttgtaaytcttcgtatcactaagtttgtcacttctataaaattcaagtaataatatctgcatcattaggttgttctgagaattaaataattacaaatgcaaaaatgccaagcagtactgcacaaaatgaataatctggttttcataattaatcagtacattactaataatcctaaaatacaaaactaaaggactacgttcattatattcacattctatgataaggggaaactacattaggtaaaattattattaatccactgacagtccaagtgaagtaatgggggaaatgaagatttatacagtattttttaaacccaagaattccaactgaacacctagagaaaaggaaatcaaaatcgtgcagcttgcttccggtatcagccgatctccaaataaagcattaagaaaataagtggaagttatggagaatttcttcctgacttcaagagattatctacttacacgctgaaaaagaaattaagtttttgtcttcatttttgtaagttccaaaaaaaagcacacaattacggggttttattgtaaattctgcttggattcatagaactcacatggacgcaatttccttttaatcagttctaacgtacctgtcatttctcgaggtaacccctttttctgattaggccagcaataaaacgactagatgcagagtgatcctcaggaaggaaaggaaaagaggtgtgtgtgtgtgtgtatgtgtgtgtgtgtttgtgtgtgtgwatatatatatatatwtttttttaaagaagtgccatctttttctttctgtaccagagaaaaagcagaaggggaaaggaggaaaaaaaacaggtctgagcctcccgggttcgaccaggtgagaggtggcaacacctccggccgctccgggttagggtgttgggcaaatgggcgtgcaaaggacgggcagctccctggaaggtcggggtaactgctccgggaccgcggggcccaaggccggtctcctcccagaaggattaaatgccaccgaggggatcccgtggggtgtctcccggcgcggactaggctgacagacccggctctccgctcccttcggcgccaggtgggggccacgcggtgtcagccacgggcagcgtgcaggggccgtcccccgcgcgaccggagcccgccctcccctccccgttacctgcgggcggcggcgccgggcccggaggcctgctgctcctcctccttctcccgccaggctggggcggcgaggcggcggcggcggcggcccggggggagggggcggagcgcggctcgctgcctctctcctcccccgggaggctcaggggcccctatctcgggccgccgcgcctaggcccgtgagcagcctgtggctggggcatggcggcacagcccaccggcgtgcccgcgagtgggagtgcgaggaggcggggagggaagcacccccagcgctcggaggggccagaggggaggagcgagggggcccgggagccgcgcgctggcgaccgttggggacggttggccgagggcaggcggttgtttggggagcgcggcgacggctcgcgtgttcccagcggggcggggtggggaaggggaaggggactgaggggaggggagggggaggttgggagggagccgccgccgcgcgcgtgcggccggcgccgccgccgttgccgctccgctcactccagcctgtttgggggcactttgtttgtgtcccacaatgctctgcgccggcggcctggctggggaaggggaggagaagggggcggggcggagcgcgctcgggggcggggctcggggcggggaaggaaacgtgatgattgcgcaagcgcagaaaatgggccctcttggccgtcgggacttgtactgttggtgactccgtctccttagacggtggagcctgcgtgacccagaaaggccgtgagtcttgacactgtatttttgcatatgtgcgcacatgtgccgatttacattcacatgccccataagccctgtcccatttgtccttcctctaagccgtcctcttacccagttcccctctcacacctgagaagcatttctccgcaggagtcacatttatagcattatttttttcttcgaactaaaaacataactcctattttctcgggtagtttttgtagggaggtcgaaatagaaacacttcagcccctcttcggcgagggaggttagttggtaaggtgcccattgttcacccatggaaacaggcctgccaagggccgccccgcagacaggtgagcccgcgcccccgtcctgggcggactgcgacctgcggcgggtgtctggattgcgtggctcctcgggcctcctcgcagtgcttgctctcttccgttctagcacttgcctcggtgacctggcaggacgtgcggttcttgagatgagtggagaaacggactcccaggtccctctcgttcttccaacacagggacagctagagctgctccaaaaatataccctacttcttccacaaccgtgaatctgtcatttttactgcaccatcacttacttcctggccttcccggaggaagtgtgcgggcctccccgaagtaaccggtaccgcccggggggttttgaagttcttggtcaactgcaaaatcaatcaacctagttaactcctagggccctaagtcttggcttcccctggccaggcgggcgagcgctctccacaccgcccccggaggtcataggggttcccgggactgcaggcggcagcgccccaggtgcctgggggcgggcggggtgcgggcaggtgctccttgggcgctttctgttttcccacgcctccagtttgcaaaccgaaagacttctttccagagggttttgtgcaaggtgggtggacgtcccgctgaagtagagtggattttccttttgaaacacttggcaacatctcacattaattcactctgagagacaagcagccaagcacctgaacaccctgacacttgcaatcttctttaggaataaaggcaataaaaacaacttctgtttttatagtccttcgcagtttccaacaagttttcaagcatgtataatgttatctaatccttacggcaactgtaattcacaggttttatcacaggtttctattattattcccactatcattcttattattcccatttcagagatgagaaaaatcagaaagatgcgaactaggcccagaaacttttgcactaagttttgaagaggggaagggaaagaaggcggaatgcttacctgggagaggactggcggccacagagcagggctcaggaaagggcatgagctggggccctggtgaggaatgtgtgagaatgtatgtaggtggtaagcaactggacaagaatcagggtggaaatgaagtagtcaaatcctatctacctctcctagtgcctttaacaggatagtcaataaaagaccatgaggcaagtcttttctaagtgcttctccaggggctgtggtggcagctcctcaactactacactgacacaaaaatttgctttcctttgtagtacaacttgaagtcaggtagaggaatgcctctagctttgttatttttgctcagaattgccctagcttttcagggtcttttgtggttccatacaaattttaggatttttttttctagttctgtgatgagtgtcattgatattttggtagggattgtactgtacctgtaggtggctttgggtagtgtggatattttaacaatattaattctttcaattcatgagcgtgagatatctttccttttttttttttttttttttttgttctcttcattttctttcatcaatgtgtacacttttccgggtagagatttttcacttccttgcttacatttattgctaggtattttattttgcttttttgtagctattgtgaatgagattgttttcttgatttctttttcagattgatggctgttagcatatagaaaatcaactgtgctgggtgtggtggctcacgcctgtaatcccaacactttgggagtccaaggcaggcagatcacgaggtcaggagttcaagaccagcctggccaacatagtgaaaccccatctctactaaaaatacaaaaaagttagctgggaatggtggcacgcgcccgtagtcccagctacttgggaggctgaggtggggaatcacttgaacccagggggtggaggttacagtgagtcgagatcgtgccactccagcctggcgacagagcaagactccatctccaaaaaaaaagaaaagaaaagaaaatcaattgatttttgtatccttcaacttaactgaattcgttcatcaaagttctgagagatggagtctttaggtttttctaaatataagaacaagtcatctgcaaacaaggataatttgacttcttcctttccaattcagttgccctttatttctttctcttgcctaattgctcaggtgaggacttccagaaatatattgaataggagtggtgaaagtgggtatccttgtcttgttccagatcttagtggaaaggctttcaatgttttcctgttcagtgtgatattagctgcgggtttgtcatatatggcttttatcatttaaaaacttttcttcccttagattattcccttgtctcctctgccttttccacttaaaaaatttttttttggagacaggctctcattgtgttgtccaagagtgcagtggtgcaatcacagctaaatacagtctcaaactcctgggcacaagcgtcctctggcctcagctttccaaatagctaggactacaagtgcgccactgtgcctggctaattttaaaaattttttgtagagatgggtcttgctatgtgaacttgggctcaagtgatcctcctgaagtgctgggattacaggcataagctaccatacctgagccctttcctgcttttctttctcatttaacatttaaatattttatcatccttccactccacccccacctcaggtctgaagaatttattaacgaacaaatgaccgtgaggcccttcagagctcaatgctagatgcttggagagggtgtgagaaaatctcaaagaagattaactttgcaggagccctcttgtctgctttggctctgggcagggtcagtttctgtggcttctgcagcctcccacctttttccttcttgagctggtagagacttgcctctgggttgctggaatatacacacctttctttgacactaggttaaataatactgctgggaggattttgtgaaatcagaatcctgtacacaggtgaaaaaaacaaatgtagacagtatgaggaacctttaattattaacttggtgtggatgattctgaggaattcaaattccaggcaaattccaggagttatatttcagccacgagctctttgggggaataaattctgcaaaagatggcacttccttgtggaagaccattataactgaatggaaacttagttatttagtccaaaagcattagcattaaggcatgaatcctttctacccgaccttgcctccttattagattagattatacaactacatatataaaaaattaatctcactctcttaccctaaaatttatacctcttctagtgttcacattttaccattcacccagtgaagcagggtgactttgctactttactactgtatctcaattccaatccatcaacaagtcctgttgaatgtgtccctctccactgccaccgtcctaaaataagatgatactagcttgtgcctggagaattataataccactcacgtggtttcccaaatgcactctcccttttcctcattctctacatggtcgccagagttgcaatgcatagcagtgatgtcagccaacaatggcttcctattgctccccggataaagtcccaaaccctcagcatggctttcacaccgctgtgcaatctgggccctttcactgtcttgagcttcatctcttagctatgcttttttgggaaatgtgccagttgcagaggcagttttgttttttcttttctttttttttttttgagacggagtctgactctgtcgccaggctggagtgcagtggcgtgatcttggctcactgcaacctctgcctcccgggttcaagcgattctcctgcctcagcctcccgagtacctgggactacgggcgcccgccaccacgcccagctaatttttttgtatttttagtagagacggggtttcaccatgttagccagggtggtcttgatctcctgacctcgtgatccgcccgcctcagcctcctaaagtgctgggattacaggcgtgagccaccgcgcctggcttcttattccccctcccccccccctttttttttgagacggagtctcgctctgtcacccaggctggagtgcggtgggcgatctcagctcactgaaagctctgcctcccgggttcacgccattctcctgcctcagcctcccgagtagctgggactacaggcacccgccaacacacccagctaatttttttggatttttagtagagacggggtttcactgtgttagtcaggatggtcctcgaactcctgacctcgtgatccacccgcctcagcctcccaaagtcctgggattacaggtgtgagccaccacacctggctgaaatgtatttcttaagtaagacctgaaagtagaaatagctctgtgatccatggacagcggaatagacgttgtgttagcaggcatggaaacaacattaatcttgtacatcttcatcagagctcttgggtgaccagttgcactgttggagagcagtaatacttcaaaaggaatcttttttgagcagtaggtctcaatagtgcacttaaaatattcagtaaactatgctgtaaacagatgtgctttcttcttcaggctgtgatgtttcatttatagagcacaggcagaattgattgagcataattgttaagggctctcggattttcagaatggtaaatgaacattggtttccacttaaagtcaccagctgctttagcccctaacaaacaagtcagcctgtcttttgaaaccagccactgccttcttctctctagctattaaagtcctaaatgtatctctctccaatctaaggctgttttgtcacaagaagcatagctttcagcttatctcagcttttgatctgtctttctcactaagcttaatcaattctagatttgatttaaagtgagagacatgtgacttttcctttcacttgatcacttggaggccattctagggttattaattggcctaattccaatattgttgtgtctcagggaatagagaggtctgaggagaggcagagagactagaaacaactggtcagtggatcagtaggagcacacatgtttattaagtttaccatcttacatgggtgcagtttgtggtgcccctaaacaattataatagtgatcaaagttcactgatcacagatcaccgtaacagttataataattaatgaaaaagtttgaaatatcgtgagaattgtcaaaatgtgatagagacataaagtaagcgcatgctgttggg

SEQ ID NO: 98169 - DNA, 61612 bp, Homo sapiens
ggggctgtcccatctccccggagcgtgccctggattctcagacaggggtgagcctgaggaaagcagaggcctgtaggagccagacagcccacggccccagccaggatggagagagggaggagtgcctagggcagggtctgggaaacagccatggccccatccaggatggagggagggaggagttcctggggcagggtctaggaaacagccctcccaggacctgggcctcacgggtaagaatcttttacagcagcccaaggtcatacctagcccctctccccagactcagaggaagtgggtgctggtgggaaagggggaggagttgaggggccatgacagtggctgctccggtggtctcagcagccagaggcccaagtgagtaacgtgctgtgtgggagtaggaggctgaggtcctgggctgtccaccaagtgcctggcagcttcttgtcctttccctctggaggtgcctccctagcacatctcccctccgaggagggcttgggtgtccttcagaggcaactgggcctgatgggccctgtcacgggttcctcactgccccccagcccagaacagcgccaagcttgccttccccactcaccaccagaaccccgttggtgatgacttcagatgcaggcacctggctgcaaaggatgaggaatacatggagaatacatctggccccatcatgatggcctctacaatcataatgtgactgaagcagcgggcagagcatgaggaacacagcagggtttggagtggggcgagcctgccgcccaacatgcagatgggtgtcaagaccaggccattgcctccaggccaggcctccaaggccagtgcaggacatggtgactggcacctaggagctgccctgactcaaatctctgagtctctgagggcgttggctctaccagaactcacctcttctccagaacaaattccacctgcagctcttgtgaatcctacatggagggggagggagcaccaattttttcaaggctccaaaagcctccagagctgttcctgcctgccagccctgcttggctccaggggctagaaggggagactggcattgtggcttgtcatggacataggaggggcagtggtatctccatggagaacctcatttattccaaaatatgtgtcaggtgctgttctagacattgataattcagctgtgactgagggaacacacagccctcaaggagctcatattttggtttcatgcaaggaagatgtattagagggagacctttatagggtcagggctgcggggtggaggaaggtctgccttggaggcttggcctgtgccgaccagagccccctctttggtggccctgtgctgggcctcccctcctccagctgggctctccgccagcactggtgggctcacctggtggttgagtgggaaggtgtgtttgtgaggttggccacacttgaggcttctcaggtcaaacaggagcagagagagctggtcgctgcccaggatgtccttgtcatagagggtgagctccaggacgttctggggacaaggcaggcaggaggtccgagcatgaggtaggacaggagggtagctgcctgaggagttcccctcccgcagcctggcccctggctggccctcaccttcacagcaccatggatctggtagtggaaggtctcattccactcggggtcactgcagttggccactatcctagtctgggcagggcttggggacgccgtgggcagccacagttgcacatagcagtcggctttggacactgcaggtaggacagggaggggccggggcctcaagctctcattgctgaaaaggtttccttggggaggctagggcagaaggggaaggagcagagtggggaggggaagccgcccacgtggcatggtggggtgaggaggtggagggagagccttgatgtctttcactccatcttgattccacacacctcccattcacctgaacagaaatcctgcggcagccagttggaaagatcccatggcagcacagaccattaattccagctactgcctgattcaggcagtaaaatcccctccctgtgtgggcactggcatggaaagctccctgagagcgcgtgctgacttgtagccacagcgggcctcacactgtcacccagggcggcactcccaggcacagggaggaggccgagtctgcacagctgtcccctccagccctgcctgccctcacctccatggtcagcaccagtccctccacctactcttgcactcacacacacactcttgcactcatgcacgcacacatgtgtagtactctcacactggcacacacacacgtatatacacacactcgtactcagtcacacacactggcactcactgtcatgtatacagacacacatacacaacacgcacacacgtatacacacatacacactcacgttcacacacactcgcactcacatatatacacttccactcacacttgcactcacacactcctacatgtgtatacacactcgcagtcacatttgcactcacacactcgctcacacttgcacgcatgtatatacacactcgtgttcccacacactcgcactcacatgtttacaccacatatacacgcactcacacacacgtatacacatgtactcacacttgcactcacacatacttgcacagatgcctacacgtatactcacacatgtatacacacatgcactctcacttgtactcacccatgtatactcttacacacacacactctctgttagccagcctgagctgagctctgaggaagccgcagggaaaggacagagagaaggatggagatggggtcactcacgcaggtctgtgccccggatgtttgtggccctcagcaccttcacctggaggtcatagtatgggtaggtttcccgctgcaataacagaactccagggactcagtcagctagtgtgagcctggtccctcgccccattgttcccctcgtcccatcatggagcagcaacctggcatagggtcactgacgtctctgtgccggggagcagggagaccttggcgggtcccaggcattgggagttcagcaccttcgtgatgtgtctggaccctggaacccatccggtctgggttcaaatctaaatccagcacggactcactgaactaacgatggctgtcacgcaccacacacctgcagctcccctcagacgctcgcgcccccactctagcttgggagcagctgtgagagctgtgctaatgttgtgcttgagaagattaaatattaaaagagaaaactgtgacaccccctcccttgcttgctccctgacagaggctcaaagaccgtctaggaggcagcgagcaggtgagcggaagccgagagtcaccggccggccggtaccggtctgacgagtcaccgagcagattgcagctgggcttaggagagataacatcagcatgctgcctactgggagggaaactctcccctcacaaccccaccagctccgtggactctacagccaggctcgcgcatccttggtgaaagccaacccaccccagacaagtgtcaagtgaactaaccctccatttcctaatcggagggagctatttttaagagccaaggtctaatttaagctctgccaggtcatctagaataaacaggtcccaccccaactcaaaacccagggctggggctggtctcagtcttcacagggcactgcagctcccaggactcccccagtccgggtttcccaggtaatctcaggtacgttacccgccagtgcctccacagagggcccctcttctctctcttctgaagcagcactgcccccaggaggggcagcatcttgtctgccagccaccttggccagagtgcccaaagcatggctgggcagcccgggccccagcagggaaccctgcctgcgctcctctggttgcacaaactgctggctcaggtgtgacaggcagcactgagttgggagggtggagctgcctgctctgcagagaactcaggctggatggcctgctggaggtggagtttgacatgctccaggaagtgactggagcttaatttccccaggcaggaggcagctcagtccctctccaagagactcttggggtctctggttagcactcttgttcccaaacccagcgccctggttatcactgggctgtttgtgaaaaatagacaccggagctatttccaacaagacctctaggtgaagctggcacagctggcccagagaccagctggcaagtgcaaatcagggaagagtctcctccagctgtggaaaaggcctgaaactagccacccttcaagtcccaccttccctgcggctcttaagctgaagcctagaaatctctgcttcagtgtttcatctgggatcaaagatgtttctctctttatatatattttctaattatactttaagttctacggtacatgtgcacaacgtgcaggtttgttacatgtgtatacatgtgccatattggtgtgctgcacccattaactcgtcatttacattaggtatttctcctaatgctatccctcccccatgccccctgccccccgacatgccccggtgtgtgatgttccccgccctgtgtctaagtgttctcattgttcaattcccacctatgagtgagaacatgtggtgtttggttttctgtccttgcgatagtttgctcagaatgatggtttccagcttcatccatgtccctacaaaggacatgaactcatcaaagatgtttttaatctctcctgaccaccctcattaattcgccaaacaccaagagcctggtgggtgccagacctgtgctaggcccagaaacgcaaaggtgacagaggtgaggcgggcccatccacatcctggagaaattcagtctcatgactccctgtggctttggcccaggctcgcttcctgggtcagtgtacagtgtccaggtacagacaggcatatgggcagggggttataaataaggacaggccaaacaacaagtctacgtatccttcagcgaccagatatacaggctttagcattctctttggccatcgtaggccttaggctgcagatggatgtgatgttcgctcttctgtggaccacaaccatcaaggtggctgagacaggcacagtctccaggaagagtgaggatctcgggggccgtgaactgtgggagggagagaatttctgtccctcaactaagattcagtcatctccactcttcccaaggcctagagtcacaggctgaaaaatacaacatccaaaaaagatgtgattcaactccaaaatgaaccgaatgggcaagttcagaccagaaactccccccaaaaaaggaatgtgtgactgccagtgaccaggccccaaagaagggcctgtttctgctttatttggattgtgaagccaagacttggcctgggctctaagaaatgagagtctggcagttggtgatagctgtgaatgtatgcaggggacctgcggatccatacaagaggagagggcacagagctagctgggggcagaaccaggctggggctctagctcctgactgatgtgtctttctggctgtaccatcctcttctggaagtcatcggccccactgcacaataaagtcattgcccctagtgccagatgggacagagacaacaaggactacattttctctttggagttggccaaagtgaaccaacacttctccacttcccaaacacctctgcgtccctccatcccaattccttcatcatgggctgcaggaagaggcaccaggtgctactacatgatgggggaaaacacttggatctcccagacgccagtgtgtcccgcagaattctgtaatgatggatgtgttccgtatctgtgctgctgactcatcagccatgaccacactggctgtaccacgtggcatttgtaatgcaagtattatattcattttttcttggtcactaattggcttattcttctaagttctttgctaaactactatcttttcattgttattttcatcaaactccacgggagggagaaataagagacccagataggcttggtttcttgctttattaggtttattataaggagcagtgatgagatctttatcagtcctcactacaaagctttcatctccagccttctccatagctctgtggagggcagagagttgagggaaggaagaatggagcttgggagcatgggatcatgtatgtataccaggaaagaaaacacacattctttattctattgcttcaaasacagtttgtgagaatggaagataacaagcacagctggccaggaaggcagggcacacatggcaggtcaagttcctgctatccagggaggtggcccaragcttccctgctgctcctggaggaagcagagtccaagctggcccaratgaggccccgggcagcactgcttctgtgtgggtatggccagtcgggacgtggcgccacacactgctcctccgaactctggtgaagggctgcccagcctcacaggcctgagcagagtctcccacatctgcgaatggggccaatggcactcactgtctcttcaggcccccacggacggcatgcctggggaagcctagtctacttaccatcagcacgttgatctgtcacacagcatggagccatagtttacaaaggaccacggcakgtcaaggacaggccactaaaactgttggtgctgggcaccatcacccaccctcaccaccatcaaagacactggtgcagtgagacttcgagtctgcaaaaaccccggggaggacaggaggcagggccactctccctgtgtgtcatcagcctgcagtgcctgaaactccagcctgtgcacctctggcaggatgccccacactgctccacaggtttggcggtgagttatttttaaaccagcgtcctgctgttcttgccccccgcgtcccctctgctgtgcctaaacacctctcaggaacacttggcagcacgccattgtcagttccaggtccactcatcccctgcgtgttgccgggacccaccttcctgcgctatcccagcacaactctccaaccacaccattgctgaacaaagctggggagtgacggccagggcaggctgtaaggcaagtgaatggaaactggctggaaaaagagaaagggcccagagcacaaaatcgccacgcacaaagactaagccagcctgcctgagtgtctggtgagcgaagacggagcaggcacctctgtgggaacatgtatctagggatcacgcataccccagacagggcaggcccatcctcaggagctgcagtcacactcagcccggcctgaggcaagggatgcagggccttgcctaggcagagaatgatgctctccgaggcatctaggcatggagtgtatggccaaagagggtctatttacaacatacctgacaatcaactagcactgtattcctagaactgagaccccttgcttctcatcttaccttgcttaaatattagttattcccagagtcagggaagtgggagagaaagcctgggtagggcagtgagggaagtgataaatggtgagaaagaaaaggagactgaaaactaacagggcggctaccgaggggtgcagggcacagttaccatggagacgtaaaacactacacagaatgcgagccatcgggtccatgcggccagaagcttgagtgctgttctctcatggaactctccagtgagccatgctgagcggtccttgtgaagtcatgtacttaatagaaaagcccttgatgaacaaccccatggttacaaacacttgtgacaagtttccttgttcaggtgactggtgtgcaaaggcaagatggtgcacatcctcctgaccaagcaggtactgaattctctggaattgcccacaacataatggtataaggtataactaatctcttttcccattaaaaagctggcaatgccagaccatgagtctaattaattcagagttgttccagggcacaagatagccagtaatgtccaaatggggagccttgtggtggtggcagccaggattcctaaggccaggtgctccttcacctctctgggagagccaagctgtccatcygctggatccccaggatgctgggctcaagtgtcagctgggtttacctctttggaacagaagtaatggacgaccactccattggggtatcttgcaaatgcactgcagggaagaaaatggcttgggagtgaggactgcttctaagtgaccacttctctggcagcggcacctcctacagaagaggcacattgctggggggccattccaaaagcagcccacccaaacctcaaagaacagcctgcctgaggggctctggatttctgtagccatcatctctgtcaaataaccaaacagaggatgaggtgcacacagttaagagtgcatggggtatttttttattatgcaaaacacamggcatattaaagatgggcagtgcaccagcccaaagctcagccctggcttcctgagagccaacaatgttcatcagaacaggtttcaggctaattctgaaaaggacggcgagtttgtctttctaaagaaaaatatttttccagctacataagagacaaatcactctcctttgaagaaaaggggactaactagagtatatgtcttaacacagtatgagtctggctcaggatcctacttgagtcacaatgcagtagcttgaaagatctttttcttccttcactggatcttccttataagaactttctgcagacctacatctcttgggcacccactatatcaggttctagcttcaagaggggaagagttttatggacaagaatccaacagctccataccatacattgcaggtctttaaattctcgaagcccactcccaacagatagaacaggctgctctctgaaggctcaagaactaaaagttgtcaggacagccagcagccatgttctccttctctgttaaagggcagaaatccatcctgagcgttctccacccctgggaacctccacaaagcccagatgccacacaggtgtgaaggaggctcacctgttcccaatcttcttcttacacaccatgcacaccttctcctctgtgatgatgcacttcacctgctggtgtaaaatccgctcytcctggacctggaagaacagggggattgaggaagaagttctacagtgtggcacccagaaacaggaggcagaggccagcaactgtgtcctctttcagtcgtcacagattcttctgcttagaacattggcaattcaatgtcaagctggctactggatcagcttgagctgcactgtacaggctctgccttggtcagaagggaacatgtggacattgtctcatactaaaagttaaaagcccaccctagagtttggaaggcccatacctaccctcaggaattctgcatggagaaggttcttgagcacttgattgamccgtttcttttgtgcattttcttccaagaccttttccaggaagatgcgtatgtcattgatctgagtgtttgctggcagaaggttgagggcctagggacaggaacagagatagggactgggtgaggtgaacaggagtgagaatgaagaaatgtctgcagccgtggagctcttggaccctagtccctttccrcatttcctcttctcattcggtgctccctgcaaacaccctccatctccctaggaacaactcctgaccttggtggtgtccagtttgctgtggtgtagctcgaggacctgcagagcggcctggaggttggcttttggctccagtagttccagcttgattggccccaggcagtgaatgctggggggcgacaggtacatccgaagcagggacagatacacctgtctcagagagacatgagcyacgtcaggctggcagcaaccctcccagaacccccagcactgagcatgcctaacgattcgaggggctcgcctacagtaacagctatcactgagcatgtaaaactggtcattttcaccttgtaaattggtaaggtcaaacrggcaactgaagatgttaattaaggattgctttttccctgagagaaaaaaccaaatgccttgtattcgtttaccattatgccatttacaaaatgctaccactgtaaaacaattcaaaaagattcctcatttcctttggctttaaaagctgagactccgtcacatttttgcaggtggggatatcctaaggtgagatgctgcattgcctactggtgccagtaccacaggctttcgcaacctcagtgcgcattcggggccagatgattcctggtttgggggctgtcctgtgcattgtttagcagcatctctggcctctaccccctggattctggaagcacccctgtcctcagtcacaacaatcaaaaatgtctccagacattgaaaagtcaatgtgtattcaagatatagtacatcagaaccatgacgggttcccgctcgacaggcagacctcataatttatgacacaaatcaagagagtaaagagacaggagtgctattaatcacagggataacaaagatatacgccagaactaccccaagcacaccaggatgaatggtcccctgctgtccctcaatacacacatgcaagatcaatcagagccctgactcgtgccctgtcttattctgccactcatattattgccacctctggtcaaaccaacggggagaggtatgcacacgtgctccctgggtcagggtcactactcacatctttgttgccatctttgtttcggtcatagtgtttgtggcagtacctgcaagggagagagtggtgagagcaggtggtgtgaggggggcacatctaaatgagaggctgtgcgtgcagcctgctcgagcagcctaaccacagccaaaactgcgggccaggacggaggcgattcttgctccygcagtggagtatggggagatggccttcttaactctcatctctctgcagggcctgcttttagactgcttaggaggtgggatgttggggcaaacttactcctcagccatccttgtatccttcaagatgtggacataaatgaaaagagcttgttcatgtttccccatgcgccccaacaggagagctcgttcttctaagaggcctaggaggaaaaggaatatgaggaaccactgccgccatcacgcaagcacaaggtgggggctatgctgtcagaggagtggacacgaggcaatataaagggaagacaataggattcttattgcttgggtttttcttcaaggagaaaataactgaagtttaaaaaagggggagggagctattttaggaagtactttatcccatcttttttgaggtcacatataaactgggtaagaatattcattcagcagccaagtacttaacaaccacctacaacatgctaggtggttcaggtaagatgagcaaatgcttgctctcagctctcataaagacaaattatgccagattacaaaaactgctgaacaatgaacttggccaagaacatgttctgaagcaaaaaacaggttgcaacctggctatcaattagcatgtggttcatacccaggaaggagacttttctcagtcacggtacaaaagtgagtcttcagagaggacaaaacaggagcactggcctgaaatgcctggtttttccaggcccaacttttgtggagagttggggaacaattaaaggggtggattagtctttgcatgaccttcgctgaagtggcttctggccctaagccagacactcaccatcaaagggaaaatcacagatgagccggcctggatcatagtagctggaaatctccaagaacatgaggagcttttgccggtattctcccagctcaccctcttcctctccagctgggactggggttttgcctttaagggaaaccaagctcaaaatgaaaggacactgccaggtggcaatgtagggtcatcaagaaaaatgaagggaatggggttcaaggatgtcaccacatgaccagaaagggcctccagggtggcttccatgctaacttcttttagttcatagtctccatgtggccccaaaacatcagcttacggttaaaaaaataagctgaatagagaaatactctgtgggcaaacctgtttcttatcagtatagctgtcatcttgcagacaggtctgttccttccaccctccccgagggatgactctgagacactcagagatgccaggacctagacaagagctcctgagtctcatgtgccaggcttgtgtcacttagctcccctggctcctcttcagaacttctgcgcacctgggcagagaatagggtggcctgcttacccccaccacacgtggcacctgggtctgtgctctcctctaaggcctggggccaaccggcttcctaaaagaactggtacctgcagggaaggacaggagatactccttcatcagaccttgcaccttctcacagtatagctggatcaggcagttgtggaaccgagagcctgtctcctcccaaacatggatgatgtgttcctgaggcaagatgtaggtctttgtcactggtattctccaggctgtgacctggtctcccagcctccctcacatttttaaggcccaacaggtcccatccagattatcccctaatcgggctgcaaagatgactaagagacagctcgtctaaagccaccaggaagtttcacaatgcgacccagtaacgtgaggagccatcttctcaattactaaactccattttactaattttgtcccataatcctccaaactctcatagcgactcatgtaattrtggttaaatatctgcatcctggtacttaagcctatttgattgtcctgtggtcacttttgagtttcgctttggaattttttttccaaatgtggctttggaatttttttttctaaaacattattcttttatccctctgtagtttacctagatttggtaggtagcatttccagcttggtctactgggatctttttcttcagaggaagctgaaataaccctcatccttccaatccccaagtgacataaatcccaaatctgaacagcccgataacagaaccacgcagtcctggatcctgggtttaaagctttttagtgcagaccaaaaaataccttaccagataaggaatagccagacccttaaaattctctattaagaagccgaggactcgatcacgtggcagagactccacttccgggagatcttcagtaaatatctgttagaatgaacccgagttccagcagcagaaccatctgactgcagttccagcaaacacacacrcatgtgagcgcagggatcaaacagactttaggagggcaagggtacgagaaggcatctgtaggcagtcagcatgtcagacgaggcacaggcctcctcatgcctgtgtaaggctctctctaccaactacagtgctggctcgcgcttcccagtccaccctttcttcatgcaccaatgaagacagatgcatgaatccaccctcctctccatccactgctgtctcaagtgcaatcagaaccaagtgtttaccagataaatccaagggactccygtggctcaccttcaggccatcttctgggaagtctctcagcacccacactgagtaggagaaaatcaaatgcaggttttctgtgcctagaaggaaaagcaggacttgtcagcagttgaggcccatcttgcctgtggcactgggaaggcaggtgggcaggttgccccagaattcattttcctgaaaagacagctcaagcatgagccacttggggttgttagccctactgggctggctccataccagggggctgtcacaggccaaccaccgagggacttttatgcyatttggaggaatgaaattgagtgaacacgagcacgggagggaggggagcaaccaaccagaaacagaaacagagggagaccaggtcatttgaacaggagcgctttcccacccctttcaaaaggcggacttacccagatgctgcagatactgcactgtcctctcgtggcctttcagaggggagttggctttcttggactggtccacgagcacctgcagagctggccaccaagcccaagaacaaggtcatgagccttttccccacgggagatttccatatctcagtgggtttcccctgccatgtacaagagcccctcccagatccaaggaaccactcccacacctttctcgtggagccccttcttctcatacaggatgataagctcactgtacttgtgagccttcttyagcacgtgctcgctctcctcgatgtggcagtgattgttctccaggcgtagcaagggggccaccagggccacatttgtctgcagaaagagcaggagttcagtggaaactgcttcctggggagccccacccttccctggcccaggcctgctctaggctgaaaggccaggaatgtagcacaagcaagagaaagcagacagccctctttcaggacagcaggtagaggcttttagagcatttatggaccttcgcacaatgtgttttaatgttctgtgggggagaacatttcttgaaggaratactgtcccagctgactttgtagcactaactgcratccgaccagagaagatgaatccactgtacaattgtgcattgatatcttgccctatcctcttaattccaagagactcacagacatcaggagaagtctatatggtttccagaatcaaagacttcactcttactaatggcaggtccctcagggtctagcactcccttttactttcccagactgtcagggtaactgggaattgtggcacccgagcgctcaggtaactcacatggagatagcacttgagcagggtggtgtcgatgatttgtagcagcttcttcttggatttgatggtgggagtgccttccatgagcggtgaggtgcttgactggtgatcagagtcattcagcttctttaccaattgacttcgtttctgcaaaggtcaaaatgtggggttaaggccaggactaagtcttcctttgtcatctgagctactgggtaattctgaatacctccaatcagctcatgcctattggcctgatctcacattagcattcgatttttagcactgccaaattgccacagagacaacaacaattatttattgaatatttactacagaccaggcaccatgccaagcactttatatataccatcttaaacctaaaacaagtgccgataatattatccttattttacaggtgaggaacccaaggcacaggtgtcagctgctacataaggggtagggcaggattcacactgggggctgactccaaagcccatgttcttttatttttttaaaaatcaaccttattgaggtataacttacaataaaatctaatcttttaaagtgtaccatcagatacattttgacagatgtgtacatgcatgtaaccacctcagtgaaggaagataacatttctatcactccagaaagttcctcgtgctrttcccaaacaatcccacctactgatctgcttttgatccctggagatgagtttctgcctatcctagaacttcatccagtatgtattctcttgagtctggcagagcccatggtcttgctctgccatctctctggcacaatactagtgtcagttacttcacacattcccattgtcagtgaagaaggccagggaaggacgtgtgctcaccttcctacagctaagacattggcagtggagggccttccacaatgccactggctttgggagatagtatgcccaggaatcttttttacttagcacagtgtgtgcagtgtgtakgcagtggcaagtttgtgtgctccttgcaggctgccagccccaggagggtacccctggagcccaatgtcaaggaagggccaaggccacccatgcctgatcagacctgcagggactcactgacccagaggcagggagtggaaagtggcatgacaatttttccagcaatacttcttcttttttttttttttttttgagacagagtctcactctgttgcccaggctgaagtgtagtggcgcaatctcggctcacttccacctctgcctcctgagttcaagcaattctcctgcctcagcctcctgaatagctgggattacaggcgtgggccaccacacccagctaatttttgtatttttagtagagactgggttttgccatgttggccaggctggtttcgaactcctgacctcaggtgatcttctgtctcagcctcccaaagtgctgggattacgggcatgacccaccacacccggccaacagcaatacttctcagtgcctaccctagagcattctggagacctcttacaaagatctgcaaaacacttaagaggaaaaaatatcaataaggtctctgattctgaatgggtacacaggaaataaacaatagccttctgtgacagaaatctagggttaagagactttaatggagatgctggctttagtgctgacttaaaaaatgtatctgtctataacagtaaatcataaaaaattttaaatctaaatacctccctaaaaaacatgttatataaggacatttattgataaggaagtactttctcagtatatggctaaatttttaaaaagttaagctataaaacaatctacaatttgatatccatttgcaataaataaaccaagaagtaaataaacaaaagctaattcatagatatacaagtctagaaggacaacactaaaatgttagtttcttacattctggtggtagagttataggtaatttgtatttctgctttgtacttttttgtgtgtgttttccaagtggttccacatacaggaggcattttccccaaaaccatgtatattacaaaaagtttgttttaaaaaaacttgtatgcttctatcaactaaaatttactttttttagtttctataacagctttgtgtgaatttactaggaattgggtgtgtttatttttatcaagatttggcagaaaaccccacctcaatggtactgtaaagttagaagtagcagaaagaaactttaccccaggcagacttcctacagcattaatttacagactgccttggcattagagaaggccctcaattccttgccacaaagaaacaagtactgaaactcccaggcaaactctttcacgcactctgtactatacctacctgtgtcaggtagtcaatcagagctaagtgagccttctccaattcagccccggagagcacaggcaatgggttgggatactgcaactgctttctgtagtctgtgggcagcaggtcagggtacaggcccatcacatgggtgggatctatatggaaggtaaacatgattcctctggaaaggagcccaacaatttagggataaaataaaacaggactattactatagcaaaataagttccagactgatttaaaaaaaaaaaaaagactctcagttcataaacattcaacgagctgtagacttatgatttgagcactttttatacatatgttaaaattcactaaaacatcacaaaaatgcctgactatattcaaatacacacacakaattagaattgaatatttatcaagcctctgaaagtagagaataaaaaatttctaaggaaaaatgctgatattgaagtagaagagatcaagagactcaacaataaaaaatttaagtcaaaaaaagaaacattactaaaaaaaaagacaacaggctagggaatatatttgtagtatatatggcaagaggctaatttgttgattacaagactgggcagcatagtaagaacacatgtctacaaaaaaattttaaatttgctaggcatggtggcatgtgcctgtatccagctacttgggaggctgaggtgggaggatcgcttgagcccaggaggtcgaggctgcagtgagctgtgatcatgccactgtactccagcatgggcaagagtggagaccctgtctcaaaaaaattttttaaaagagggtaatatgttgattaaacaaattcacataaattggcaataaaatgtaagacttcatttgacaaatgaccaaaagacaagaccaactgacaagagaatataaatatgtgggaaaatgttctgctatattaagaatcaaaatggtgcacgttaacaatgtcaaagaggtgacattttccttctgccttagaatttatggtgttctcacagatgctcgcagatttttttttttttttttttttttttttttgagacagggttttgctcagtggcacaatcttggcttcttgtagtcttgacctcctggctcaagtgatcctcctgcctcaccttcccaagtagctgggactacaggcatgtactatcctgccagctaattatttttaaattttttgtaaagacaaggtctcactatgttgcctaggctggtcttgaactcctgggctcaagcaatcctcttctctttggtctcccaaaatgctgggattataggcatgagccactrtacctggccactcccagattgtaacagcaaaatgctgtaagtagccaacatatcccctcactgactgggggctggttatataatttacagtgcatcaatgctgtggaacactatggtgtatggtcaattggcacttcccatccatttctactcctttatagtccacaggggctataaaactgaaaactacttttatcaaactccctagcagtcagggttctaagtgaaaatctgrttccacccagaaacaggatatgagatttggaaactgaaagtgagatggaagcctccctcttccagctcatgagtgtgtgcagccagactcggcatttccagtgtctggttatcagctctgccattccatagaggcacctgcctggatacagcagcctgcactcagtcaccagctctgtgggaactgaggatactacagggcttaggctgtggaagcagyagcaacttgctgacctctggatcacagggatgtgcccacatcaatgtccagtagtggaaccctgtcttctgctcattcagctcatccaacaatctgtgtgtctatatgtagtaaaatatacatgccacaatatttatccttttaaccatttgtaagcatacaattcagtggcattaaatacattcacactgttgtgcaaccatcacaccatccatctccaggacttttccatcatctcaaattgaaactaccttaataataaacaattactccctattctccctccattccaacccctgggaacctctctattttacttacagtctccatgaatctgcctactctaggtacttcagataagggcaagttctctcttccaggctatgtggagtcttggtggtaggatagctctagggacctacctttgccttcagaagcagaggggagccaaacctctttctccacccctagtagagtctgggggtcagaccatgacctaatcctggctaatcagatcccttgatctggaggaaatgatgcaaggatgacaagtagcgtggtacacaccaacatatatcatacatcccatcctatgtgctcctcttaggtaacatgacactcctccatcaagagaggaagtctgatgaacttccttgccttgaacctggcaggacccttgtaaaccaacagaatataggragagtgagagtcacaaaagacattgaagcttctgcctaggtctcttaaacacgccttccggaaagagccagctgttatgcatgaggacactcaagcagctctgaagagagacccccttggacaagaactgaggcccctggctccagccagcaccactttttcagccatatgagtgagccagcttggaagtggatcttctagccccgatttcaaatgatggtagcccaggtgacataaaactgcaactgcctgagagatctgaagcaaggacagtgcagctgaccccttcccaaactccggaccaacaagtactaacagagatggatgattactgttactttaagccatacagttttggggagatttsttacgtagcattagacagctaatacactagcagagggcaatttttatcaaggatgcaacaacaggggaagtggcagtggcaacggctaagaaggtggctatgctagtgcaggatggcccagcctgtcctggctacaaactgatcattgtctggcttcctgttttgtttccagctgggagggcttccagagctcccttygtttccatctattccccagcctaatctcccatcaattttatgaattctttcaactgtcattaccctaatattccaataaactctgcttaatttatccagattctacttaaacgatccagagttggtctccattgctcacaaccaagaatcttgactgatacagggaattaccacagttcattactggccaaggttgaggaatggtggaaaaaaggcaaagcaatgaagaggagaaaagaggagatgctagtatgatatagagtcaatccaagtatatatagatagattgatccaaattaagcaraactgggatatacagttttgaatatacagtaatgaaattcaatactaataacatcaaacacttacagagcacttgttaagtgccacacactgttcaaagcacttcatataatccttatagcagcactctaaagyaagcagtagtatgatcatctcttttttgcagaggagaaagcagaaacacagagaggtccagtaactctaccagacctcaggcagaccccagggtacctgctcctcgccactacactcatgtctagaggtttcaggacattaagaaaaggaagagcttcatggcactgccctgtgttggctctcataaatgatctgcagtttaatccaaggactttggttcagaacagcattcaataaacactagctgatcaaatacccatttgttgaactgaatgactttctgctacctttctctaatggcaagggcatatcatactggaaaattgggagtccacatttattgagaagaccagattcataggattaggagtatagatatgtaaccactgtggtcaccccacaggatcttgctaggtatgaggatcaatttagctgagcctaaaccttctccattctcagaagtctgttatcatttctccccatacttttcaggctcccctcctccattagtcccttatataaaggcctcaccacttgttacctgtgccaagtttagcaaagacctgcatggactcatcaaaacgcttctggcagaagaggttgaaggcatacaagttcttgatgtgatgaatttgttgctgcttttcactgtcagaatcatctttcatttcctaataacggagcagaatatgtaagagttcactcactcaacaaatattgttcagtatgttcttgatgttagagaagatgctaggagctacagacaccaaagtgtacaagacaaggccgggcgcggtgcctcacgcttgtaatcccagcactttgggaggccgaggcgggcggatcacaaggtcaggagattgagaccatcctggctaacacggtgaaaccccgtctctactaaaaatacaaaaaattagctgggcgtggtggcacgtgcctgtagtcccagctactcgggaggctgaggcaggagaatcacctgaacccaggaggtagaggttgcagtgggccaagatcatgccactgcactccagcctgggtgacagagtgagactccatctcaaaaaaaaaataaaaaataaaacaaagtgtacaagacagccacatggtatccaccttgcagcctgcccttacagtctaactgtaagactgctaagtaactacgcaattaaaacacaacagggtttctacaagatgcctaaccggtaatcttgaaaattgtcatggtcatgaaaaacaaggaaagataaaatgtcacagaccagaggacactaaggacacatgacaactaaatgcaatctgatttctggatttgattctggaacagaaaaaaggacactaatagaaaaactggccaaatctgaataaaacctagagtttagtttaaaaacacaaaatagggtaagagtgatgataagcatgtgggaggggtccccaatccagtctgagtccggggtccaggatggattccaagagggacctaaactgagacataacggatgagttgggccaggcacggtggctcatgcctgtaatcccagcaccttgggaggccgaggtgggcagatcacctcaggtcaggagtttgagacccagcctggccaacatagtgaaacccgtctctactaaaaatacaaaaattagctggacatggtggcatgtgcctgtaatcccagctactcaggaggccaaggcaggagaactgcttgaacccaggaggcggaggttgcagtgagccaagatcacgccactgtactccagtttgggtgacagagcgagactccatctcaaacaaaaggatgagtttgagttagctaaatgaggctgagcagatgacagggaggggaagaggagcatgtactccccagcaaaggagacagcacatgtgcaaggctttaaaatggcagagagagcacagtgtactcaaggaatgaaaaacatccgatgggccgggcgcggtagctcacgcctgtaatcccagaactttgggaggctgaagcgggcggatcatgaggtcaggaaagaccatcctggccaacatggtgaaaccccgtctctactaaaatacaaaaaattagctgggcgtggtggcgcacgcctgtagtcccagctactcaggaggccgaggcaggggaattgcttgaacccgggaggcggaggttgcagcgagctgagattgcaccactgcactccagcctggcgatagaggaagactctgtctcgggaaaaaaaaaaaaaaagaaagaaaaaaaacagaaagccatctggcatagctggcacggtygggaaaggtcctattctcagtaaaagctaaacaaatgcagctgctatgagctttgcttcttcctcataacctattttccccttatacctctttagccaatctttatcaaatttagttttttctttcaaaatgtctctcaatttccccctttcctttcttttcctattaccgccacactagtccaagccatcatcaacatgtggctgtccctggtctccgctctcctgcttggtgcttcaaaggcttccaaaacctggtgccagcttccttatctagctgagtcccaaacacttaggccataccttcttctccagtcaggacaggctccaaatgcgatagacacaggccacactttacacttctttaacttcctctccatctggaatgttccatttcctgctcttgatcctaatctaacatattcttaaacggtcaactcaagtgtccagccgtaggatgccttttccagcccacagcgaactgtccctctctgacacttggctccaggacttatcaatgccaaagtttagtttgtaatttccctctgaaagttccattatgtttgtgtatctatttaaataaaagataggttcttcctggactaacatgatgtcaatcaacctttttttgtcataaaaagggcagagcacaaaataagtatgagcctagaaaagagaaggaaaaatgggaacccacttccattttctttacctgagattaaacaacctgaactaggaagatcactgaaaagactctgagacctttctgctaagaaaaatagactaaagagtttcatactgcataacctttttatcaaaaactaaatacattacttccatatgttaaatatatgtaaaagattaaacatatgtgtttaatcattaaatatatattttaaacgtatactaaatatgtttatattttaaatatatatgtaaaagagtaaggtcatgataaatacaaaatttaggataatgattacatctggaggagaggcagagggatgggatgggaaggattataaaaagttataaaagttatggttcttgggtaggatggtgagttcatgggtattcactgtattatttttaaaaatgaaaataaaataatataggacaaygcatgagtagaaaaaaaaacagtaagatgctgaaattcagtgctctaagaaagcaatcatctttatggaatattaactatgtcttactattaagatcagatttttattttaaatccagaacatatatgtccaaagtaaatgttcttcacgagtagccmccataggtaacttaaagtatctgcattytaaaaaagtgctttccttttagaaatagtttacaggatactctagaaattcagttttattactattatcttcataaacatctcttctttaaagtatcactatctgaggctgggcatagtagttcacatctataatcccagcactttgggaggctgagacaggaggatcacttgagctcaggagtttaagaccagcctgggcaacaaagtgagaccctgtctctacaaaaaataaacaaattagctgggtgtggtggtacatgcttgtggtcccagcaacacaggaggctgaggtgggctgatcacttgagaccaggaggtcaagactgcagtgagccaagactgcatcactgcactccagtctgggtgacagagtgagaccctgttttaaaaaaaaaaaaaaaaaaaaaaaaaaacctcaaaaaacccccaaatacataaagtagcaatatctggtttaacaactaggttaggctcagaatgacttttggttgtttcctaaaagcaaatccaccccctacagatgacaataatcatcactgacgatgtttaaaagaacaagacacagactctgacatcaacattggaacaagaggtggtcactattttgctgtgaacaagatcccttgcaaacattacagtaagcatcataaatataagactgccgcctggctgaatacaacaacttgaagtagtttcagaatatcaaaagaaagcctacttatccaaacataggagtctactgtggaaaggaattttgaggggtcctctagttgttgcattcaactttactataacagtatatttatgattgctactaaactttaatgtctccattatctttaatttttcatgaccatacaatatattaaattattttattctcccattaatttttttttttgttttttgagacagagtctcgctatgtcacccaagctggagtgcagtggcatgatcttggctcaccgcaacctctacctcctgggttcaagcaattctcctgcctcagcttcctgagtggctgggattacaggttcctgccaccatgcccagctaatttttgtatttttagtggagacagggttttgtcatgttggccaagctggtctcgaactcctgacctcaggtgatctgctcgccttggcctcccaaaatgctgggattacaggcgtgagccactgctcccggactctcaccttaattctacaaggtactattactagaattgatattcattctacatttgacagataaagtgaaaaagtaaactcacttagagttacatagatattttacggtggagtcagacctagtattcaaggccctggactttcagctatgtgcttattctactaacccaaaataaatatgaacattgaaacccaaatcacctactttcaagaacaataaggaaggaagactagtcaggaacaagacttactgcgagctgcagagccaattcaaactgcttgtcctggagaagttgttggatttgggttgccatggggacagggatgagtctccaaacaaaatgattgctggccacatagataatgtttgatctggaagcaagagtaagaatattagcaaaagatcacaggctttgtgatgacacaggtgactttacaactttgggataatatacagccatagcaaaaaaagaaattccttaccctcctgaggtaatgaaayggggcctttgcaattcaatgctttggaccagaagcctcggttcaaatgttcggatctcaacatatcgaggcaacactgcaatgatgtagggaggctggtgctctgtgaaagagaacatacacagcagttgttccggtctaaggctttgggtttatggagtgtttcagctgcccattctaagatacatttaaatggatctccaaaaagtcccctagtcaaatatcaagccaggatcttacactgtgattcagaaagaaagaaaaaaaaaattggcctgtaatcccagcaacttgagaggttgaggtgggaaggtcacgtaggccggaagtttgagaccgacctaggcatcttagtgagacactgcctcaacaaaaacatttattaaaaaattagtcaggtgtggtggtgcacacctgtagtcccagctactcaggaggctgaggtgggaagatcatttaagcccaggagtttgaggctgcaatgagccataactgcaccactgcactccagcatgggtgacagagtgagatcctgactctaaaaaaaagaaaaataaaaaaaaattgctttgcttgagttatgatcagagaaatctcttgcacaaaaaagacacatcagctgtgctgacagtcacctgatcccactcctgccttattccccaaagaactggataaaagtttcacttgctcctttttcatcagtcacaaagccaggccagacaaaggccagttgcagctgcccataacaatgcatcagtgggagaaccaggtaacagaacctcttctttcattctcttagaaaagtggygggagggggaaaggccgggtgcagtggctcacgcctgtaatcctagcactttgggaggctgaggcaggtggatcacgaggtcaggagatcgagaccatcctggctaacatggtgaaaccctgtctctactaaaaaaaaaaaatacaaaaaaattagccgggcgtggtggcaggcgcctgtagtcccagctactcgggaggctgaggcaggagaatggcgtgaacctggaagacggagcttgcagtgagccgagatgcaccactgcactccagcctgggcgacagagcaagactccatctcaataaataaataaataaataaataaataaataaataaataaataaaataaaaaatwaaaaaaaaagaaataaaaaagaaaggtagggggaaggcaaattctrttttccctaaaattactctaagggaagagttccacatttctagccaatgttgtttctgctagagattttcacagagaaaaggtgtgatgctccacctgatggctgctatggtttggctatttttattccctccccaacttatgcattggacacttaatcctcagtgcaaaagtgttgggaggtggggcctaatgggaggtgtttaggtggtgaggctccagcctcatcaatagattaatgcactataaaaagggcttgtggagtgggttctctctcttctgccatgtgagaatgcagagctcatctttctcttacccttctccttccaccatgtgaaggagcatcaagaaggcccttaccagacaccagatgccggcaccctgatctgggacttccaagtctccaaaactgtgaggaaacaaatttctggtttttataaattacctagtctgtggtattctgttatagctgcacaaatgaactaagacatggcttaatggtacacagagaaggtggctggatggacttctcagtgaaggcatttctatttgatacttgctgtcgagtcttaaaattgttttcctctattatatctaaaaaaaaacctttcattcatctatccatgaccccaaatttacccttctgatccagtacaaattattgggttatactccttttcttcactcttcctctctcttttgaaaataacttttaatatatccactatatttttctgtactttttgacaagcatgtgacagtccaaagcttaaaatgctggatgaagcagaacaattccacacagtgctaaagaagtcagcatgcaaaaagcagactgacaaaaccataaaatcattgcaaatcaagtcttccaatatttgagaagttgtatggtgaaggagatttaacataaatggagggaatttagaaaataagcaacacaaaacatatctttaaaaacacaaatctcagaacaagactgaataaggatctgctttaccttacactgaactgtaagataaatttattgtttgtatactatatgaaacataatttcactaacttagagataatagaaatattttctatgactatattctgtgctatatcaagaatccgtaaagaactacagtgagatatcacctcatacgcctttaggatggctactattaaaaaaatgaaaataacaagtgttgacaagaatatggaaaaattggaacccttgcgcactgttggtgggactgtaaaatggtgcggccgctatggaaaacagtatggtggttcctcagaaaattaaaaatagaatcaccatatggtccaggaatctcatttctgggtacatattcaaaacagttgaaaatcaggatttcaaggagatatttgcacacacatgttcgtagcagcattattcacagcagccaatggtgaaagtaacccaagtatccacraacggatggataaacaaaatgtggtatatacacacagtggaatattattacttttttaagtaattattttattacctttttaagtggaatatatattacctttttaaggttcagccttaaaaaggaaggcatgaaccttgaggacattatgctaaattaaacaaggcagtcacagaaagacaaatactgtatgatttcccttatatgaggtatctagaagatgtcaaattcatagaagcagaaaggagaatggtggcttcagggactggagggagaagaactgaggagttgttaatgggtatagagtttcagttttgcaacataaaaaagttctgaagatctattgtaccacaatgttaacatacgtaataccacttaactgtacacttaaaaatggttcaggtggtaaattgtatgttatgtgttttttacatttaaaaataaaaatgtttttaaaagtaaaaaaattagtaaaaagcaaaccactagatgcataattaccacatagaaatttaacttcaaaatatatattcataaaaataatttcttagtgtgtctaatttgctaatatttctaattatccttttttttttttgagacagagtctctctctataggcccggctggaatgcagtgagtggtgtgatcacggcytactgccgcctccatctcccaggctcaagcaatcctcccacctcagccacccaagtcctgggaatatatgcgtacagcacgatgcccagctaatttcttaaatgtattttttgtagagacagggtctcactatgttgcccaggctggtctcaaactcctgggctcaagcagtcctcctgcctcagcctcccaatgtgctgggattacaggcatgagtcgctgcactagtttaattatccattttctgataaaaagtttttcctattatatttgcaatttatactatcaatgaatagtacaataaaatttcaaagctatgagggaactcagaaatgagtaacttgagaactaagttatatttctatcattttgaacgctactgctattatrctgatatttttcatcttaccagaaaaatgaaattaaaagcatattgttttatattgaattttttattttatttttakgctggcctcattttgaaaagttagtacaattttcttyagtgctaacttgtataacatatgtaaaatttctttctccttttaaaatctgtcccacttgaatacgttctcatttaattaaaaaggtaatctataacagaaacccctttggttgtcatatcttttgttgacaatagagatggtctggatctctttatatctccaaaagttgggagactggctggtgtacagcaggcatataaataatgactgaccaggataatgatgcaattattcagcaagcattttcttacacgctctgatgtttcaggcactgtactatgtagtaaggactcaaagtggatcaagacatgcatccagacctcacagagctcctacaggaacagaggagacagatcgctcacgtgtgacaagttgctgtgacagagatacctgaaagggttagggaagcaccaagaagtgactaatcctgcctgtgggtcaaaggagacctcacagggcaagtgcctcaaaactttcttcagcagtaagacacagacatggttttgagaagcactgatgaaggccccaggcactaacgaaggttggaagacaggaactctcatcctgggaaatcagaaacacgcttgacttttacatgcctcttaaactcatctaccaaagttcctcttctgaagggaaaacaaggtcgcctagaacatcgggaaagcctctcataaagctccataagcccctcaaacttgtgactatccataatcctgggccttttaaaatactgaccttttgatttctcttccttctagtctacttatctctaaccacaaccagaacaatcaccctagaacatgatgtgttttttgtttttttttttgaggcgggagtcttgctctgtcacccacgctggagtgcagtggcacaatctcggctcaccgcaacttccccctcccttcaagcagttctcctgcctcaacttcccaagtagctgggaccacaggcacacactgccacactcagctagttttttttttttttcgtgtttgagacggggtttcaccatgttgcccaggctgattgtgaactcctgagcttaggcaatctgcctgcctcagcctcccaaagtgctaggattacaggcgtgagccactgtgcccggccagaacatgatgcttttatcaagacattctaccattcaggaatctactggcctcccagaccttctcacggacatctaccaactggccctatttcactgctctgtaattcagaccacctgtatcaagtcaggctctgtaataccmtctcccaaatmggcatgtctttctttggacttctactcatttattgggctttctgcctagattgaatggaaatttytcttcaagccaggttccaaactccctgcctgacctagtccatagttcagtcttacctatgtaatgaaacttcttcctaattaaacaacaaacttccctttctctgaactactgaattttaactcatccaatttaacaccttaagcagtgccttgttttgtctctttatccaagactgtaacccttgtctccagagacaggggtctttaaagacagaaagcatgtcagtacgtcccacttcacagcagtaactattttagtaatgctcactcttccgactgaaaataaaatggggcaagagtggttatatgcttcyaggcaattccattgtggagagctgggaacctgaagcaagcataagaacagaagcacctaatgcgtagaatagaggctgacaccaaaatcacctaaatgttgtctgtgcctctaagctacaaaaaaaaaaaaaaaaaaaaagcaacaatagaaaaacccttcaacatggaattactatatcaaaaacccttcaatatggaattactcatactataggaatacacaaggaatttccactaatttccaaatgtagtctatttggcagaggacacaatcaaaactcttaaaaaaaggaggaagaaaaaaactaagaagtaaaagatagcagtagataatcacttcctaaaataaacatttctgtttatatgttttccccctctggagtaaaactcagcttcttgcaagaactagactatcccatttttaatgaccctaaaatgtcatctacttataagaaggggaactgaaagtgaatgacacaamgtaaaccagtctgctaaagctacgaatgggactccgttctgcaggaatggcacacaacctcaacccaaagtgggaaacagcagctactgttggtctcacccatggccactggtatgtccgtccagttcagggcacatttctgtgtgcagatcccttcctcattgagtaccacggtgagatcatcctggcccacagccacttttccatctgccagaggtgcaactaagggctccagctgttttcctgttggaaagagctctttgatggacccctttccatccacctataggaagaaacagagtgagtcacctagcattccccagccagaggtaagaacacaggaaaaatccagatagaacccgaaacctagagaagccaataatattccttgtttgacataagaaaatgttacagagtttattataataaccgttgttatcacaatgtaaaacccgttctytaatgcaaaggaaagcatctagcctggcaactgacaatgccaggtgctggcaagaatgcagagcaactagaactcacattcactgctggtgggaatgcaaaatggtgcagctgttttgtttgttggtttcttacaaagtttaagatacacttgccatatgccccttaaagatacacttaccatatgccccagcaatcccattcccaggcatttgcccaggaatgccaatgtatgtttacacaaaygcttgtatgcaaatgtcttagatgcttattcaaaattgctaaaaattgaaaacaactttttttttttttttttttggagacagtcttgctctgtcgcccaggctggagtgcagtggcacaatctcagctcactgcaacctccgcctcctgggttcaaacaatcctcctgcctcagcctcctgagtagctggaactacaggcgtgtgccaccacgccaggctaatttttttttttgtatttttagtagagatggggtttcaccgtgttagccaggatggtctcaatctcctgacctcgtgatccacccgccacggcctcccaaagtgctgggattaaaggtgtgagccaccgcgcctggccaaaatcaactttgtccatcaactgatgaatggataaacaaacaccttgccatagactactattcagccatgagaaagaataaactattaacacacacaacaacatggataaatctccagtgcattctgctaagtgaaagaagccagactcaaaagcctacatattgtgtcattcaatttatatgacattctggaaaaggcaaagctataggagatgaagaacagatgagtggttaccagaggtctaggaacagaaggagaggctgacttcaatatgagggaattttggggggtgatggtagtgttgtgaatctcgattgtggcattagtcacataaatctaagcatttgtcaaaacacwgaactgtacaccaaaaagaataaattttactgtatgtaaataagtaatttctgaatagcctggtcctaaagcaaggtttcccaccctgaaggtgatgtcagcatccaaggcagtcagagaactgagagccttaagtccagcttttgctcagttcccttattccttgtgcgctctctcaccatctgtaggcctacttgctattgagtcagtggcacagcagtgactcctccaggagtctgcaactctgatgctgataaaatcaggatattcaaatgacacaaagatggaacaaatatattaacaagataacaatggggccaggcatggtggctgtaatctcagcactttgggaggctgaggcaggagggctgcttgagcccaggagtttaagaccagcctatgcaacatattgtgaccccatctctacaaaaatacaaaaaaaaaaaaaatacaaaaattagctgagcatggtggtaggcatctgggctacctgggaggctgaggtgggaggactgcttgagcccaggagacggaggctgcagtgagccaagatcctgccactgcactcccgcctgggtgacagaggggtaccctgtctcaaataaaataaaataaccaatgaagagctcacccagtggaaggtagagagagaggcttctagaattgccatgtctgaattacaaggggtgtgaagctaagagatttagattattcaatgaaacgaacagtgtgtcaatcttttctacatatagtatgcatattggagaaaaacaacgtcatggatatttacaacttacgttaagagaaaacacaggtcataaaacaattgtatagcatagtatttttaccaataggatggaagttcatataccaagaagttggcagtgactatttctgagtggggggactatggttgatttgcacttcctttatctccttatctatattttctgtaataaacacgtgtaaaaacacgtggcttttgaaatttaaaaaaatagtgagaatcacttttagtacaaacatacaaaaagatttgacggcaggagaggaaactcaaagtcttaaaaatacttaagtttatactaaaattagtttaaaattcctaagcactgaagccttaggatagcagtccatgatgatccactggacagaggcaaacagccttcattatctgtcccaatagtaaaatacacactgtggatcatcattacgtaaagaactgagcgttgactcttggactgacttaagttacaaagatatcctatttgtgaaaaatgctgagcatgaatgataactacacatacaaataacaaatcctgttatgccaaaagctctacttaaagtggtcgcttgacctggagttyggagcagataatcatcttccccaagataaactaatgatatttgcaaaataataagattttacccttattaggtagtagtctctcttgaaacccacacagatagaattttcacaccacgccatggacttgggcacatctggcacactaaagtccccctgaaaaaagagagcaaggatctgaatgaaataaatatttttttaaaaaatcatgactttcctgttattctgcaacctccattctgcaaaacaaccctcaccctcatcgggcacaattctacaggcacaaggccaggaaactacccttaataaaaatacaagtccatgaactggacaaagtacatttggaaaaggtgaaaacccactttgaaataaaccaatctataaaaacactgtagaatcatattacaagtaggcatcaacaagctctcatgcacttcataccagagtattcatttgcgtagaatgacaagactggagtcctgaacttcactagaaccgagccactgcagcagctcccacccaaccatggaccaaggaacagtggacttacctgcaattcatgaaattccctgtccttccagaaatagagctgcagcttcttttttactgccacacacatccgtaacacctcytcaccggtctctgtgtgctgggaggagacatgcagagcaaatgaaaatacaatgactctctctaactgagtgataactaaattagagattgtctaccttgaaattgctactamtctgaaaattccctgtaacacagtcatcctgccaggaaagctgagcagaacaccattctctaagatgcgctaagaaacaagtgactgaggaacacttcctcccgaagggttgccagccaaagaccacagcaccagcaaatcacatggacattcacaattcagaggagaaaatcctggggcagtccttcccctatataactcctccctcctttttgctcttaaatgtttcttgctcctggctgtcaatgcatgctgggtyaagggtgaccatgtgccagtgacatcaagcccacttttaagcctttaaagagcaaggaaaagagtattcctaagcataaaatgatgcagtgtcaatgtagaacataaatgctaaaaaatggtaagttgagtagagagaggggtgaggcagattctgaagaataaaagaatgataaattggcaaaaataaagagcgatatcttttctgaacaatgaaaagtccctaatgacaaagacctcagtgatctgtttagaacaagactccatttaatgtcttataattatcttcatgatattgttacagtcttgctttcccaacaatggtttgtccaggacgagagtttttgtcctcggttagctgcctcttgccaatagtattagattctcattaacccacgcacagggaatgcaaacgcttcaacttcacactatgcaccaacagagaaatttctctaatacaattaaatattctctttgggccgggtgcagtggctcatgcctgtaatcccagcactttgggaggccaaggtcacctaaggtcaggagttcgagactagcctggccaacatggtgaaaccccatctctaatttaaaaaaatacaaaaaatagccggacrtggtggtgcacacctgtagtcccagctacacaggaggctgaggcaagagaatcacttgagcccgagaggcaggggttgcagtgagccgagatcgtgccactacactctagcctgggcgacagaacaagactccatctcaggaaaaaaataaataaataaataatctttggagtctctgttgggtatggatcatcagtgtcattcttcccatctaatggtaggaatgatgtaggaaagactgtattgattaaagcataaagccaaatttcatcttgggtaaacttacctggaggtcacaagtaaacagtgatgctccctttgcctttgaaaccgtagtgatttgttgaaatgtcaataggtcatggacataaatgttattttctgtttgggaggaggtataacatcaggatcaatgatcataattctctagcatagccactatcgaggcaaaaaaagtaactgtgttaacatctagaagaagcaaatggcagatgttggttgaagatgtcccttcagtttcactaggatgattcattctcacctataaccagtacaaagcatttaagaggtcacttggtcttctaaacttggatattttcttccttaaacatttgagcttggcccggcatggtggctcacacctgtcatcccagcactttgggaggctgagacaggcagatcacttgaggtcaagagtttgagaccagcctgggtaacacagtgaaaccctgtctctactaaaaatacaaaaatcagctgggtatggtggtgggtgcctgtaatcccagctactcagggggttgaagcaggagaatcccttgacccaggaggtcagaagttgcagtgagccagggctgcaccactacactccagcctgggcgacagagtgagactccgtctcaaaaaaaaaaaaaaaaaaaattggggctgacttgagtaaaagagatctttcacttccaaaacactcttttttttttttttttttttttttttgaggcacggtctcactctgttgcccaggctagagtgcatcaacaaaaggggcatgatctcagctcactacagccttaacctccttgagactcaagtgatcctcctacctcagcctcctgagtagctaggactacaggcatgcaccaccacacctggctaattttgtttattttttgtggagatgaggtctccctgtgttrcccaggctggtctcaaactcctggactcaagcaatcctcctgccttagcctcccaaagtgctgggattactggtgtgagccactgcacccagtccaaagcactcttatactctgtccatttcaagtctgaaatattatgatgcagtatttatacaagaaatggctttcaaagctactcacattaggaggctccaattagaaaagggaaatcccctgtgcattttgtactaacccatggcaatgatttctttcctagcaaagcaatcaaaataatcattttacctgggcctcatatctagttttagtcatgaagattaagttacctcagatgtttatctgtggacccaggaacaacatttaacatgattttactctttgggccccagggtcaacagcgcaaagtgtgagatcagctgctagtcccctgcatgtccagaaaaggcctcactggctgctttctatgaarccatggtttttcacatgagggcctcaacagtgtagccctgctctgtctcttacctgatatcctgccaatctccaccacatatccttagtctggccacaataaacaatttgccacaaactgccacatctcaaggcctttgttctagttgttccctgtgtttgtgatacgctgctggcctcttttcctactgaaagtctagttatctactagacaatatagtccctcccattaccaagattccacaacactttttataaattttcactgtaacttaccacattgtatcgtgattacttcctgtcatttagtcttcataatcagaatgtaagtctcaaagatagcaactatgtctcactgaacttggtatcccgaatgtctagtccagactttgcatagaataggctcaataaatatttgatcaatgaacgaatgaatgaataaagtgagactccttggagagaagagttcgagtctatggaggatgctgctgcctttattaaccatgtaccctgttayaccaggtttggaacacgtcagttcattgttaagtaaccactatcaaattaaccatgaaaggattaattaggtcatatcttttcttgttagacacaggatacaaatgcaactccttttcttacctaacaagctgaccagaatcttaaactgggaaaccacatggatctggaaaataggaaatcatgagacccaattaaacatttctgacaaggtttagcaaatgttcattcaataacagtaataaaaagggaccayggagcctatccagttacagggatctcactgatttttctgggcactataatttctgtgattatcatttctgcttgtgagagaggatctcaggcacatgatatatgagcagacactcctgcataaatagaaggtcaaagagaagaggattcagagttaataaataacattaccaaagttctagtctgacagggtctcatgtaagtcaaatattcttgtaaggactgccatcactgcttacctgctgaatctttttggagaagttcttattggatttctctagtgtcacttcaaatctgttgcaacctatggaaaasaaataaacaytggtagttccaaatacagggatayatagaaaaaccactactagaaaaatactgctccatactgctctcctatataaatctttggaagttcctgaaagactaaaaatcagagatctaaatagccagctctcttacaagcactataagatgctttcaactctaattttagagcagagcgtttcatgcaccttcactcggcatcagcagaaaggatcacacaaagttcactgaagcggcaaggtactcgtgagtctgaagatcttatcttgcaaaatcagtaccttggcaaagtgttccacaaggaagggtgtaaaaagtaacagtcaaatataagagcccaagccatgaaacccagcccaaagcatccttagatctagaccaactaatttccagcaactattctaactaagttctgtatcacggagacagagcaaacactcaaacccatctccagagctaaagcaattcaatgcgtctacacttactgccgctttcaggtgatgctacatctgctggcactgttacaaaaaaggggaagaaagttatataccataaaaacatgtgaattcagccttgctggggatgacaaaaatattcagcctcaaaagtcaccaatgagtcaaaaagagaataattatcatcatcatcatcagagcagctatcatgaagcaataactacatactgggttckgggtttaaaaatttatatatatttttttctgtaaactcacaactactcccaagaagtaggtattattattccaagctcatatttgaggggcatgaggggtaaagcagttaggtaacagccagtgagggagcctacaagcaaacccaggctgactctaaagcctgtgctctgaacccacgccctgctacctgccttctacttcatggacaggatgctcgcactgctgacctgagttgttccccacagctagctctgcccttgccctctggaaatcagggagactctttggggcagccataagaactcatgccaccaaagctggtcttacttcttccatgtgtccctcagcagaggggatgaagaaagggccctaaagttgcagggagtgtgccctggtattctgctgttacatttcatgagraaaaaaaacaattcagacacttcctacacttgaaagcgtcctattattgcatttaatacttctcttttcttatttttttgttttgttttgttttgtttttttttgagacagagtctcattctgttgcccaggccggagtgcagtagtgcaatctcagctcactgcaacatccacctcccgggttcaagcaattctcgtgccctcagcctctggagtagctgggattacaggcatgtgccaccatgcccggctaatttttgtatttttagtagagacagggtttcaccatgttggccaggctggccttgaactctcgacctcaggtgatccacccacctcggccttccaaagtgctgggattacaggagtgagccactgcccccggcctataattctctttacaaacagwattttctaaggcagagattcttaaacttttttgtctcaaaatcttgataatcttaaaaattactgaggacctcaaagaacttttttgggggttatatacatgaatatttatgttagaaatttaaatacatacatttaaaaacatatatgtatttaaaaataacaataataaccccataagtaagaacccacatctgcttctgcatttaatctgttttgataatttaatttgttttggttgaagtatatgacaaaaaatctgtcctcatatagataacatagttgaaaagggaaaagtactttaatagatttttcagattcttctttgatactacaccaacacttaacaaatgtaatttcttgtaaagcgaaatctcacacctgtcaatgaacttttcattttctgttacgtaaaaaaacattggtctaccttacactttgaatgtattttttactcatacgtgattttaaaactcatgcattagtcatttggaaaatactggttcactgagttatgcagattttccaatccagacctacatttcattataggatgttaaaaaatgacactcattattatcacccccaatctcatcagaaaaaatctttaattatggagaagctgtcacactcaggggagtgaacacaagttttccataattctattttttttcttaaaagctctaactttatcattcacaacaaatactgccagttgtttaccttaaagtaacagattccctttgttcataaaaaaaaaaaaaaaaatgccaaatatctaaatggtctgaaaaaaccacaacctgtcattctttcaaacaaaaataatactccctgaaaaaagtagccagtttagctcgtaactcaatcacataagcatttttcccttgagacagctatcggacttcacaccctagcacacagcagaagtgctttatgtgtacttcccattatatcatatgagattactaaaaagatgtgttgccaaaagtcaaaatacaataaaaataacttgtactgcctaaccaagaacayttttaagtgaaactagctttaaaaaaaaacaaaaacaaaaacaaactggccaggtgtggtggttcacgcctgtaatcccagcactttgggaggccgagaaacctcccaggtgtagatcacctgaggtcaggagttaaagaccagactggccaatatggtgaaatcctgtctctactgaaaatacaaaaattagccaggcatggtggtgggcgcctgtaatcccagttactcaggaggctgaggcatgagaattgcttgaacctgggagggggaggttgcagtgagccgagattatgccattgcattccagcttagaagacaagtgtgaaattccgtctcaaaaaaaagaaaagaaaaaataaataaataaaacccatcacttgaggcaaggagtttggggccaccctgggcaagaagagacamytcatctttacaagaagygaaaaaactatctgggcatgctggtgtgtgccggtagtcctagctgcttgagaggctgaggcgggaggatcgcctgagcctaggrgttataggttgcagtgagtcatgattgcgccactgcactctagtctgagtgacagaatgagaccatctcaaaaaaacaaacaaacaaaacccactgtgagcacatggtgagaattacacaatgaccatcagtacagcttggtaccactgtttttttcgtttttttaaaaaartctctatttgaagttaggtactactgttctgatttgtgttcaggtgctaaccagttttaattaccattccttttgcaccatcattgtaaatgtcaatacagtgaaaaaaaaaaaaaacaaaaaacgaaatgttttagtgtttctgcaaacttggttttgtccttgtaggtcctctgaaaggatcttgaggatccccaggggtctagagaccacattttcagaacactgctctaggatgacagcatgactgaaataaacctagagttgyaaaggcctcagacatgaacaaatctaagccctctcagttcaaaataagagtagactgggctgggcacagtggctcatgcctgtaatcccagcactttgggaggtcgaggcgggcggatcacttgaggtcaggaattccagaccagcctggccaacatggtgaaaccctgtctctaaaatagtacaaaaattaactgggcatgatggcacgcatctgtagtcccggaactttgggaggctgaggtgggcagatcacttgagcccaggaattcaagtccagcctgggcaatctggcgaaaccccatcactacaaaagatacaaaaatggctcagcccaaaatctccttaagctgataagcaacttcagcaaagtctcaggatacaaaatcaatgtgcaaaaaccacaagcattcttatacaccaataacagacaaacagagagccaaatcatgagtgaactcccattcacaattgcttcaaagagaataaaatacctaggaatccaacttacaagggatgtgaagaacctcttcaaggagaactacaaaccactgctcaacgaaataaaagaggacacaaacaaatggaagaacattccatgatcatggataggaagaatcatattgtgaaaatggccatactgcccaaggtaatttagagattcaatgccatcctcatcaagctaccaatgactgtcttcacagaattggaaaaaactactttaaagttcatatgaaaccaaaaaagagcctgcattgccaagtcgatcctaagcaaaaagaacaaagctggaggcgtcacgctgcctgacttcaaactatactacaaggctacagtaaccaaaacagcatggtactggaaccaaaacagagatagagacaaatggaacagaacagaggcctcaaaaataataccacacatctacaaccatctgatctttgacaaacctgacaaaaacaagaaatggggaaaggattccctatttaataaatggtgctcggaaaactggctaggcatatgtagaaagctgaaactggatcccttccttacaccttatacaaaaattaattcaagatggattaaagacttaaatgttagacctaaaaccataaaaaccctagaagaaaacctaggcaataccattcaggacacaggcatgggcaaggacttcatgtctaaaacaccaaaagcaatggcaacaaaagccaaaattgacaaatgggatctaattaaactaaagagcttctgcacagcaaaagaaactaccatcagagtgaacaggcaacctacagaatgggagaacatttttgcaatctactcatctgacaaagggctaatatctagaatctacaaagaaatcaaacttacaagaaaaaaaccaacaaccccatcaaaaagtaggcaaaggatatgaacagacacttctcaaaagaagacatttatgcagccaacagacacatgaaaaaatgctcatcatcatcatcactggccatcagagaaatgcaaatcaaaaccacaatgagataccatctcacaccagttagaatggcgatcattaaaaagtcaggaaacaacaggtgctggagaggatgtagagaaacaggaacgcttttacactgttggtgggactgtaaactagttcaaccattgtggaagacagtgtggcaattcctcaaggatctagaactagaaataccagttgacccagccatcccattactgagtatatacccaaaggattatagatcatgctagtataaagacacatgcacacgtatgtttaatgcagcactgttcacaagagcaaagacttggaaccaacccaaatgtccatcaatgatagactggattaagaaaatgtggcacatatacaccatggaatactatgcagccataaaaaaggatgagttcatgtcctttgtagggacatggatgaagctggaaaccatcattctcagcaaactattgcaaggacaaaaaaaccaaacactgcatgttctcactcataggtgggaattgaacaatgagaacacttggacacaggaaggggaacatcacacactgggggcctgtcgtggggtggggggaggggggagggaaagcattaggagatatacctaacgtaaatgacgagttaatgggtgcagcacaccaacatggcacatgtatacatatgtaacaaacctgcacgttgtgcacttgtaccctagaacttaaagtataattaaaaagagtggaaaaaaaaacctaaaaaaaaaaaaagaaaaaatctaagtaatgctaaaaaaaaaaagatacaaaaatgggttgggcatagtggtgtgtgcctgtggtcccatctacctgggaggctgaggtgggaggatggcttgaacccaggaggttgaggctgcagtgagccaagatagcgccactacactccagcctaggcgacacagcaagaccctgtctcaaaaaataaaggagcagaatgaagcctagagatgtctattgaggaatgtttatactcatattttagaatcaaccagttaaaaacacatttattgaataattactaggctagacatatcagaggataaaaatgtcactggctcaactgagctccagggaaatgactcagatcagatcagagcctacgatccctacccctagtcttttcttgaccctattatcccctccctttcctcagaaagacagtctacccaaagacctatttaggcttgaaatatctcaaatctggaaaccaaattaaccctagaactaattcacacgggcccaggtctatttctggcccacatcaggccagatctgggccagaactaaactgttcaccaagagtatagggaaaaatggcatttcttgaagaaaagtttcaaatcagaatttgatttcctaattgtctatatttaatctacctatggcgaaaccaaggcccaggaacattaactaatttgtcaaaggtgacatgataaaatgatcatagggcaaggaatagtcgccaccagggttccaagccagattaacactaatattaccagttcaggtctatactgtgttgagacttcatttataaagtcttgttttcaatttctgatcaccacttacatgtgaaagcaaagcagagagtcaaaaaacaattgttgaatgctgaataagataagcatttttagctttaaaattaaaatgtgagcttaattttaaaattatagaccaggcaaatatcacagaacgcaaatattttggctccgagaactaaaaaaagaaatttttttttgagacaaagtctgttgctgaggctggagagcaatggtgtgatcatagctcactgcagcctcaacctcctgggctcaagcgatcctctcacctcagcctccagagcagctggaattataagcacgtgccaccacatccagctaattttttgtagacagggtgttgccatgttgcccaggctggcctcgaactcctggcctcaatcattcctcctacttcagtctcccaaagtgctgggattayaggcatgagccacttcacaggccatgagaattaaaaatttaaaacattaaaacaaagatcaacaatgtactgctccagggcctaactgaggcctttgcatgtttttgtaaataaagttttattggaacatagccatacctattcattacatattgcctacagctgctttcatgttacaaaggcagagttaagtagtaacaacactgcaaagcctaaaatatttattctttggaccttttcagaacaagtttgctgaccctgatttagaggacagttgaaaaacttagaaatgaaataaattatctattttgttctctggtttcttttcttaccctgctgcagaaactgaccaggatatcttctctttcccgagtgcactagtaaggtgctttttcccccagtgttacccttgctccaggttccacaagagagctctatttatcttaagctatctcttaagctatttaccagagaaatatatattatattgaagggtatgaaattaactgcagatttctgtagagtggctccagggcataatacctaaacacatctattctccataaagagagcacagaaacgaaaacaaggaagggcagtgaggtactttctgccccaataaaaaacactctttaacagaatacatttcaaatactttagttattactctacattactgacagtcacatttgattagaactttagttttcacagtttcttcgagcytattattgcatccaccccaacaactttgtggggcagagagtttatagaaaactgatgttggaaagaacttgctcacggtcacgcagccagggggaagtgcacatgaaggcaaaccctggtcctctcttcttgttctacccctcataagccaacaagatattttaaatcgatgttgcctaattttttttcctaccaccacaccatatatacaggaagcttatgcccattagtagtatttcttattattggtagtgagtctcaaagaaaagaggaggaaaacaaccacctcctcttttcttagagactcmctaccagtaataagtaattcagtaataagtaaaccagcaattcatcctcacctcccaaatgcaggtagggcaatacaatttggaggagaaaaaccctaggcattctcaagtcttctccccattttcccaccgtgctccctctaaccttcaatctctcttttaatggtccaggaataactgatttcacagttgtatactagctgactattaaaacttatttttttgcatgagcaatgtgcacttaccaacgtccttccgaatcctatagagaagaagatgtccttgtttggttcccacaagaagccattcctctggaaaaacaaaacaaaacaaaammaaaamcaaaaaaaaaccagctttgagaaaggtcaatcagcttgagtataaccctatttttttagctggggcttgtaatcagaaatcaatgtgtcaagaaaatgagttgcttttgataggaggtgttttgcaaagctaagaaatgtttatactcatgtttgaaaatcaaccatttaaaaacacatttattgaataattactaggctagacatatcagaggataaaaatgtcctggctcaattgttttaatgttaaactaataaaaaagatagaagggctttgtatttttaagattaaattattatgatttytattttttgttatatatacttttattaagatatatatcttcagatatatatttttaaattctgctaaaaagaatatgatgaaagtttataaaatcacaaaatggaagtacaaatgtgaaaccaggtatccaacctcagcaataatagctaagaggcatcctttaaatgcttttactttcaggaaaataaatgacgtaacataataagcttacagaattcattatctcaaaagatagtctagtagaaaatatttaataacaagtgttgatgagaatataaagaaattagaatcctcatacactgctggcaggaatgtaaaatgggagagccactttggaaaagtctagcagctcctcaaaaggctaaacagagttaccctgggacccagcaattccactcctggttacacacccaacagaaatgaaaacatattctacacaaaaacttgtacacaaatgttcacagcagtattatctgtaatagctaaaagatggaaacaaaccaaatgtccaccaactgatgaacggataaacaaaatgtggcatgtctatataacrgaatattagctaacaatgaaaagaaaggaagtatggatatatgctacaacacagatgaacctaaaaacatgatgctaactgaaggaagccagacaaaaggccacgtgattccatttatatgaaatgtccagagtaggcaaatccacagaggtagaaagattagcggttgcccagggctggtgggcttgggggaaaatagaaagtaaatactaatgggtactgagtttcttctgaaagtgatgaatatgttctaaaatttattgtgstgatagttgcataactctgtgaatgtactaaaaaccatttaattgtacacttttttttaacttttatttttttaagatagggttctactctgttgcccaggctagagagcagtggtgtgatcatggctcattgcagcctccacctccctagctcaagtgatcctcccacctcagcctcctgagtggcgagaaatacaggcatgcaccaccacgttcagctattttttaaaaaatgtttatagagatgagggctcacaatattgcccaatctggtctccaactcttgaccgcaagcaatgccccttcagcttcccaaagtgttgggattacaggggtgagcgactgtgcccagccaaattgtacattttaaaagatggtctaggctagtggttcttaaactttagtgtatcacaattatttgagagtttgttaaaatacagaatgctaggctctaccccrgagcatctgatttagtaggtttaaaagtaggcccaggaattttcatttctaacaacttcccagatgatgctgatgctggtggttcaaggaccacattttgggaggcactggtctaggtaaaaagaggctcagaaagagtttaaataattaccctgacagacccatattacatcattcaaggaaggtaagcatgtacagatacttccttagctttttgataacataaaggtcactcattcctttcataaactctcttgattcttgacctctgtaaaataaaatcttggataatggtacaaatagataacttttattgagcatgtattgtgttccaggaaatgctaaacgcatctsttatttcactaatcctcacaactatcccttgaagtaagtccttttttcaaatccccattttatagatgaggaagttgaggcctagggaatatataacttttccagagtcacacatgtggcaagcagcagagttgggatcccaaccccaatttgtcttgattcccaaccacatgctgtgatgtacttactaaggcacccatgtcaaaaaaaatgggtgtcagccaaaggttgtctgaatggcagtagttatatttataaaaacaggtcagcacctacattccttatccaaaggatcaatagtatttctccaggatgatgttcttagtcatccagaaaaacagagtgattctattttctttgatttggggtcttaaaggaaaggcaggtcacacacaaaaaaaatgttgaaatcagaaataacagcagctctaatgaaggctggagatttatgctgcagcagaacatgaaaaaataaaagaattcattttgcaatatttgttttgtaaaagatactatatttagaactttatagatatcatgatatcaagcaatttagcaatattaaagttgatttttaggccacccactgatatttcagatataaataaaatgaagtggaaattttttaaaaatccactcataacatacataaaaatctacaaccaaaacaaaaggccaacataatgttcatcatcttccccatccttctctctccactctgtcccccaaatccctgccagttcctgcttttctttatcttttttaatagcctcagcttcctcccaagtcggccagggtctatcaattctacctgtaatggtacctcatgacagcctcctcctatagagtctctctggggacccctgtgacaccttcaactggtctcattcactccatgcattctctcgcatttgctgtcagttatcttagagcagatctctgatgctgtcacactggggcttaaaaaatcctgtgaagctacactaccaaaatatgaagtcaaattcctaaacatgacwttcaagagtctattttccatttttattgaaatgtttcttgccaatagattttttaatttactttttttttttcttgtgaacccaaactaagacatgacaaaacattttaaaaartcaaatgtctaggggccgggcayggaggccgaagtgggcgaatcactggaggtcaggagtttgagactagcctggccaacatggtgaaaccccgtctctactaaaaaatataaaaattaggccgagtgtggttggctcatgcctgtaatcccagcactttggaaggccaaggcgggcagatcacctgaggtcaggagttcaagaccagtctggccaacacagtggaaacccatctctactaaaaatacaaaaaaaattagccaggcatggtggtgtgtgtgcctgtaatcccagctactcaggagactgaggcaagagaactgcatgaaccccggagggagaggctgcagtgagctgagatcgtaccactgcactccagcctgggtgacggggcaggactctgtctcaaaaaaaaaaaaaaaattagccaggtgtgctggtgagcacctgtaatcccaggtactagggaggctgagacaggagaaccacttgaacactggcggcggaggttgcagtgagtggagattgtgcgccattgcactccagcctgggtgacaagtgtgaaattctgcctccaaaaaaaaaattaattaaaaaaataaaatgtctattctactggtcataaaagggaatcaatccgatggattaaattctctgtaaacttttaaatcaacctgattgattacatgtgccattagccagaggacctgtcccatgttgggtcctccactctctaggacacgttatttaacaaagctgtgcatgcacaacacagaggatgacaagcctgcagagcacgcgcagcatgggatggacagtgccttctgagactcaatacagtaacacacaacagaaagtgagacatactaagcaaacacaaaacgcacacataagcaaagcagtatcagccctaaaaaactcctgacggcctaaccctgagccacaaggttggacttaattcctcctgagaaggagggctaggccctattgctcataattaccctaatggagctccttccaacagtgcaatgcagtccaacttcatgtaataaattccatttctggcccaatgctggccactgcagggaccacaaagataagtaagatagtagtcacttcccttcgttgggtaacatggcaaataacagtacttctcatctgggcataagcccccaattagctgcattagaatcacctggacttattaaaaatgcacattcctgggccctgcacatggagattcagattcaatggctttgaagtggtaccctgaaatttacattttaaaatttaatcttgttggctgggcaaagtggctcacgcctgtaatcccagcactttgggaggccgaggtgggcggatcacctcaggtcaggcgtttgagaccagcctggccaacatgacgaaaccccgtctctactaaaactacaaaaataagccaggtatggtggtgggtggcagtaatcctarctactcgggaggctgaggcacgacagtggcttgtacctgggaggcagaggttgcagtgagctgagattgcaccactgcacttcagcctgggcgacagagcgagactcagtctcaaaaaataataatgaaataaaataaaataaaatwaaatwaaattaaattttatttgtttttatgaaacattyatgtagttccaaagctaaaacgacgaaaagtctagtttctatcattgtccattttatcctctcttctcccttctgctatgggcatcattttagtaatttttgacttatctttccattgtttctctggaaaatataggtatgtatgtatatayagacatacagatactcatatatacatgtgaagtctgcattttttacaggctttgaatatacattcaagtttgagaaccaggctctagaagcagacatgatttayaggacatgtgaccttggaaaaatttcttaaattttctaagccttaggtctttcttctgtaaaatggagtcttattttataaaagcctaatacagattagcatttaacaactgcaagctattactattcatattaacattattcattaaatatatatttaatgaatacccattgagtcaggaaatgttttaggtactgcagatatagcaatgcagaraacaaagatactgccctgagggaacttatattctaatgtggagtgagagaggcaataataattaaatatataaaataacagtagatggtgacccatgattagaagataaggctaagaaaacagcacattggtggatgtggcaatctcttttatataggatacacagggaaggttttgctgatttgggtgacatttcagcagagaactgagtgaaatgaggaatgaaccatatatacaaaggcaagtgagtgccaggccaaggaaacagcaaatgtaaaggccctgaggtgggtatgtgctttgtgcattgatggaacaaagaaggctgtgtgggactggtaccagaaaggagtgagaggtaagtacacagaagacagggaagaaaycagggcctgatcatgtcagatgttgccagacagggtgaaaactttggaacttattctagttgtgatgtgataccatgagagggttttgagtagaggatggaatcagatttaggttttcaaagtttcactctacctggtagacaaaaaactgaaaatggcacactggcaaatatagggtgatcaatgagaagactactacagtaattcaggtgacagatgatggtgccttcaagagtagtaatcatcaagatagagagaaatgactggatttcagatttattctaggggtagaacacacaagatttgctgatagatgggatacagtgtaaaacagaatgaaagaagtcaagaacgattccaaagcttttggctttagtcaaagaggtaaatagaaatgccacttgctgagacgtaagatacaggaggacaggcatgtttgaggggagaggaatcaagaacggttttggctatgctactggacatccaaatgaagatgctgaaaaggcagcaggattatacaactttggagtttagaaagaaatcatcctcatcatgttctctcctgatttctatttcccaggagacagagtatgttgtctctaagacatttacacctcaaataytatttggccstgtgtgacctgcctctggaagttcctggacgaactttccatccaaaggcacaatgtagttaaaaaggggtaatgactagaaagagcaataattactgctgctcaaatctggaaataaagcacttttgaagcaggaggcagttaatggcctcttgtaacctaatatgtacctaagcaccttaggaaccaaagagcatttctcctgttcggtgggtgatcaaggaaggccaaaagctacctattgtttcaaaactgtgttcctgaaaaccacaggtgcaaggaatctttactgtgacaaagtggagttggtgagagtctaggagcactatgtgctaatggtccaacaggagatcagagtcaaggattctgacgagctaagtcaagtgtagccacagctgcattaatccctttcagaaacatatgtccttagctgagttgggtaccccctcatccatgttgcaataataggcagcatatgtctctagtattataatctgttcacgtgtatttgtcccccagtgtgtgtcctaggagcacaggcactgtttcttattcatcattgtattactgtcccaagcaaagagaatggcccgtgtagccacctaataagtatatctgatgaagcaatgggggaattaatcctttcatgcagtgtcaggtcttycatttaaaaactttttctcctcctctatttaaatgtttaatgagagcatttaatgacagaaattggttttcttgagatgtctggaggaagtaggattctcctcttaacccaaaggactagaactgcttactgtggaggtatgattttaaagagacccagagctgctaaaggaggaagggtgcacattaacatgaaaattcttcgtgaaagaaccctacagaagaagtcatcaagaactctgcaaggatgactcggtgacactgtgaacagctgacgcacatggtatcagacaccaccaagattccataaggcccatcatggttacctatctagctcagtataagatctgattaagggatctgaatcatctttttatggtccttgatttctaggacctaaacattaagaggaaagttagaaatgatttccttggtctttggcggctggtatcaaaccagtcactcayggataagagcacaatgttcaccgttatccctgaaaccttcatttgtatttcagagcacacaagagatgtctgtcccggccttctgcactagtcaatcccaaaaggactatgctagtttttatgggttaggtttcaagacagtctggaaactcttccgcctacagttaggtaacttggacactttggatataaggtaatcaaccgcttggctagattcaaaggttagctaactacatgagttccctacaggaatgagaaatgaacgaatgatcactaaggggaaaaaaaagcatatggtgttaacttgttcaatgcccccaaaaccagggttgactttcatctagaaaacaacacaaacatctggacaacttcaagcccctggcaggctgagaacttcttactgctttgaccctctaaaatgaagtcttcgtgggaatcaaaatgggccaaagctgagcacaactaaaaaggaaagctcatcctcccactctgcacagagagcaaaagcaaggggaactcccctaaatgactggatcactgggatcacccaagtagccccacagacatcgatgtctatagccggtggtcatctctctgccttctctcatcctaagcccctctcgtgtagcatccaaccgaagcccacacggatggacgcctgtccacttccccggcctcagaaaagatccggaccgctcctgtgctgactccgcctcggccccgcggcccctcggctcaccccaggcagccagacagtcgatttgcagaggcagcttttctaggatcggcactggctcgaaagcgtcgtgcatggcggcaaggggagagttgccaccgccgtctcgcccagagtgttccgggccgggctggggtccggaacgagtctgggctaagggtagaccgggatccggccaggaaccccccggctacaggcccttcaacaacacagccatcgtcaaccccggacttcctgctagttaggcccgcctcttccgcagccgaagtcccgccccttcctcccggtgcactctaaatgaattgttttgttgctgagttgccatcgtcactctggacccatagctactccatcccgagtagccatgggcttaccatagaaggaacaaactcttaatcttagaactgctttaggcagtgggcgtgatggttaaaaactcggcctttggcgtcgacctcagacggagatctaccaattaggaaattagctgtgatttagaaaatttaatatttcgatgccatactttcctaatctgcaaaatttttgtaaatacctgtgacctagtgtcgtgagcgcttagcaacacctgacacccactaagctctcagtaagtggtagctttagtattaccattatatcccaattagtacaagcaccttaccttaatgctttcatggttgttctaggccagtggttctgaaagtggttctagaccagcaacaacagcagtagcagcagcacctgtgaacttgttagaaatgcaaagtttcaggcccattccagttctactgaatctgaaactcgaagggaacagcaacctatgttttaataaaccccaaggtgagtccatgcacttaaaagcttgagaaccaccattttaggttagggttgttcagcgatagcactaccggcatttaggacaggataatttcttgttgggggagggggcatgttctgtacaatgtaagatgtttaacagcatccctaacttccacccaccaaatgccagttatcttccccacagaggtataaaaatgtctcttttccgtatgtcctctgggaggcaaaattaccctgagaaccaccatttgaggccaatgcttttcaaatttaacgtgcatacaaatcacctagagacattgttaaaatgcctcttttgattcagtaggaccagagtaagaccctcagttgagcaccaaaaatctcccagatgttgctggtccctggatcacattttgagtagcaagagtttaggcaagagatgattcactaactcttggaagtcagtgaaataagcctccttttaatttgatgaccacattcctaccaattcaactttccaaagctgtgtcttacatcctaatattcctttaggaaggtgtcatggcttttcctcctataggacctgggacctgtactgtctgcggttaccttagtattccccttgaagacttaaaaaacaacaaagtttgggctgcaagaatgatctatatctggtcatttccccctaggaaaacatcgtaggtcaaaaaattaagcatttgggtttaaagcaaaaatgtaaaagaaaaagggtaagtctgtgatatgaagtcaaaaaaactggtcctggtcattttatttttacacaatatcagtttcttcatatgtaaattaggaatacttgtcccatctttaccaaatgctgttctgataatcaagtgaaaagtactttcaagtagtcaaaaacatgaaaattgctaaacaaatcctgtgttatagctgattttcaccatagaagctgatcaccttcttaaaaatttagaattaccagctgttgtgctggaaggtctagtaccttttcgttcaggcccaaaaccctaaggtttatattgttttacagattactgcaaagctatcaatttcttctgaacctaagaaatgacacactatatctattcccagtaatacagaaagctgtaagtagaattatcagggcccaggctatagaacttgaactatacactcccgcttaacacaatgggcttttttttttcctagtctcaagtcaacatcaaagcagcctaaaaaaataatttgaccaactatcctgctgcattacaactattattcatctgctacgttttaatatgcaatagcagcatgcaacaataccaccagcttttggctaatgacttagcatgagaatatagtcagttcttcagattgctgttcctcagagatacttcctaggaaacttttttaaaaatcaccatagcaaagagttgtagagaaactacctaagggttaacactttcactgcagtatgagttagtgaagattgtggtcatgtggtcattggttttaacagaaaataagacaatctagaataaaagccatagaaagaaatttttcatgagtttgacagaaagagtctttagaaaaagtttgaaaaaaatgagaaaaatacattaattttgttaaatttttttatattaaaaagtggcatgaactttttatgtagaacaaaaatcttgggaaggcaaaattggataaaaccattaaaacagaaatagagtgcttcaaatgaatcccatcaccttgtgatgtcccttattaacagtctctaaaccaataccagataccagaacagtccatcctaaagaacgagcagcagtccagggcctccacgctacttcatgcaataactgtttaaattaagccagcaggacctgtttcctttgtataagctacaacttctgaagcattacagttcctctagcacggtgctcaatcacagcacttggagcacctctctgcataaaggcaaacaaaacattgcctaaggaccctgcaatgccacccttggaggcttacaaaacagtagttaaaagtttcggagtgtgcaccacattgccagcaatgggatgtgtcacaatagcagatgtcaaaagagttaagctaatatttctctttaaagtacatctgaaatagaaaaatctttaatatacaccatttgtaaacaaaattgcacttgattttgcttttttaaatgatctgaatcatactgtaacagtttctcttttttttttttttcttttgatcattgatagaactatggctccttaactcagaagggcccttttttctcaaaacaacctctgcaagatgtaaccttgacttcccaggaaaatgaaaggtagttaacaatttcccccatcacctatgtaactccctaaataaataaaaattacaggcagttgctcctggagattacatattatggtgttgatgacaatcttttagaagacgttaaactttttagtttgtcagatttaaaaaatgaaacattacagaaagttcaggaacaacacacttaagttgcatgaacatccatgtcagagtctgggaggaaagggggcagcagtgttgtaaataagaagctcgtagatttttctcatcttatgaacttgttttcagtaagatgttctctttgttctgacacctctcgccaactccaatgcccaaagatcaaggaacagatcaggatgtcattgcttcctttaatcccatggagccgtacagaagactgacacagatgctgatctcttccctgatggtagccatctttaactgcaaatcttcccattccttactccattttggacctttcaaagtgtgtgatcattcgttcctagggaaaaaaaaaaaggttgaagtatattaggttaaaatgatctatattccaaatatcttctatacagactatccaagcaaacatcttccacgagtactttatgttaattaaatgtttagagaaatggttcctaaacatttgtgaagattttgaacatacagatgtccagacctcacccaagaacaactaaatcaaaagctctaggcttctggacagaaaatcagcactcagaaggaaatgtatagagtcagctaagatcttatgtaaacaaatatttacataagattaggctttaataaaaatgtgtaactcctctaattcaggaatttcacttgaagacccagtgaaggatgagggcaaagacgtgcacctagttagcactttgcactttagaatggttaggagggttgatttgttatgtgttttttactacactttttaaaaatcatgtaaaaaataaaattacatttaatttaatatagtatttacagtatcccatttcaattaaaataattaatgtactacccttaaatttcccttcttaggcaattttataccttagagttaattttcatttttcttttgcttcatttgcgaagtacctctcactattgtatcacaaactgacagaactacaaatcctttttgaatataatcaatcacatcagataatctatagatgtttccctttttcttaaaaatatcctttccgatgctctctgttctccactccatccaagcctggtgcccagctgccaacctgagaatttcttacatcatactgggaatttttcttgtctctgtgttggaccctttatttcctagatcccaagtctttttcctagcttcctcatttttgtggagaacattttcccctactttcttcagaaactgcatatagaacatcaattattttacttcttgtgtgactagaaacatctttattttaccctcataatgatagtttagttgagtacagaattctaggttgaaaatgattttcctcagaattcaaaggctttgttctggctcccaaagatgttgttgaagagccttatgccattttgattcctggtccatcatgtaaattgtttctcctgtaattcatttaaggtctttttcagttttaagggaaaaaaaggccttggagaaagtgatgtcagcaagatgacagaataggaagccctggacactccttccctctacagacacactgattcaataacacatggaaaaattccctttgtgggaaatccagaaaccagttgagggtcttctgcactataggaaagcatgaaaccagctgaatcaaagtcggcagaaaaacctgaggcaccctcttgccataattcttcccttcccatggacccagcacagtaccacatgatagagaggaaaccctcagctcccagcttctttttgcagagggaaggaaatgactggaatgtacatccaacattctgacttttctggaacctgcacgagagactgttttctgtcttgcctgagtccgagagctaaaaacaaagggcccaggttggaagttgctgaaatcaaagtggaagtttggactagcaagcatgagctcactacagccgctcccccagctcagtgcagagtaagcaggtagaatccccaacatccccaaatcctagcttttccctagggaggagagatggactgtgaaaatgttccaactttgtaagaggttacctgagggaatggtttctgtagggaatggtttgaagcacagatgggaccagtatattttaggtgcctggggccagtatgaacaaaaaaagagctgggctatgccactggctccaggagacccatgatacagcagataaacacaaaagggagcaagagattataaattcctggggagggaaaaacccagcaaatccctctgattgggaatacatatgcagaagtccagaaaagacataatacagagtgggttagagaggctatcagaatgattgatgagggtgttctcctgtacaatgccagtccatgaacactggaaaggtaactgtttttttttctaatgcaatgaaaccaacacaaagaattaaggaaaatagagaatcagtgaaacatggcccaaacaaaggaagaagataaatctctggaaaccaaccccagtgaaacagaggtataggaattatttgaaagagaatgcaaaacaactatcatgaagatgttcaacgaactcaggagaacaatgcatgaacaaagtaagaatttcaataaaaatatacaaaacatttttaaaaatatgccaagaaactggataacctagaacaaaatatataattcctagaagtatacaatctaccaagactgaatcatcaaggaatagaaaatccggggggggaacacacaacctggtaagacctacaacaagattccatcagtaatcaaaaacatcccaacaaaaaaacagcccaggaccagatggcttctttagttgagtcctaccaggtacttaaagacaaagtaacactaatccttcttaaacgctttcaaaaaaattaaagacgaaaacatttatttggaag

SEQ ID NO: 98170 - DNA, 297974 bp, Homo sapiens
  misc_feature (1)...(297974): n = A,T,C or G
tatatatatatcaggctatcagttttgtgtgaaggaaagacccacatgacttggtatccatattattaccaatatggatattgactgaagttagctaagccttatcagataccataggttaagaaagttggccgggcgcggtgactcatgcctgtaatcccagcactttgggaggccgaggcgggtggatcacgaggtcaggagatcgagaccatcctggctaacacagttaaaccccgtctctactaaaaatacaaacaattagccgggcgtggtggcgggcacctgtagtcccagctactcgggaggctgaggcaggagaaaggcgtgaacccgggaggtggagcttgcagtgagccgagattgcgccactgcactctagcctgggtgacagagcgagactccatctcaaaaaaaaaaaaaaaaaaaaaaagaaagaaaagaaagttctgtgtatagacaacacagattttaagggattaagtgagaaagatcttaaagaaaacggaataaaaacaacagatttggtgattcaaacagaatagtctttcttctctgaatgggatttttaaaaaggattaattgcccaccaaaccctgttacttgttaaggattaggcaaagtgctggaaatacaaagatgaataagaatattctttccctgcaggatttcactgtctaatgggaagatatatgtactaattagaatacaaggaaactagcaccataacggaggtatgagtctctagctgtgggagggatgagtcctggaaaggcatcatttgtctttcttctggactgatttccaaaggaacatttgctccctacttaaacccaaaatctctctggtgtgtgtttgtattttaatgtttttttcctgtataccctttacccagctttcctaatgttaatgtcaaaactaagaaaataacattggtactacattgcagttgttgtagctccattgtcttcaatctgtgacagttccttagtcttttttgcctttcgggaccttgacacttctaaccatatctggtatttggtcaggtactttctagaacatcttcagtttgtgtgtgacccatattttcccatgagcatactgaggtataggatttgggggaagaagacccatgtcagggggtacttaatgactagtgatgtcaaccttggtcattgcattaaggtgatttctgccaagttttttcactgtaatttattgtttcatcttttataattaataaacattttgagaggatacctgatgttttgactgaagaaattatccagagctgctgcttcccttttttttttttttttttttttttgagactgattctcactctattgcccaggttggagtgcagtggtgcgatctcagctcactgcaagctccgcctcccgggctcaagcgattctcctgcctcagcctccgagtagctgggactacaggggcccgccaccacgcctggctaatttttttgtatttttagtatagagggggtttcatcatgctggttaggctggtcgaactcctgacctcaaatgatccgcccacctcggcctcccaaagtgctgggattacaggcgtgagccaccgcgcccagccaccgccaccctcccctcccccagccccctgttcctttttttttttttttttctttgagacggagtcttgctgtgtcacccaggcgggagtgcagtggcgcgatctcggctcactgaaagcttcgcctcccgggttcatgccattctcctgcctcagcctcccaagtagctgggactacaggcgcccgccaccatgcccggctaattttttgtatttttagtagagatggggtttcaccgtgttagccaggatggtctcgatctcctggcctcgtgatctgcccgcctcggcctcccaaagtgctgggattacaggcgtgagccaccgcgcccggccctctttttttaagtcttactaatggcatagtgttatttaatattcaaaactatagtattatagacctagaaatgagattatgttgatatacagagcatctaaatataaggtctatgtatctatctcttaaatgaataagtcttcaaacccacattttccaagagaaaaaaaaacacaagagaaaatgaagggtatctattgatgtctaacaaacacattgagggtctctcagtacctgatcaatgccccttttgaatttagtaacacagatactctcagaacctatgagtacaataggtgtgaaaagcatataattttagaggtccctctaagagggatgaccacccccattttaatcagaaatttcatttccgtcttttactatagaagtatttgaaagagaacaggtatagaatttctgtttttctactgtttgcagggcaacgtttgctagcaaagctaatgacataccaagactttctcattacaggtaataattaggttatggaaaaatagtagaataatttcttacagaacactagttctgtaagtgttacagttcacaagtcttgctaatgttgccaaatttaatcttgctaaatatcctatttgagaaaaattttagaagcctaccaaaaatactaacagtagttatcccctggggaattcttttggagtcttttacatttttatttacagttctgtatatttgaattttatatattaattatttaccatgaactgttaccatgtttaaattgaaaataaatcacacaagaacaatttcaaattcctatttcaaataaatactaaagctttccaataaagtgaaatgaatggaagaccatattaaatgcaactaaaatggtcgggcgcaggtggctcacgcctctaatccctgcactttgggaggctgaggcgggcggatcacgaggtcagcagttcgagaccagtctggccaacatggtgaaaccccatctctactaaaaatacaaaaaattagctgggcgtggtggtggatgcctataatcccagctattcgggaggctgaggcaggagaattgtttgaaccgagaggcagaggttgcagtaagccgagatcacgccactgcactccagcctgggtgataagagcgaaactccatttcaaaaaaaatcaactaaaaaaatgtttatttactggaatatctgagagacaattataaaggtagttgttctacaacaaaagttttcttaaaaagacgattctaagcttatattagactcaatggataccagagaatgtggtatgttcgatgtttcaccaccacccatataatcagagatttcccattcaggagtttgcggtttaaccaagcaaaggataagaagacatatcttgcatcatttaaaacactgcacaaaataagaagaaaaggagctaagataaaattacatttatattttgtaaaaagtgatttaaaaacttcattgataggagtggcatttcactgaaagtttaaaatactgccatcttttacataattatttggtacctagtaaattagaatatctatacatgaaaaagttaaagggggaaatgtcttttaaaaagaatattatagatactgaagaaaagacatctgtgaggcttatccaggcctcacctaacagcaagaactccttgactcacaattcctcttcaaagaattggcttctccttcaacacctgggccactctccttcccaaacactgactgagaagaacgagggcctgtattctccgttgaattcagagcaagctgtttggtgcataactgcgtaagtaacaccgaattctggcaaattaaataggtaaacatgaacaggatacacgttctattgcaaagtttcccctccccctaaaaagccaatatttaagaaatgttagccttgatgaagtattcagtttttaagatgtgttttctaacatatgatcaccaaaaatgttttatcattataagtatttattcatttttactttagcatttgagttgctatgttctacttaagcttctttcgttttataagtgcccttagataattttgcaacaatgttctgaattaaaaaaaattcaaatacgactgcatttaagtgtctagatagtaaacaaggtaagctttgaaaagatacttttgttcctaagttggaggaaaatgcatttatttgtctagatagtaaacgaggtaagctttgaaaagatacttttgttgctacgttggaggataatgcttgtataaatttatttaacaattaaatactaatggtccctgtttctttttcttttaggctagtcaagtgaagcagcgggagtggagaaagaacaaagaaatctgtaactggttgtgatcaattaattgtaaataccactgccctcagaccagcctctgatttcttaagagatcttttttcttgtgtattaagcttattctgggttcgaaataaggtttgctccatagataatgatgcatatagtggtaataaaaagaaaagtaaatcgacaaatacctagggaaaaacttttaataattctcatgcaatccgtataggcttgtttatttttaagccctggaaagtctcttacacccagtgactgctggtttccaccgcaggacttagaagcttcccaccctgattgcacctgtctcccctttcccctcctgctcccaaagtttcctttctggagggtgaaggcagcattcctcaggagtggattcttcaatccttttcccggctgcccggctccacgtgacagccgctaacacctgtaccgcctccagctcacagcgcccccatcccctccgccaggtaccgactcagccggtctccccctcccccaggaggtcacgatcccggtgcgagtctcgcttgggccggcaggggaggggctgagcaacggccaccgcagcagcctgagcccttgcagcctgattatcacatgacccggcggcagtagccgtggcagcagccgcggcggctccgcgagctcgccgggtgggctcagttcagcgcacgccggagccgagcgcagggggcggggaagggacctgctgcagctgcagccgcctgggcgctcctggagcgcgcggtgactcccccggtcggcccgctccatgcagctccgttgcggaagtgtagcggggggaggcggcggccaccgcggcactaagcacgagaggccggggctcggccccctgcagcactaggctctgggagccgcgcgcggcgcgtcccagtggcccgactcgccgtgcgcccggcgcccaccgcagcctgcatgccccgcgctgcgccttgcccggcccccgccgcctcctgctcgcaccgctgcagccgggcgccggagtaatatgctcactcgagtgaaatctgccgtggccaatttcatgggcggcatcatggctggcagctcaggctccgagcacggcggcggcagctgcggaggctcggacctgcccctgcgtttcccctacgggcggccagagttcctggggctgtctcaggacgaggtggagtgcagcgccgaccacatcgcccgccccatcctcatcctcaaggagactcggcggctgccctgggccactggctacgcagagtgagtgcagcgacaccggcggcgcccctgctctcctcgcggcccttccccgcacggttccagccctcttctctccctgcttctcggcctcagggctctcactagctgccggcgtccaggcctcggcggggagctctttacttacactggccatttccctcttctccccactccctcttcccccagcccaaggacgcggcgtctccagccccggtatgggtggtggaggggtgggtggcagcgctggagcgtgggaaagctaaggtgagacaggtctgtgaatccggggtctctgtcacttggggaaaaaaaacgggcagaaaagctctgaagtttgaaacacataaggaaaatctgctatctgtacccccaccctcccaaaatatagttgacgcccccgcgtgatgaagagtttatgggggtggaggcttggaggagatgtcactgcgcctgggagcttgtgtccgattccgggaggtggccgtgtccgagtgcgtggttgtacatttccgaaggtctcagtttctctcactttcagcccgcgagttcctccgcttctcctttagcaggtagtaaaatgctgcgctttcggtaaatgccagtactatttccctcagcccttggggagggggaaacttattccaactgtctaatataacattttggtaatccgctttggtgattaagcttgcgtttgactgatcagctatttcaggaaccgactgagttaggytgacgacccagagtggaatcgggaaaggagaggtggaggattttattgcccttcccccagctccatggccacttttccactgactattaataaccatcttatgaatggtaagataagtaacgttttcccttctatctactacctcagctgtacgaaacgggaaaactaggagacatttagaatagaattcaaggttattaatgaaccagggagtgcaaaagtgcacgcaaaacctggtggctggcacacctgcgccttttcctttaaccccatcccctcggtagttttggccctcccctatccgtgcacggcctcgctggttgattggttcgtccgggaaccaatcagctcttccaatgcctgggcgccttgatgctgaccctgttctggtggcccggataccccggggcaggcttggttcccgaccctaagggttccggtgggagagactgcttggaatctgctctgcttattatctctaattctcctttccttctcccatcatcctataaagcgtttctccatgggctgaaatggaaaacgtgtataaatggggctagacgattggagtgtgaaagtgaggaggcagaaatgcgctttgatgggagctcagacagtaaaaattaacacatcataaaagatgagcacggaagagaacgttgtgggtggcgaaggtacaaaatagcattgtaacttccaagagaaagccaaagcaaaaataaacacctgtgtaaggaaagacctaaaggagaaaaaagagcctgccaaacataccaaacactatttcttgactgaaataaaaacgttatttaaaagcccatttaggccgggcgcggtggttcacgcctgtaatcgcagcactttgggaggccgaggcgggcggatcacgtgaggtcaggagttcgagaccagcctgaataacatggagaaaccctgtctctactaaaaatacaaaaattagccgggcgtggtggcgcatgcctgtaatcccagctactcgggaggctgaggcgggagaatcgcttgaacccgggaggcagagatggcagtgagccaagatcgcgccattgcactccagcctgggcaacaagagcgaaactccttctcaaaaaaaaaaaaaaaaaaaaaaagcccatttggaccctttacgagacagcaacttggaggcataccctgtggtataattgtgtagatgggggtccttgtgactgccaaacgcctgagatctgtccccactccagtgagtttcccagggcgagggcgcctgtcaaggcgagaaggaaaagcaggcaatggtgagaaagttatgagaggtaggaaagaagatactgaaacactgaaggtggaagccgtttggacacagtaaaaggaaagcctcagataagcatgagggaaaggaaagaacgaatttcagagtgtttgcatgcctatggtaggcacaggatgcaatgagacacgcatgagagagtgcttagagggctccccccatcctctctgggcctccatttccgcatccctaaaaagttaatttttttttcctagaataaaacrtgagagatattcaacttgaagcctaggaaggccactgtaaaatgttayaaattttaaagttagtggcaaaaataatacatgtgtgataattcaagcaaagacctatttaaaaaaaaaaaaaaaaagtcagcccctcttccccagccctcacctactccctaggagtaatgagggttcaatgtttgggtgatatttggctttcagacttctttggatgccctcataaatacatatcatgcgtttcttttttcttctcaaaatagactcatactaagcatattattctgtagcattttcacaaaacactatgtcattaacagtattcataagtaaacacagaattacctcattcttcttaaatatatactattggtaatggctaacatagttaatgcttactctttagtgcttatactgttttatatcatctgattttcataaaagcctaatgaggtaggcactatcatttccatattatagttgagaatacagaagcactgagtgattaagcaacttgcccagggtcaagcctgtgtgtgaacccaggcagtctgactccagagctcgcaacaccaaactcgttctctacagtagattaaattatgatgtattcatctgtacccaggaatagccactaaagtcttggccatctctctcttctcacctttaaccctgtcagataatatactgtaccgcttccttatatcttgaactgttagtttatcttcctgcaaaaatgcatcctgaatgatcaaaatggctgaaatagggaaggaaagagaaagacaagtagggactgtggctgtgatcagaagctgccaccagtaatgctgccctttcctacaggatttactgggagaagaaattctgttctctttgtactagaaggtacctgagaggggttgaataggtaggaagattgctcaaattgtggtgataagaactgtactaaggagctaatgcctgaatcagaagtgatctgtttacctctctagaaagtgagtcacgttccaagccttccttgggaggaaaaattgacatcttttggtcaatgagttaatgttgatgactgaccctttgagatggtagaaaaattaaggagaaatggtctaatcttttgccacttactgttaatccctttcaagaagagagactctataggctatagaactagagaattagccgtaagcaatccctgctagacttgaggttgcagaaactgaagattttcgttcatttcagtattcattggcattgtcctagatggaatttcccagctcttgaaaagcttcctattacagctgaaaagtttagccacttggctaaggggtatttgcaaggttgtaaagctctgtaaagcattgtagttatagataacatctactaagctaaaatctttctaaaaacatgcattagcaagttttaagtttggctttgaaatcagtggctgagcctgtttggtttgctcatttgataaagcccttggggagcaacagtctgacccagagaccaggcggcagctacttcctttctctcaaataccacccaagtggaggttggttcatttttataatgggttgggaacccattttggctttttttctttttttacctgtttgcccratttttatcctgttgatgaaacagttggtcttagagatgccagcaggcatggaatttgtgcctgaaactacagacgtagggaatgccaaagaatgtgttgtggttttgagcaacaatattgtgtatgttaatgcatcatattcaggtttttatcagtgatacatttgtttacttgtacagaaagaatacattaagtatagctaattttacttcggttatagctataactataaattttttttcctatttcttataaaagtacccctggacataagtagaaacaaaagctactttgagagtgtctgttaaatgtatatcatataagtgtatgtctcacagagttgaaaattatgaaatttttgatggaataaccttatttaaatccagccagctgcctacaggtatttggatttgttttggactctgcaggctgtctgtctccttggtcattggcactaattgcttattaccaataaatggcattagttggctgggtggtggtgaagacacaaaaaccgctatttctttcttgccccaaagctcggaaatcccctggcctttctttttcccttctaacttttcctggcatacctgcccctcttactgactgatacctctttgcagaactcctgcttggaaacttcctgtttgacttttgcaactgaagaaacttgaggttctctactcttatgtaaggataaaaaggagtgggtgagggtatctgcagatgagttacaagtccagagtagcctgagctatttcagctacctttctggtgacttgcaaaaggtattaatttcctattttaaagcagacagctaagcgttccttcatatttcagatatagcattataaagaaatcatcccccttaggtggagctcctggggatgtctcttttcttaggaaaatgcatcagcttctttcaaggactggtgatgcttcaggcaaagggtttaaccatgcaggggggtgtttactatatgtttcagtcccagtttaggtagacatccgcatctctgctatgaccccactatacagtgctttyaattaaggttacagcagtactagttgaaaatgtaaaactgcatactggaattgttgtctaaaaatacattaatgttcaagagttatttttaattctcaatgtttggtagaaataaactctggtgcctttatagttctgtgatttgcctaatttaaagggaggattagttagcttgtccccttgaatttttgctatcatttttcaggaaataatcattcatctgcttccattatttctctcaattgatgaaatcattgcactcctactatgtgtccagcattggtcccatgctggattcataatataataagacatagtcattatcctcaagaaaattttatagcataatctttccccttttgtactttctttgaaattaaattaaaatgaaatagactattaaggttcaaagggaccagcaccaggagttttgttttgattttaatgtcttaatgcttctgggtaattttaaatctcagtatttggagcctttaagtcacattagggaagcaaacttgttttttccaaccagcttatgattagctttgtacctgaaggcccaagaccttccctgctgttagagaaaaaaaattattctgacacttrttacaatgctggggaagactttactcaagtctgttgcaatataggaaaacaacccagctcaataccacgttgacagctggtacttgtaggcaaagagtagagtgtgaggggtcagtggaatggaaagttactcagcggggacattaaaccaaactcaactgacctagcaggattcttgctgaaagcagaccaaagacttgtaacatcaaaggtggggaatgaggaacttgagcaggtatcaagtttgggggattcttgctaacctgacttaacaggattcttgcttaaggaacaggattggcgccaacgttgtgacttagtagagaagagaggcctgactcaagtttggtggaggagagaatctttgtcatccttgcagatgggggagaagggggagagagtaggtgggactgcagttatttaactgtgattttcattctgacttatctgcattacttctgtgaccctccataattgactgtgtttcctactgaycatgtaaggagagcagatgcccttaattatggtgcaaaagatgcaggattgaacctaattatacaacataatgttatggcaaagagttgaggagcctttcccaagttgtttttttagataagtggttttcactagctttccagtttggtactacagtagatactttgcaaattattagcttaagaayggtatagcatttgatttgtttggcccatctcccatataccatatagtgataggattatccctatttatactttattagaggcattaaaaattgctaaatgcaatagtcatttgttgagctagtcctgtgtgtaggttctctattaagcactttatgtataaggatttaatgagatgaatgcaacgtaggtaagttatttgttcaaagtaacaaagctttttaagtggcagatcttggattcatatccagttctgtggaacgcctacctttggtggtttttcactgtgtctaatgaaatacttaaaacatttttaaccatgagatactcattataggaaattcagataatatagactagtaaaagatatgaagaacagagtgaaaaatgtttgttaattcattagccactgttagtattttagatttggtctctcagattttttatataggtatttttttaaaaaaaataaaagctgatcatatgtttacatgtcttataacatgtctccttcacttaagaatataaaatggtcccctcttcaacgtatattattttcttttttctttttcttttctttttttttttttgagacggagtttcgctcttgttgcccaggctggagtgcagtggtacgatctcggcttactgcaacctctgcctcctgggttcaagtgattctcctgcctcagcctcctgagaagctgggattacaggcgcccaccaccacacccaggtaatttttttgtatttttagtagagatgaggtttcctcatgttggccacactggtcttaaactcctgacctcaggtgatccacctgcctcagcctcccaaaatgtagggatgacaggcgtgagccaccgcacccggcctccaacatatattcttatatgtcgactgcctaatattccattgaagggcttcccattcatgaatctcccattgaacatttagrtttacttttaggcttttagtgaatatcttcatatgttttcttcagctcattcagttgtttccttatgattaatttctagacatggaaagcttggttagaagctatgcacattcacaactgtgatacatatcagattggttgtatcaattcacactgcagccagcagtgtctaccactttagtattaagcctttaatatttgtcagtgatctgatagatgaaatatacttcattgtaatctgtttgattattgaagaaaatgaataaacagatgtatatacttatatgtyatagatatttattagccatttaaatatctttttgttgttgttgttgttttttgagacagagtcttgctctgtcctgcaggctggagtgcaatggcacaatcttggctcactgcaacctccgcctcccgggtgcaagcagttctcctgcctctgcctcctgagtagctgggattacaggcatgcgccaccatgcctggctaattttgtatttttagtacagatggggtttctccatgttggtcaggctggtctcaagctcccaacctcaggtgatccgcccacctcggcctcccaaagtgctgggattacaggagtgagccaccrcacctgacccatttagagatctttttacggttttcctgtttatattcatttttctgttgagataatgtttcatatttataagagctctttatattttaaggctgttcacccttggcctattatgttktgatattttttctaacatgttcattttttaacttcattttttttctttgcaatgcaaaatttaatatttgggtggtcatacctaatctcctctatggcttctatttcatatcaggcttagaacatgtaaagtactagaataaccatcctactccttttagctacttactgcccttggttgcaactcatagaaatgcctttgagctaactttggggtggtggggggaaggaaatggtgattagataccaactgtcttatagaacccaagtataggaataacttggattttacaagggactggaaccctgaactagaaagctattcagcaacaaagtggccattctttcagtctttcaccagggcacgggtgacttctccatgccaccaacaagcaaccagaccacatcaactgtggcttcaattccaattttgaatttttgggagagagactccaatwggttcagtttgtctcagatgtccaccttctccacaggtgattatggctgccaggacccacccctgaaaatgggcagttctttaaaaaggaggtggtggtagttagggctgggcagatagtttcgaagattctactactatagataactcagtcaacaaatatttgagtaccttatttgtttcaggcacatattagaagacagatgaaatgaccaaatagacaaatgtgtcaacaggcaaatagtgtttgtgtctgaatgtgcctgctgccctgccttgcagaccttggggagctgtctaggctaggaattcaaaactgccccaaaaatgccatagaagggataaagactcaggccagctttggaactaratatggctatatggcttgaaggtttgtaccaataaatgagtattacatgttaatataagatgatgtagctcttcagccacaggggtataaacctggctagcatgacacaccagagctctgctcattgttgtttgttcatttgtttgtttttttgagatagtctcgctctgtcacccaggttgaagtgcagtggcacaatcttggctcactacaacacctgcctccccagttccagcaattctcatgcctcagcctccygagtagctatgactacaggcacatgccaccacgcctggctaatttttgtatttttagtagggacgagtttcctcatgttgcccaggctggtcttgaactcctggcctcaagtaatgcacccaccttggcctcccaaaatgctgggattgcaggtgtgagtcactgtaccccacctgctccctgttattttatttcttttgctcatctcatttgtctaggcaggtagggtaatgacagacatatttggtgaatggatgtttattttataaaacaaaagttcaacttctatagtttccccttttttaattagtctaagatatttacctttttccctttattagacatggttttaatttgatattcatctatttatattatttttgtagtttaaatgcaggtttattgagtgcatttcctttttttgagacagagtcgaatcttgctctgtcgctcaggctggagtgcagtggtgtgatccaggttcaaygcagcctctgcctcctgggttcaagcgattcctgtgcctctgcctccctagtagctgcgaccacaggcatgcgccaccacacctggctaattttttgtatttttggtagagatggggttttgccatgttggctaggctggtctcgaactcctgggctcaagtgatccacctgcctttgcctcccaaagcgctgggagtgcaggcgtgagccaccacacccggctaattgcatttcttcaatcagttgaaatctcacgttttgtagtctgctacttgtattgttatcaaatgtcatctcgggtttccctgaatattagcttacaaagaaaatgtattctgttttttcacaatattctacataaaattctgtgccggccatttggctatgagaaaagcttagaaaaaataagaccagtggatgatagtctcgaatgtagtaaattcgcatctccttatgcacttgkattatgtcactgttcacctatgtttgtgcaagcatggctgaaggactaacatcaaaattcagaaactggtttctgtaagaaatttrmtctaaatgctgagctgacagagattatgttcagaagaccagtggcagcactgaaaagtcagccatgtgggtgattcttacaagaggcttccatccctgtatgtgtaacctgggatttgttccttggataggcatcccacctatgattaagtgagtcacctttttaaccctttgagttggtgaactgcctacagttgtcgagttggctactgccccccccactctgggcctcagtttcgtcttacaaaatggggtcattgaactgcattggtagttctcagaatttttattttattctgtaaccttttatcatttcagaaatattgagaagactgacatgaggttattaactttattttgtcaagtgtggacataatcaaatctgtcatctaccatcaccagtgtttcatgaaataaaggatttttaaaaccagaagcatagaggcatataacctcagcaaaacaacagtttttaaatcaaatstagttttatgaaaatattgtttctatttttctaaattttcatggactcataaaaccatgtatttaacctgccctagaggattgccaatgccctttggggttctaaactctgtgagttcctggggttgggccaggaaccaagtgtcttgccctcagggctgaggtttttcacagtggggcctgctgcctcctttattttgattataactcggaattattttctcccccagcattttactatgaaaattttcggccaggctcagtggctcatgccagtaatcccagcactttgggagaccgaggtgggcgaatcacctgaggtcaggagctcgagaccagcttggccgatgtggtgaaacctcgtcactacttaaaatacaaaaattagccagacttggtggtacacacctgtaatcccagctactcgagaggctgaggcaggagaatcrcttgaacccgggaggcagaggttgcagtgagccgagatcsckccattgcactccagcctgggggccaagagggagactttgtcttgttaaagaaaaaacaaaaaaagaaaaaaaaattttcaaatgtgcagaaaagttgaaaccaktgtagacttaayacccatatgactgccatctagattctgtaattcacattttgttagatttgctttatcatttatctgtgtgtgtacccatttctgtgtccatccatcagtccattcttgagttatctctaagcttgtttttcctttagtgcagtggccttaatttatgcttttaagttcttttccatagaaaaatwaaaaaataagtttgagtgactttgacatcctcagttgagaaaaacagcagcaattgggtccttgtgcatggaagggccacctcagacttcagttttataacattggcccctgcaaatgctcactcagttgataagcttcccataacttagcatccacatagttgagcttcacatggggtcaaactggaaagtatctctttgctatgctcccatttaattaaattaggaaatctgcctaaaacttgaatcactcctcttttcagctggtggccaggcaggaatgctccctgaagagtactctttcaatagacttcagaatgtgttacctgaaaagtgctcatgatgaatcaagacatcactgtgttttccatacttctgaaktagagattgtccactaacagcttagggaaagcagagtacccgctcagctgctctttttctggtgtggtcagaccagctgggtcctctgaaacatgaatccatagtgcttcctttgttatactatttctgactcmgttttctctaaacggctgtaaaatttaactgcctagctgtattttctttctgtggactttatgctctcatatttaggagaaagaataagagaacaccaacttacatctctgtagctctggatgattattaaggccctggtctaatgcttaaaggtaagcatctgttatctatattcaataaaagaggaaaatgaaccccagagagaaatcaagttactttagaatcgcaggctgtcccatgaccctggtgaccatcactgaattattaaacctgaccattcattgtgtgaaattattaaaaaaaaaaaaaagacatcctatccccataaacaaaatgccacataagggaattaaatgcattttattaactcaaaggaaactaattttcaagaggctttacatkgaataaaggcatgttggcacatcaagttttgtataaaaggatacatttaacagtactttaaaatagttctattgagtatagtagtctcttaaaattatacttccttactatatgtgcgttcctaagtataacagtccaaaccttgtcaaaattactatatttttggactacaactgctattttaaaatattttaatgtttttggaaagcctgtatgtcttaaaaaccaatctgtacattttatgtagtgatgtttcttttttctaaagttaataaatacagcatgtgttttaacatcagtagctacttagaagtaaggaaatgtacttaggaattctgaataatggggcttaaatygtaagtgaggttttatgtgagtcccctgtaaaatttaatttgggagatttttttacctaagttttacttaagcagagtcaagttttttgtttgcttgtttgtcttagagatggcgtctcactgtgttgccctggctggagtgcaatagctgttcacaggcacaatcatatcaccctatgggctcaagtgatcttcccacctgaacctcccaggcagcagggaattgtgagtgggcaccaccacacttgcttcagagtcaagttttaatgggaatctttcaagttagtgaactttggggccaaaaagtgtgacagcattcagtgtagcatttatacctttgtctttggcagcatggtctcttgcggtggccatcttgagtgtgtgcatctacattgctggcttgcacaagccaggcctaatggagccttgctggatgcatggtgtaattaatcatcccagggatgtgggcagacagatcaattacttgcccagctgagaggaccaaagtggcttgtgtgctctactgtactttcagggagttgataaatagacatttaagctattaaaaaatggtgcatctttaccctgtgatcttttttgtataagtataggaaggaaaaaaatcttgtgataaattgattttttttaaaatgaaaatatkaacgggcgtggtggctcatgcctgtaatcctaggactttgggaggccgaggcgggcgggtggatcacctgagatcaggagtttgagaccagcctggccaacatggcaaaaccccatctctactaaaaatacaaaaactagctgggtgtggtagcaggtgcctgtaatcccagctacttgggaggctgaggcaggagaattgcttgaacccgggaagtggaggttgcagtgaatcaggatcactctactccactccagcctgggcgacagagtgagactctgtctcaatacataaataaataaataaatwaattaattacataaaaatgctatagattattgagtttctatatttaagtggtctgctatggtgtactaatagtcattatatgcctttttgaaaaggtgaatgttgacaaattatgttacacgcagtcagtaaaaataaaagatggagtgtaaatgttcagtaggaagcaaattgtaaggtacagtgactatgaatagcctataagagggtgccagtgaaagcaggaatgggaaaccaaactgacattaataaagaagggactattaagaattttttctttcttttttttttttttgatgccgggtgccatggctcatgcctataatcccagcactttgggaggccaatgcaggtggatcacttgagattaggagttcaagaccagcctgagcaacatagcaagacccagtctccacaaaaaaaaaaaaamaaacctcattcaggtgcacctgtggtaccagctacttgggaggctgaggtgggaggatcacctgaactaggcaggtcaaggctgcagtgagctgtgatcacactaccacactccagcttgggtgacagagtgagaccctgtctcaacaacaaaaaaaagcaattttaaaaagaggattttttgtaacataaaagaggaaatagctataatattttgttgtaaataagtaaccgaggaggatggactctaaaagatacatttgggacaaacagtaattttatcagccttttaggacagtgtttccccataaggtatggtttggagtggagccaaagagtgcgattagatgccctcttggcaattctccctgtgattattaacaatgaggctatgccacagaggaccatgctgctctgttgttagaaccaggtgtccagaactgggctggtgactcagtgcagcagcaaatgggaagaagagaagaattggcaactctgactacagcagctggtgtttatttatgtatttttttttaatcttggtgttcagctgggaatcacatgggccccatacttgaagccctgcctgtcctcttctccccattcccctgtcatcagtttagtgctgacagagactacctggccacgctgcccttttgccccttgcacaccacctgaagccttgccacctgccttgccatcctcagagggaccaccagatgtgatttgtatctggttctgggctccatgaggacttgtgctgtaaattcctcaagtcctggttcccaaccttctcaacatcatgagcccttttattatttcattttcttggatgaattccttgtgaaaaattttgtccagcaagctgtattaaataagcattaaattactyctattaaaaaaaattaaccagatacatcatatctcctaatcatgaaggtgtagtgaaaatcatattgaactgataacatttcagccaaaagcaaaggattaacctttgttaaccttgagtacttcttgcccacaatgttagtcattagcttctcccccagcccccaccccscaacatttaaaacaggttagatctcctatttctacctttccaggtcttcaaggagcctggaccacaggctaggactctctgctcacaggtttggattttttatcacctgagttaccaacaaactatactcagatgagtgtcaagatcattttgtttgggtttcagaagtgtagcmccttcctcagraacactattttaacgtccctgatgtcctctttcttgttgaaaaacagtcttttaatagttttattttcttgcyttccaaagtgctacaagttgcccgagaggcacaatgcatgtcagctgcaagtttaattaaactcatgctgagactattatttttctagcagagtttgaccctttggcaaaagtttctcttgtaaaaatttctatctccactgactgtggatgagaagaacttcaaattatctttagatgtttactaacctgtcaaagtggaggaaggcattggttagtcaggaacttasaacataaactatccatatattctatcacctgtaattagcttcgattgataatttgtgtgcacctattagtacatatctattttccaactgcgataattctacatactgatgagttttttcacttcaaatggagtcactgtcttcccatgtaaacaaatattttactctatcatttttaatagctgcattgtattctatttatggttgtaacacacattttttttccttgatgttagccaagtttttactattgaaagcagtcctgggatgaacctccttgtaggtaaatctttgctaagctataatttgaaaagtgacatttttctgggaaaaatactcaaaatggactttcctaatatttcttgtgacattatttaatagttagaaaagatcaatgtttagattgaaaattgttttgggaagtgttagctatatactttaatgtactttaccaaagtagtgttttggtgagctggacatactgattaaaaagcattattgcttcacyttaatatttaggtttcaattgcccctattttggtaccatcatgcatttactgtatgcttcacatgtcttaagaggcaaaagatacagaggttttaaccttgggaggctcacactcttcttgggaaaataagttaatgaaaaattgagaacccatgcacagcatgacagaggagtagcatggtgctggggtggcaccatgatcaataacttgaaggggcagcttgaggtagtcttggctctttcyctagccagtctgtggcttcagcaagcagcctcactttttaaatcctcagtttgcatattcataaagttaggtcatcgacttagcccttcccagctgtacagtgctgtgggagtaagtgtcataagagaagttgggtacttcttaatttctactgacttttcagtgggatatttgtatacaytacaaattaacattttttcatctgccttgtctgctttatcttaaaatctctgaatatgcattttaacaaaaagtggaagtgaattgaaaatctagttacatttgattttatgaaacaaatgtctaaatctaacagcacgaaaaaccaagtatggtgtagtggaaactaatccccttgcttagaggacagtatcctgctctccccaccctttacagcatgaagaatgagcaccaagcacaggttataatatcgtctccagaaaaaaaaatcaaaaaataaaaataaacttcagtagcctatcctgaattaaaagagactaaatgtttaggcttttctcccctaattcttttaaagtaatgtgatatgttactatattgtccagaaaggatgatttgaaatatttgcctggaagggggatatgcttcaaaatcttatcagtgaagcaaacaaaatcatggtggtgatgacaagcttttccttccactttggaatgtccattttgagacatggttctgttacagccaaattataatttgtaaggtatgtagatatctaattagggtcgactaaaagttgaaaaaatgtaaaattgaaagctcttactgacccttccaggaaaaaaagaaatgaagatcacnactagatctgatttcagccttttcatttagccccaagttgtctgtaggtgggtgacctgaggacatctacatggctgtcagaattgtgctgccacttggcacagagctaatgttctcccactttggccgttaaattgccgcagaaagcagctgcacttgatgtaattttaatcaatactttgtacttatacgtggccctgcagccacgtgtcactgtactgctctcagcatctctgacctgagtaaaggacgcagaggcttgcttgaggtttggttttgaaaattcacataagtcaaattatattttaaaagcaccaggaagcttgctttgtgacctatgtcagtgcaagacattttcataatgttcagaatggtactgttaatcagtattggttctttgtaagttgaactttcacatgctaccttttttttttttttttaagtagagggtaactagtggtctgttcatttcagatgttaagcgaccgacagctagcatcaatagctccttgaaggtcatcagggttaagtggctaaggatgaatgactgggactctgcctacatcagcttcctccctaatgtgcttttgaatattcttcaaggattgatttattacttttcagtaactccatttataccagaactgcttcagcatccatttctatagtagagttcttctgatttaagtacaattcatttaaaacagtatgctcaagtaatttttttgtcaccaaaaaaaaaaatactcttggtgtttgcacttaagtacatatcttttcctgagatatatttatttttactatatctcaaagcagtgatttacctcatcagtaaagccagttttgcagctctgttaggaatctaaatagtttattctattcagtaaatatcattggttaggtacttatagacttaaagatgaaccatctctacctaacattcacacttttcagactatattatgagacagataccaaaacagaagatgtttagattgtgttatgttattaaatggtttgatagttaagattgtttattaaagaagatgatgtatgatcaacaatgcccatatttagcaagccatattagttacaagtaaaacttaagactatttcagctcggttgacagaaaaccattcagttaactcagttttcagtcagctaacatttattaaacctcctcatggagtgtaaggaaggctctgaaggttaaaaaatatattttctattttcaaggggctcacaagttagcaggggagacattgtgtgtataactataatataataagctactgtgatgaaggcattgatcacatgtgctgggaacccagcaaatgggcacaggctggttaattctaagtttggagaaaatgggaaggggtgagcaaagctgactgactgttcgaaccctggaagaacaggttttgtgtagaggaggcacatgagggagacagcagcatgaggaaggtcatgacggtttgaaagcggctatttctgggaattagaaaaatcttttgtgactatttgtaggcctgtcagaatccccacgtggagcctgaaccacctgacactagacatacaatggttcttccttcttacagaaagagtgggtgctggtaacatttgactgctctttaggtctgccaggcatgtcctctggaacctctctgtaggattggtgattcccttcaatcatgtctgaatgatgcctctgtatttaggactcttgctgggctgctcttgggtacgcctgtatgcaatgtatccaggattgaaggggaagtgggagggactttccttctcaggtaaaacctgggatttgtcatggatggaggtcccaggtgaattcactaaggaccacaatttttgctacagaaaaggtaataatccctcatttgctggtttgatcacctggaygtttcctgcacaaactctgctgcagctgtgcccaaagccctccaaccattcctgattgaaccacgcagggagcagagccagtgctggagcagacagcagaactcctgaaggtcgcgcgtgaggcagagggctgcaggcgctgcaggcactcaccacatatgccaagaaataaagagccactgaaaccctaagccaagtttcttttgtcctgagatttctaactcattgcagttaaaaatcatccaagtaagagtccagaaggcactaactcttaacaacaacaacaaaaaacaaaaactgcatagaggcagggacagggctsaagaggtaggtttgcataagattgtgaacgcccttgtatgtcatcaaaaggaactttatttacatcataagcagtgagcagccacaaagaattttttttagtaagcaagtattgggaatgacatgaggtttatgtttgggaaaagtagcagatatgggagtgaaacagatgaagggtgaagtacaatggtgagttggagaagaggccttgttggaggctttctagatagtaaagctaatagattgtgggactgtttgggaataaggaagagagatgttagcgacatctagcgcatacccttctttctccgtgtgggcacatgggaggcttacacttctctgctccctttgtaggtagatgagtccatgtgactmgttctggccagtatatttgagcataaatgaagtgtcacttctaggctgatgcatataattgtcattggaagaccttccagtattgtcttcctcttgaatgataatggagaaggctaaatgttaacactccacacagcacgcttgtgtcttccatttctttcatttgttgtcctagcgtcctgtgtctttaaccctccatcaccttccctctcccacagatgtgctaagtcattgctattgggtaaaacaacacacttccttttccaggctgcatcaccccttcaagttactgtgtgtactattgctccctttttaagaaaatcttcccctccttgtcttagtttgtgttgctgtwaaggaataccaaaggctaggtaatttctaaagaaaaaacatttatttggctcatgattcttctggctggaagattgggcatctggcgaaagcctctggctgcttccactcatggttgaaggcaaaggacagccagcatgtgcagaggtcacatggcaagagaggaaaggaggtgccaagctccttawaacaaccagctctcaggaactaatagagtcagaactcactcattgccatgaagatgcaccaagccattcttgagagatttgactccgtgacccaaacacctcccactaggctccaatttcaacattggggatcagatttcaacctgagacttggtggggacaaaccaaactacagcactcctttatttccttccttatagaaatgtatattgggccaggcatggttgctcaygcctgtaatcccagcactttgggaggctgaggccagcgggtcacttgaggtcagaagttcgagaccagcctggccaacatggtaaaatcccatctctactaaaaatacaaagttagccaggcatggtggcgcatgcgtataatcccagctactcaggaggctggggcaggagaatcgcttgaacccgggaggcggaggttgcagtgagccgagattaaaccactgcacgccagcctggacaactgagtgaggctctgtcccaccaaaaaagaaccccccaaaaaaccagtatattgaatgcttactttgtcaaaaacttgtctgggtgccaagtacacaaagacaagacaaacctcttttcctgaagttgtctagcaggagtcccatccagccgaacaagccactgtaggaagscttccccaggacatgagtcrggagctgaaccataaagcagccagccagacagtggagagctggaaaggaaagcgagtgtgggtgcatggaagggcagrgtaggatgcgcctgggaaactgtggggtgctctccatgcattgcttccacttcagtgctacttaggaaaacgctcacctgtagtgaccttctaggtgcagatggtcactttgaaaatgtgcgcatcttccacatcctcaccgcaacagtaattgtcgctgctcactctctagtccacgaagtcttttatcctgtaacttctggggactccttcaggttctttttctagttttctcaccacattcccttttcttctcaaatctcccttaaatactgatgttccccaagctttctagaacatttcctccctttcttccccatcttcattaacaattttatccatatcactttctttggaacttgaagaatttacctatagccttgcttctcccttargctctccatggggtcccttctgctgtgatctttccttcactctgcctgcccataccatatgctttgcatgagcctgcatttatatttgttcaaaatgtgagtataaattatagtagcygtaaaggacatggtggatactccgtgcctgtggaatcatctacaaactaatggtttttgacagtgccaggtggaagcagttggataatgctgaggcttcactgtgtcaatacctaggaacagctggggaacaaatctgcttttagtttctagagctacgtcagtctgttaataaaattctcttgtaggtactctgggagtatggatatgttcccttgtccaattacattgtggtggattctttttttggttaattgccctgtagtgagttaatacctgcgtttgtcttattagctttgaaaaacaaaaaacagattgagtctgtatattgattcagacttaccttctgggatrtcatagtagaaggttaactactcttgtacattctgtacatttctgccaaatctcgtgtgatggccattaagatgctgctcaccaattctcaacttcaagtctcctcctsctgggcacactgctcttcccctcctattccttctgcctcagcaaggggtgaccctccagattgtggaagccctgtccttcctgagagaagagacacggagccaacctgaaatggacgcgtagagtgaatgaaaaataaacmtctgttactgccaccataatgtagcccgcaagttttatcagtacttagaaaagtaaagttaatggttgtttggggaatgaaggtggttctagattttactgtcctaggcagtaagttgggactgtgaagaaataattttttctgctaaatgaatrttgttagcttcataagtagtttttcactatgttatctgaatttctaattagagtcctttcatataatcaccacttttttgcgttgtaggctcaagagtattgtgaaatggatgccatctttttctkttttaattgaaagggggaaacaggtgagttcctcaaagatttaataaggaatatcagcaaatgttgccaactgttgtgaagactctgggatttaacaagaaccaagacaagacctgaggctttgagaattaaatctagcaaaggagataagcaacctaaggatcaggmgataaggggtgtcattggagtacacatgtgtgagggacaggatgagagggctamcyaaccagtgttctggtttgggggaagttttcttggggagatgacagtggttcatttcttcaaacaaaatttgttagacatctrtcctactttgtgacaggtgatggagtagatgatgggcatgcagtagagggaaagcgtggtgcctgcccttgcagagtgcacaggcaaagctaggacctgaaggatgagtgattagcaggaatcagccaacccattctctgaaagtagaaactgatgtgcaaagrctcagaaataagtaaatgctggggttgaaagatgaggctcaagaggagctggggactggaggatgggtgccctcacacactgtaagatctccaaacggacttgtcaggtaatgctgactcgtacatttaggtaattaaggtcagtaaatgaattgtacaagataacaaacatatttcttggaaatctgatatgcaagaaaaactaacagttttgagctctacctttaayttaaaaatgtgttaaagtaaaaattgccttttgggacattaaggagaacttttacatcgtagggtttaaaaatttgacaaactcgtataatttcagatcttgtcatattgttgggggaaatatctttctgatgatcacagtgccactctgctcaatttttgctagccccactcagactttggagtgccktgtagggaccacatatctgatacagatatcattagaccccctgaagaataccagtaatttacattacttctagcttttcaggtttttagctgatytgctttctaggccttgggaagtaggtagtggtggtgagatttcatggccactggagatttyctgtcccacattctcttgtttttgttcccagtttgcggagcctgccacaytgtaggtgctcaaatatttacataatttttttagtttttatcatggatctttatttaaaccttccattattatttaacagttcacctgtgagtactttgtattctgaactagagtaagcttccttgcsggcagctgctttgtatacctcagatttgctggctggtgctccaayggcttggtctgattcttcagataaaatgagtattgctagagggagataacagttgttaatgcatgggacaggcaggaggtggtgaccgtttttcttatcaagagatatcgctaagcaactgctaagcccttccttcrtcagctaattctctcagtcatggtgtgttagcctggataaagtgccataagtcaaaaggatatagacataaaaggaattttctctaaaaattgtcatcacaggcatcagatttctgaatccaatgtgctaaattatttttatacaattgacttaaatatattgyttcattaaaaaaaaagaaatagagaaaatgtccaaagaattagtatctttctctctttgaatgccctcctgccaatacctgcccctggttatgttactgaaaagttcttttgagggactgataatctttaggttattcaaacttttcctgaactacaaaagaatatgaataggcacatcttaaactgattaatataaatagacataagcatcccaatgtattcacttaatcacaatttgataatgtggcccacagcacctcgtatggtcttgtctctttctgattcccttccatcctcccctctctcctgtgctccatccacactcattcttttgcattttctccaacctgctgtcatgtttcttctccactccaggcttttcgtgcatactggttcatctgtggagaatggcctccccaccactctacctggttaactcctgcttagcctcaggtttcaacttcaatagcccttcctcgaggccatttctgaaccccaggataaattaccacctstctgcaattaatgttattaaaacctccgtaatcttcagcacaatagttggtattataattatgtcattcttcaattccacaatggtattcattataatacacactactgacttgctttaataatactttgagacrcattcttttgttcactgccacgtgcgaaggtgatgttttaagtgctggggaaatggtgagcaaagcagtctctgcccacagacarcctctattctagtgggtgaagcagataatttgcaaataaatatgtagtgtgatgacagctacctgtaagtgcagggaagagtccaaagaatgagacagacaaaaaagagggccatgctccttcacagagagtgtcagagaagagccctctagggaggttagttgttgacctgagtgaaatcagagagtgacatacatcaacagatgggggcttaagagtgtgctggccagcagaaatcagatgtgcaaggacaccaagattgggatatgcttgttgtgtttgaggaccagcagggaggtgagggtggctggggagaagggaacaaaggagagggagataggaaatgagggtccagaggagatyagatggctgaggccagtggctgctgagatggaaggtcagtgggagattttgcgcagaggaacatgggaaattgttttagaacgatggctttggccaccatgtgggaggtaaattgtagctagcaggggcaaaagcaggaaaagcagttgaaagcttttgcattactccgggtataagatgatgtcagtttgggccaggatgatagtagtggaaggaataaaatgcagtaggattctggatatagtttgaaaggaaagatgacaggattgattggtgaactgagtgagaaaaagaggagtcaaagataattccggattttcagcctgagaaactgggtgaatagtggttccattttctaatasttaagaagcccaggggatagggtggggtgggggactggtgggaactggtgtagtgttgtccttaaaggaatggtctccagagtccrttggcccaagttccaatcccaaatccacccctttaagcagatagttaatgccagttttctcatctgtaagccagggattagtcataactgataagatgcatgtgaggattaaatagataagggaaaatgtttttcttagagttgagaaaacgtggtccatagtaatttgtaattatttgtttaatatctacycactctactggaggctccttcggggtgtggtctgcatctcttttgttacccatttattccttgccatagcataaacttggcacttaagaggagtccattccttcgggtggttgcagcccctactatgatacaaaccacactttggcccctcagccagcatatttgtgccgtggacttctactcaaccttatgtgccattcttggttagttttctccacttgcataacattcagagtgcagatrgtaaataacttttggttagtaaaaatatgctttccttgggtaggattttaaaaataaaataaaaatragcaaaactcaatttctttctttctttctttyttttttttttttttgagacggagtctcgctcttgtcacccaggctggagtgcagtggcaygacctcagctcactgcaacctccatctccagggttcaagcgattctcctgcctcagcctcctaagtagctgggattacaggcgcccaccatcacgcctagctaatttttgtacttttagtagagatggggtttcaccatggctggtctcgaactcctggcctcaggtgatccgcccaccctcggcttcccaaagtgctgggattataggcatgagccaccgcacccagctgcaaaactcaatttctaatgacctgtcatgcatgcacgattttgattgtaaacaagtcaataaggagattgtcctgtactcatcgtcaatactttttaatcttrtgtactacattttaaaataaagggaatgttaatttcttttctgccttgagcttttaaaaattatcttaattgatgttgccctgatagcttcagaggctggttttaaagcctttacactctgttctgaatgtagagagagcattacaaggacagccatgagggggagaagggtactctttctgtcagcctctgggagctgcattggttgttaggcacctttttccagatctgaaactgaagtgcaggctggtatggagagcttgtcacacgtgtgtgactagtagaaaacttaggatgagttcctctttttggtacaggtacacgtttaaattctccaggtcacacagagcactattgagattcaggctggaatgatacagccttctgtgtaacaagtacttactggataaacaraggagacttagactagaacatttttatgttgcttttttgggaactgagtttcagagttgaggtttttgacttggcaattcatttgagaaagaacckctgacaggyagtcccagtaaaaagagtggggcagagaacccaaaggcagcatgggacagtggaagagcctgcagggtttggtggcaaacctgaacacaggtctgaacactcaaactgcactgatgtccttgtgcaatttgctcatttctgcagaactccattttctccattactaaaagtagggtaataatatccagctcccaagactcgtgatgatgaaatgtaatgatcatgggaatctccctctgcagtgcctggcacatgctggtgctcagtgagtgccatttgctttgttgcctttctcccatgagtgagcatttagattgcatgtcttagatggrgggtgggaagaacagggagaaagaattgtagaaataataatatcagcctttcaaaaagaaaaacattaaatttgccaggagagtagttgtcaggtataaayccaaagatttggaggtgatcgatcttgtttgatttaatccctgtaggggaaatgggtcagtggaatcttgagagtatttctcagctccattttcacccctctccacatctgaaacttcaccattgtatttcattgttctagacacatttatattcttcatcatttcagattcattttatttcaaagctataacagaaggaacgtgttgttacgctatacatgtctgattggatttatacaacaaactgaagccaggttctattgtagttcatttcccattatccccctgtcctacttttaatayggaagaactcttatcaactgtgtagcatttttatctcatatcttcttctwttgttgcctctaccttttgtttcccttggggtcatggtgatggaagaagtggataactgtgcttctgaatagtcttttatgtggagaaatacagtttactcctctggacatcatgktggtgacccactttatgtattctttaatattctaggggtttttgttcatagagagaagcacctgctactatttgtaatttagcgctcaaactattaaatttgtatctaaaatcaaactttgaaaattaatttctgaaatctgtttgaacatggattaccgacttaactcttttaacaacttaaactgcaatgttgattcttttgagccccctgacactggaaacagcacacaaagatccagtgattatgaaacataaaacatacttaaagctgttgtaaaataccaatgccatggtggttcatttgttgttcttaaacttgtctgtttactttcctaagtttgtagcaacatatattttgatagtgtccagtgttagagcaatgtgcattttgagacttttctacagtaatatagtactagtacatttccacaattacagaaactttattggagccagaaagatagtctgaccagctgataactgatctagttatttttggccatctctagcttcatcaaatccaagccactggtcatctggctaggctccattttatatttgtccacaatttgttacagcagtaagattttggagttatactttccacacaagttctagtttttttgaarcatggtgcttctcccagaatgttttcttttccaagttttgcttggctggcatctcatagtccattgtcctgtcctcctaatctttgcctggttctttgcatcatcatatggaagctaccatatgatctattactatctccattagtaagacatggaaggggtattatctcctaggatatgagggatgaagtctgtggttaatrcacctcttagaacatttagcgaattcatcatcttgacacacttcgattttctttccccctggtttttaagtatgttaaagccttcctgttattggtctactctgtcttaccgaggactagtattactaagttcctgatgttcattcttctctacttaaacggataaatatttaatagaagaaacaaaacacctagcactcttccatttattaaaataaagtggaatggatactctcttcctttcttttgtatgataacacctcattgtgtgctttatattaactttttcatgtgtgggatatcatgaaatcatgtctttcacatttagatggccttactatttttgatgcccacattgtcccatcttggctagtgatttgtcttttcatcactacccctgagctccatgaacatcttctatcttcctactagccacacgtkgagccttgccaatccytaactttccccgccccaagatatggaactaccctctaagaaaccctggcttctttctctggagaacagtttgacaccaaaatctaggtgctagttttatttaacaattacttacatgatgctcactgtgtgagatactgttctgagctctctaccaatactgtctcatttaattgttgtaacaaccctatgagatgggtactgttatctttgtcacagatgaagaaattgaagcccaggagagagaactagcttgtttagggtcacaccatgagtaagtggcagagctggaattttaacctagagggactggctctgaagccccctcttagccactatccctgttattaggagtgaatgctgctggcgtgggaaaaggctgctgtggctgttaggctacatctaggtcagagctgaaaaaaaaatggcctttaaagcttataggtttgcattgattttttctaagaaattaatatttcatatactaagatactgattttgggcacgctactattttatatactaataaggaaaagaagacattgcagacttaactgtgacacagtccacatgctgatggtcctggtgacctctgaatagctcacaccaacctccgtagctttaaaatgtctttatttcacttcaagggtggaaattcctcctgcctttactttcattgcctggcatctgacagcaatccttttgcccatatctcataacaaaacatatggcaccgttctgtctactggtcagtttcttcgtttcttagaagggcccatgaagccgtcgggtgcagcattgtaagaaaatatggcattgtgttcactgatctataagaaatatttacagggagttcgaggtcagcctgggcaatatggagaaagcccatctctacaaaaaataaaagaaaattagccaagcatcatgatgtgtgcctacggtccctgctactcagaggctgaggtgggaggattgcttgagcctgggaggtggaggttgcagtgagccaagatcatgccactgcactccagcctgggcaacagagtgagactctttctcaaagaaaaaaaaaaatttatgaagaactaattttgtaccccacagctctgtttgtgggcctttttgttactagattacttttttgttttaatgctttatgtaatgtagcctttttgaaggcttcttcaatggtatctcggttccctacaagaaataccaacagtgaatgtaattcctttgaagtgaaggcaatatgacagccttaaccatttcgacttcgtattacgtttctctatcctgttctttttatggtatgaggtttcatcagtcactaagatttgctattacagggtgactctaaaaaaataaatcgaccctttcagaaatgtattacccattaattagattaaatatgaacatcagtgtacaccaaattttgcagctgcctttctatttctcagttctcttctagaaactgaagcctcccttacaaatatattttgactgaatgttcatatataacctagttattgaataacatttattgaaatgttcaattcttttagacccccaccccactcccccaccccatggcaactagacacagtactggttacttagtacacataaggtttgcaaatcttaagtaaagttgattattcgtgtcttatgttttctgccattgaaggaattggcggtgggtggatattttccatgattttctgtctgagtgtatctaaaatcacagagttcttgtgctcagtggttaagggacacctggccctcaggcctagttgttacttaaccagaattaattttattcatcattgttattttcctgtcccttccttcaaatatcacaaaagcattaaaatatggaggatgagattgcatcgcgggtggaagtcttaaaataacatttcagggtatttctggacggtgcatgtgcttgacttcctgttgctttgtctttagccaagctctgtgttctccttttagagtttttgccactgacacgcttccaccccttcaccagctgttttatcttaatcttaaaagcattaaagaagctttcakacttgatgtggatggaggcatgtctaaagaaatgaactgcaccagctacttcaaatgggaaaaacttggaatctggtaatgtctgaatgcagtggccataaagctggactcttgccagtgtattatattttctgtccatgtgtctcaggagggggtgacaactcacatagtgagttgtccatattgggcaatataattgtgtcctccaaaaaccagcaatttgagtactaccttagtaccttgtaaaaaagcagtgatcaaatacttagtctagtggtattagttcaacccatttgatggggcagtattccatttgccataggagataggcctgtatgattgcctaaactgtggctggatgtttcaaatcacaagtgggccctccatctagagtagggcctcactgcaactatttccactatctttcttagtactactcataattattacagtcatgagagcctcaacctattattgagtccttcagtatatgccaggcattgggccaagggttatacatrtattattttaattaatccttgaagtaattcaaagtcaggattgtcaccatgtagaagaagaatggacccttagagattaaatgacttgtccaaggcctcagccaacaaggggaagagtcaggattttgactcaggtaggctacccccaggggcggggggaccccatgagagccttatcaggctgtgctgaagaaggctgagtcctgggatccagagctttgtctggaaaatgttccagtgttgggcagtcacaaacagtgctaaagtatctcaactttgtaaactgttttaaaaatcctaaatttttttaaaaagcttttatttttattatttttttattttattattattattattattattttgagttggagtcttgctcttttgcccaggctgcagtgcaatggtgcgatctcggctcactgcaacctccgcctcccgggtttaagtgattctcctgcctcagcttcccaagtagctgggatgcccaccaccacgaccggctaatttttgtatttttagtagagacggggtttcgccatgttggacaggctggtctcgaactcctgacctcgtgatctgcccacctcagtgtcccaaagtgctgggattacaggcatgggccaccgcgcctggccaaaaagcttttattttaaagtgtttcatatattggttagtcatccctctgaatcggttttagaggaaccctttaaagtaggcaaaccatgtttcagatggattatttcgtatttgttttctgttttattatcccattttattctaatcttagaagctaatgtcagaagtagtagctggtagaacttgaaggcaaggaggcttgccttcatttgaaaccaagtcctccttgcacttccctcctgcaggttcaaggacaaatggcattcaggagccccagggatgcctggagcagaggatctttctgctcaaagctacctgtcagggacttcctaccatggcacctaaaagcattttaatagtcattaattggctatcatgtataggaaggattttctttacctgttaggagtgttaagaatgtgtcccacttagagaatagctctgcttcttaaatttaacttgatagccttaacagcaagtgtgtgtgtattaatatgattgcacttttgtagaggcaatttctataaagacgtatataattttagaacaagtactattgacagtccccctcagcacaaaaacataattttacccaaaaggcctctgttgcctgaaggcacaaactgccaacatttctctttggcttgcctcagatttcatctgtgaagtggcaagcttttaatgaaactagacagtaagttccattattaatgatattcaatcttttcctccaattcaagaaacttaaaaatagaaatctgagaattaattggatttggttgatgataattgtcatttcttcattgtaaatgtaagctcacctcccaagggttttgaaaaagtgattggctgttgcccactgggaacatatggtatcagtgaatactaatattcattgtgcaacagaatgctctttgctgtgattagaaggcaccaaacttgcaggactagaatctctgctgtgttctgagcaaactacatgatgcaaaaatgtatccggytacatggaaatagaggcggmtgactctccaagttctctatgttcccagagcttgtctgggtttaagtggtggtggcagtaagggggaaagaccagagagtttagagagggtgagatctcagatgtgactcggaaattatatcatagcacatggaartagaaatatgtaggggcattgagaaaggcatgctcaaattagtccttgaactctggaaacagaatgtgtaaggtcagcatagcaattgggtatagccttgaaaccagacaccggggcttaagtcctatctgtactatgtcccctgtgacactgagcagtttcctcccctggcctggcttccctttttgtaaaatcaggaattagtatgtggattaggttagatggtataaggacaatgttggcctgtaggagatgctcagaagatattagtacctcctccayccgcattcgtttccacgtagtcctttccttttytttttttttaactactggtaagcaaattcccatttcttcttcccttctttctttattattattattattattattwcattttaagttctagggtacatgtgcacaatgtgcaggtttgttacatatgtatacatgtgccatgtcggtgtgctgcacccattaactcatcatttacattaggtatatctcctaatactatccctcccccctaccccaccccacaacaggcccctgtgtgtgaggtcccccttcctgtgtccaagggttcatgtcctttgtagggacatggatgaagctggaaacgatcattctcagcaaactatcacaaggacagaaaaccaaacaccgcatgttctcactcataggtgggaattgaacaatgagtcctttccttcttatccaaacgaggaagtcagtattcagagaaactaaatggcttgcctgagtggcagaactgagactacagctcggtgttagtccatttgagctggtataacaaaatatcacagactgggtgcttataaacaacagaaatttctcacagtattggaggctgacagtctgtgatcagggtgctggcatgggccttctcccaggttgtaaactgcagacttcctattgtgtcctacatggctgaaagagggtgaaggagctctctagggtctcttttatgagggcagtaaccccatttgtgagggcaccaccctcacctcaccttcgtaataccattgcattggaggttaggatttcaacatatcaatttggagtgaacataaacattgcctgttgcaagcctagactactttagtcctactctccaaagttactgtaatgctttacaaacgtatggggttgggctggcatgaaaccctagtgaggactgaggctgtttgagctttgttgtctttacagttgagttcagttgtgtttctttgcaaacaaataaagcctgtgtatctgtctcagcaaagctggcctgtccctgcggttctctgctgttagttaaggggcccatataaaagctctttaataactatgcacatagatattttaaaatgtcaaagtgcatcctttttaaagagaggggtgcgtctctgaggtttgtcagtcagacttttgtaaacttagccatttcctcattgatttaccatctagtttcagttatattgagtttaaatttttaattttttttagtgtttttagggatgggggtctctctrtgttgcctaggctgatctcaaactcctggcctcaagtggtcctcccaccttggcctcccaagtgtctggtattacaggtgtgagccaccacgcccagcttttgttgggctttttgatcaccagttgtcatgggcacctatcgcctttttgtgtctttccccaggctgtcagatagctaataaaaaaatacatacaaaagtgcacctaggagttttaagggaaaaagtagtcttttgtgataccattatgctatgatatatctgtttaataacatactgtataaattaaggaactagaatatgactgtaataacacgtattactgttaatatatgctattgttcccggcttcacatactgatctttgattacagtttatccctaagagtgatcaacatcccctaaccactcatgagaaatcttgatgtacacgagcctttcagtggccttcccagtgtctgaacccagtggayggctgcttctctttcagtggaaggttgactttcctgttttccttcagtaaggagtagagggtacacaaactttaatgtatgtaaattaagaaagcagattgccacagagccagagatgatcaattttgaagtttccatgagtcatacaggcattcagtaatatgtttcaggaagttgtttggagaaatgtgggttggtaattaccaaataaatttctacctctaactggctgcctttttgaggcttctttgcaagtatgcctattttctaaatttggaaaaaatctgtgtatttgagccctgaaaaagacagtctcttagcaacacgtgacaacaaagwggaacaaattaagaagtgtgttgtgatttgtgtatgtttgcactgttttgaaaaccaccctaaaggtaagtatttttaaagctgtttataacatttggtaaatttaacctaaaaagtatcaaaaccaggagtggtgtctgttctcttttcagtgcgttttttcctttgtcgccccacactgaatatttttggccacttggaggacatacgtgggcattcataattaagaattaattaaaagtgtctgcttggaggactttctgctccgtacttaattaacttaaaaacttattgccttgataaacagatggatcattttaaaagaaaaaacagagttcaccctcactttagacatctacaataattcatttagttaaccttggaagtattttgcatctattatgcatccattgacaatgaaatgcagaagtgtttattgccaccatttaaggatgattatgtgctatagtttaactcatttatgaggtgtgggtggcagcagaaggagaggacctatagtgactgttccccaagctgggctgggctggactatacagttggtaccctggcttctttaggctaagggtcagtttctttgtccagtccttcctgctggtgataggctgtttctttctgcatctctgcactattccccacttgtgatggactggcttttccccactccattacaccttctgttccccacatcacttcagtttggcagtagcccatcatggcttctcatggtgctccccgagaattcactgctctcttggtttagttcccatagttagttggcaagaccctcctgtatttcttggtttagagtcttgaaagagatcttctgcttgacccagctgaaatctttcagccaagccacaaagtcataggtagattgccatgccaaggctgggtgtccttcattgggatcccacaccattccagctattggggctgtcacacacaaggtgtacccatacatgcttcatcagrggctgaagtgtggacaaggttcttacagggtatggacacctgcttgataggtcattgtagacattgtattgtcttaatcaaaggctccaataactgtctatttcagactgttcaccaaaatcattaagtggtgtgtcttaaagatttggtgttgaattttcctttattcttccacgaaaataaaatttaaatgagtcccacagatactgcttgcctgaggctgttattagtgtatgtggcgtgaattgcaaagggctgtggttttattttatttgatttttataatgggggagggcacaagggagtagggaaaaaacactggcaatttttttttattatactttaagttctagggtacatgtgcacaatgtgcaggtttgtcacatatgtatacatgtgccatgtttgtgtgctgcacccattaactcgtcatttacattaggtatttttcctaatgttatccctcccccctccccccaccccgcaacaggccccggtgtgtgatgttccccaccctgtgtccaagtgttctcattgttcaattcccacctgcgagtgagaatatgtgatacttggttttctgtccttgtgatagtttgctcaaaatgatggtttccagcttcatccatgtccctacaaaggacatgaactcatccttttttatgactgcatagtattccatagtgtatrtgtgccacattttcttaatccagtctatcattgatggacatttgggttggttccaagtctttgctattgtgaatagtgccgcaataaacatatgtgagcatgtgtctttatagcagcatgatttataagcctttgggtatatacccggtaatrggatggctgggtcaaatggtatttctagttctagatccttgaggaatcgccacactgtcttccacaatggytgaactagtttacagtcccaccaacagtgtaaaagygttcctatttctccacatcctttccagcacctgttgtttcctgactttttaacgatctccattctaactggtgtgagatggtacctcactgtggttttgatttgcatttctctgatggccagtgatgatgagcattttttcatatgtctgttggctgcataaatgtcttcttttgagaagtgtctgttcatrtccttcrcccactttttgatggggttgtttgattttttcttgtaaatttgtttaagttctttgtaggttctggatattagccctttgtcagatgggtagattgcaaaaattttctcccattctgtaggttgcctgttcactctgatggtagtttcttttgctgtgcagaagctctttagtttacttagatcccatttgtctattttggcttttcttgccattgcttttggtgttgtagtcatgaagtccttgcccataacactggcaatttttttaatgcttggaagcaaacatcgttgcaataattagccggtattcacatcatctgaataagctagtttgtgaaacacaaagggaatagacattttgttaccaaatgtagctgataatagaaatgcatttccctaggctactgattctctaatgtgtatcagaatcacctatagggcttattaaactattatttgcttggtagttctgggtgggtctcttagtctatttattttgttataaaggaatacctgaggctgggtaatttataaagaaaggaggtttagttggctcatggttctgcaggctgtacaagaagcatggctccagcacctgctccacttctgatgagggcctcaggctgcttccactcatggtggaaggcaaaggggagcctgcatatgcacagatcagatggcgtgagaggaagagagtaagtgagtgcaagtgcagaggaggcccccaggctcttttcaacaaccagttattrcaggaatgaagagaagtcactcactcccttgagaattccaccaatctatttgtgagggatctgctcccatggcccaaacacctcccaccatgccccacattcaacattggggatcaratttcaatatgagacttggtggggtcaaacaaacaaaccctatgcaaaccgtagcagtagggcagtagaatttgctttctaatgagtcccaggtgctgctgctgctgttggtctaagcactacacattgagaaccactaccctgtgcccctggccttcaaacataggcacttataggtttgggcagtgattgtcattgaacttgtccatttagggtcatctttccaaaatgaaccaataccaccattgagttgcatgtaaaaatcacattaaaggggatatctccttaattctttctgagactattggcttgccctctcttctatgttcagtaaatattcagtatctcttktataccaagcccagtgctaagtcccgctggtgataaagaggacacatagtggaactgctctggggatgccccgctaaatagacgggggtgttgctgaaacacaaaaaaagaatggagttatgaagttcctcctatcttcattttccttcttcagatcctgtgctgaccttcctttctgaagatggagatgaataactagaataaacaactgatgctggtaactttaacagtaactatataaaaacaattatgcagatatacttaagttttacaaagttgccatgcagcccccaacaataaaaattgtattttaatatattgcaatcrtattatttggtagggcttaatacctttcaaaccatttttgtgtgttttattgaatctgaactcctgggctcaattgagccttcctctttggcctcccaacatgtggagattaaaggcgtgagccayggcgcctagcaaatttgaacttatgaataagcctttcaaataggataggcattacatcttttggaaagactgaaacacagacaaggtggtatgcctaccatttrtccagtgctatgctaaggactgcatacttttatgtctaatatttttaaatctgggaggtaggttgtattgtccctgttttatagatgaggacayggaacagctaagagtataagtatcttaccaaagctaatttgaggcagaacctggatgtttcctgggatttgttttggggcktttgtccttttcactgcagccatctactctctgatacaaccctactttcaatatacatactaggagagttccttgttaacacgaggagcaacgttctcatctaaatacctttttgggtcttggctactgtatattcttgcccttgccttttatcccaactcttcctttgctgtcacccctataaaaagcccttctcccttttggttccatgcctgggagctcctatcctggggcctctgccacggaagttattcccgtcatctattgctgagtttaaaacactcccaacttagtgacttaaacacaaccatttatttgatcatgagcctgcagttttgatggggttcaatgagatggcttgtctctgctctacattgtattgtcaggagtcgcttaggtggctgcatttagctgagagcttggctgtggctggaccatccaagggggctttattcgcacgtctagctagtgtgaagctgtaatggctgatgtctggctgagcctctctctccacctggtctcttctcattcaatagtgtggcccagagattgggaacattttctgaaaaagaccagtgttaaaggctgaattgtgtcccccaaaattcatatgttgaagtcctaacccctagtacctcagaatgtgactatatttggagatagggcctttaaagaggtaattcagattaaatgaacgcggggtgtggtggttcacacctgtaatcctagcactttgggaggctgaggcaggtggatcacttgaggccagaagctcaagaccaacctgggcaacatggtaaaccttgtctttacctgaaaaagaaaaaccacaccccctcccccccgcacacacacatattagccaggcatggtggcatgcatctgtagtcccagctacctgggaggctgaagtggcaggattgcttgagcccaggaaatagaggctgcagtgagccatgatcatgtcattgcacttcagctagggcaacagagtgaaaccctgtctcagaaaaaaaaaggttaaatgaggtcaagtgggccctaattcattatgactcaatatgactgatatccttataagaaaaggagattagtacacagacatgcagacagggaagaccaccttcaaggagagaggcctcagaagaaataaactctgctgacatcttgatgttggacttttagcctccagaactgtgaaggtacaaatttatgttgttgaagccactgagtctgtggtattttgttaaggcaaccctagcaaataaatacagccagttagtaaatactttaggcctcatagctttggggcccatacgatctctgtcacatattttcttattttaaaactcttttaaaatatgaaagctatccttagctcagaggcagtataaaaacagaccagatttgacccactggaccatagttcaccaaccccttctctagactgtagcccaagcttcttaatacttgagcttaaagtctcagaatctcacttctgccatgttctgttgctgaaagcaagtcacaagtgagggaccaggactttgtttcttgatgggaggaatggcatgtctatacagagatgggaggaatttctgatgtccatttttggaaatgatttttttacataaattaaaggagtatccacttatgccttacttttgaaatgtacatttgcccccacattttaatttctctgaaatcaggatgtatttactgttgatagcatcttatcaccattgactagatggcaatgataagtcattgtcattatgtgagcttgtgcaaatttggacataacaattgtgttgatgtatactgttggtaaacacatattgagtttagttgcatataaaatatcttcaaatattttaaattgtgactcaaaatttaaaaacgggtttatatgtgtagaaagttatagaagtagagcaacaggatgtaaatttgggattagtgaagcaaatttttgtacaagaatgacctcagttgctatttttgcaaagaagcaaccaggaactgtggagggcctgaggcagaagacaagtagctgaagctgtgttacagagttatggcaaaagtattgcgtcctaggtgacaaattatgcaactgaaagcaggaaaaattggtagatctcttcaaagagatgaaaggaatttcaaagcagtaagaggctggtatgtccaattcataggttacacaggactgttgttgaagcgtagaacatcaatttatcaaacttcctgctgactttgaactgtagctacttattttctagtgatttaactgggaaaaaaagttgaatttagacagataggaaatgctgataaaaactcagtgtgctttaaaaggctgtaaattttttttgaaatgttaaaggtactacagagatcaaaggcatgagcagaggctgtgaaaagtttctgtgatactttgcacaattggtggtggctgaaagttgtagccataagttaatcataaactgcaaaacaattcctaagagttcttacccaaagatgttatcgtttatctacacgcctgcacatacacatgcacacacacacttcagccaaactgaagaagaaatgactcagtagtctggaacagatgtcccagagcccccatataactcacccagtatataggttcttgatcgctttcacagatgtgtatctgaacagtaaaraatatattcactgaagagtatagtgatccacttgtaattctttcggcaagactcgacaactgmtaaccttgtggcacttttagtcaccaaagatatgagtcttagttattctaaaggccctctgtcgtgatactaggtaagaacaaaaaagcaccagcctcaaaactggcatattgagtataggacagctagaaaaatgtcccagagacaatagtggagcatatgatggaagaaatggacattagcatctgagttaaaatgattgagaagaggcaaactgggcaggtgaagatgtgttaagaaaatcttggccaacttattttaattttcatgtaggtacatggttgacacatggaaaaatctaattatctaaaagcttcttcaataattgtaaatgaaaagaaagcattgtatcagtttacttggctttcttagcagtctgtaaactaatggttcatcttattggttgatcttagactggataaatgtaccaggcactgagccttttatgattgctgcttttatggagtttcccatataggtrtgatatgagtatttccattcgtatatggaatgcattttcccagagagagtgtgtaacaagattatgaagaacttacatcacttttaaggaaaaatatgctctagaattcaaacagccaagtctttttttttttttttttttttgagagtcttgctctgttgcccagactggagtgcaatggcgtgatcttggctcactgcaacctccacctcctgggatcaagcgattctcctgtctcagcatcccaagtagctgggattacaggcgcccaccaccacgcccggctaattttgatattttgagtagagatgggatttcamcatgttagtcaggctggtcctgaactcctgcctcaggtgagccgcctgccttggcctcccaaagtgctggggttacaggcatgagtcaccacgcctggccttcaaacagtcaagtcttaaaggagttaagtgttagacatgttttcttgctgtttcattcatatatatatatrtgtgtgtgtgtgtgtgtgtgtgtgtgtgtgtgtgtgtatacacacacacgaaatgatattatatatattcccaatcaataagtgttgactccattaatcacttattgaaagatttcaaaataacgtgatgtttttcagttgctaatagctgtttacctttcggggctgctaaaacttaccctcaattctttcataacaatgtctacagatggtaaatgttcaggaacccttttatttttcaaatagactttattttttagaacagatttaggttcacaacaaaattgagcagaaagcacagagatttcccatattcactcaacccacacacaaaattggcacgatcattgktcactgcagtcttgaccttccaggctcaagcgttcctcccacttcrgcctcctgagtagttgagactacaggtgtgcacaaccacacctggcttatttttttgtttgtaagatggggttgcaccaatgttgcccaggctggtctcaaatacctgggmtcaagcgatccttcyacttcagcctcctaaagtgctgggattacaggcatgagccaccggcatgtccaacctggaacactttttaatatgtttatttgccttctgtttatctttggtgagatgcctgataargtctttggcccattttctaatcaggctgtttttttattgttgagttttaagagttcttagtatgttttcaataataatcctttaccagatatgtctttggcaaatattttctgccagtctgtggtttgtctctccattttcttgacagtgtctattgcagagcagaaatcttaattttaataaagtctagcttatcaattwtttctttcagagatcgtacctttgacattgtattttaaaactcattgccaaactcaaggccacgtagattttctactacgttattttctagaagttttatagttttgtgttttaaatttaggtttgcgattcatttcaaattaatttttgtgaaatgtgtaaaatctgtgtctagagtcatttttttgcatgtggatttctagttgttccagcacggtttgttgaaaagattatctgtgctccattgtattgctcttgctcctttgtcaaagatcagttgactgtatttatgtgggtctatttctgggctctgtcttctgttccgttggtctactggtatttgttcatttgccaacactagacgttcttgataaatgyaactttacattatatttttatatatatattttttaaatttttttagagacaggatcttgctatgttaccccagatggacttgaactcctgggctcaagtaatctctcgcctcagccttgtgagtagttaggactatagcaagtacacaccacagtgcccagctataagtcttgaagtcaggtagtgtcagccctctttgttcttcttcttccttcagtattgtattgattattctgggtcttttgccttcccatttaaactttaggatcagtttgtcagtatccacaaaataatgtgctgaaattttgattggaattgcattgagtatgtagatcaagttgggaatatctgatatcatgacaatattgggtcttccaagaacctcttgattttgattttgaaattctgactgtggaatggaagtgggttaagactgcaggtggacaggcagctaactcttgggcctggtttctaatcagtttgggccacagtttctaaagagtcattgctagggattctaggtagtttagtttgacaaccatgggcatagtttaccacaaaccctcctttatgtcatacgcaactttttgaagttccacattagtgttaaagaatgcgagctctggaatctctctggaggttcctaattctggcttcgtcaccttgcatcactcacaagactttagccaagtatcctctcaattgtaaaatggacttaattgtggggatcaaatgggaaaatctgggtaaatgcctgtaaagttgcttgtatatccttgttttaccttatattccattctctcctctccccgacccttatccagacttcctccctaacttgcccttgaaactgttttttataatgtcaccagtgacttccgtgttacaaaatacaggggttccttgcaagattatttatttagcagtattatagctccatggcccacttcctccttgaaacacccttttcttaygttggcatctctgacgatagtttcttggttttcttctgtcttcctgggatgctgtgtctgaagtttcctttgctggctcttcctttgtctgaacaaccagggcttgtttctcggttccagtcttttttattccagtgtctctaaataccattcataggtagatggtgaccaaatgtgtgtccccagccctgagttccagacccttgactgaaacaactactggacgactccccttggcttcttcctcatgggcagagctctgaattttcaatgcctttgttccctttcctgtaaytcctgcctctccctccattttataaatttcagcaaatggtgccaccatccacctagttgatgaagtggatactcaggctctgttctttgtctcatcatcatccccctcatcagcgtgttcttttgtctccacctctgaaacatatgccataatcatcctcttctctccatcttcactacagcctcttctggactcctaactgcttttcctgcatccattcataccacattcagctcccagaatgatcttgaaaaatgtcagatcatgtcgctcatgcttgmatgcccttctgtggcttctaggtccttgaccaccttgaggagcattgccacccagctccagtcaccctggcttcatttctgttctctaaccatgcaaacttgcctccacttcagacctttgcagttgctctcccctcagcctggaacactgccattgcctttgccagtgggtacctccttgtcttacaggtctgagttcagatgtgctctttgtggccctccatgaccatcacctatatttagtacaagtctacccttcccccaatgcagtcgtatcttcctccttgtcttccctgtgcataccactatttgaaatcacctcgctcattatttacttatttattgtctggtttcccacaaataaaataagcaccatgagagcagggtccttggctgtctgattcagtataatattcttagaatctaaaacagcctagcacttagtatagtgcttaataaatatgtcaagtgaataaacaaatgcaattaaggctcctagcatcatgcctggtacattaataactgctcaataagcattggcaattgtcacttgaacatgaaaacgtgttttacatgtccgtcattaggctggctagattcctaaggagcagcaaggtccacatcttagatatctttgtattccaaagtctagtactgtaactgacacatggtagatgtttaagaaagatttgtttcatacatgaacttttggaagctgcacttttgttaattggacacactctatgcaactctgtgaccacttctcttaccctgtactaccagtgtattttctgccttcatctcacttggcctgtctgtggaaatgtctactgtccctctgtctcagccggtgagaaacatggcacctccctctttctccacatccagtctactggccggagtccttgtatacagcttcttaatggagtccccattcattcttcggccagttctctgtctcacttcctgtccccctgtacagcagtgcttcctcatttctggcttagatagccacttttaggtaggcaggctggtcttcccatcgctttcccctccagcctacctgccaccgggttttgctttctaaatgccaacatgattccatcctttactgagttaaaaccgcagtggcaaaccctttgtttcagcagttctggcccttaccaggctttctcatgcctttctctctgcataaattgagtttttaaagatttgaaaagtcccaaatattctgtatgtgacaactatttaaagacattcctgtgatgaaataattgtgttgagctgcttaccctgatttgtcacttctgataatgaaatactttggagtgaaattttagaagttttgtgaattagttaaatttcttctgattgattgacatttctggtaacatcttgcagccagcaaggttagaaaataaggtcttatgcattcatagatattctctgaggaggtgtagacattcctaacagagtgactagatgctttcagtgctactgttcagtttctgctgtttattgttaaaaaaaaaatacagcacttttccaaccatagaattttaatcggataatccagttatatgagattgtacacatccaaaatgcacaaaataacttggattaacaccttattctttgagagcatagtacatagttttgtaaattacctataacagagggtatctccaattaacagagatttggtactcagaagttatatagagactgtgtgtgcacatgtgtctgatgtgatgcttgcttactaaagatagtcatggcgtagagtgtcagaaaccatatgagatataaaggcccaaagacaatagtgatgaaacgtttaaaaagcaactgggctaaccaaaggcagtgcactggtgagaaactttatacttgaaaaaatattgactgtagatgtatagtagcctttcacatagcctttttgtaagggttatcttgaattctggactattcacctttatttaaggtaaagcagtagcactgtggtgttctgtaagrcttatctcactaatttgatttgatgtgtgactttagagaagttttatagccctgatgttactataagcaggtgaaatgatacctgakatttcatgaactggcaaattcaacatagcaacataagccagaagagaagatggcacagatatgcaaattattgtgttaattcacagcacatgagtattccatgttttaaaatttttcagtttgagatacagaaaaatgacaaaaatcattcagtattttcctgtttccacagttgttaacgtcttacataaacatagtataatgatcaaaactaagaaattgacatgagtacctatggtaggcagaattataagttgacccccaagattccagccctctactgtgtgtgccctgtgtaatccccttgagtgtgggcaggacttgtgaatatgatggactagcacactgtgattgtggtacattatatggtagaagggattttgctgtgtaactaaggtttctcatcagtagactctgagtattcaaaagggagtttatcccaggtgggcctgacctaatcagatgagcccttatgagagacaagaagcagcagccaaccctcttttgctgtcctagcaacagggaagagccctgttgtgaactgcctaaggaaggagccaggtgtcctctaggagctgagaccaatagccaacaagaaaacagggccctctgatatggtttggctgtgtccccacccaaatctcaacttgaattgtatctcctagaattcccatgtgttgtgggagggacccagggggagatcattgaaccatgggggctggtcttgcctgtgctattctcgtgatagtgaataagtctcatgagatctgatgggtttatcaggggtttctacttttgcttcttccctattttcttttgtcgccaccatgtaagaagtgcctttcacctcccgccatgattctgaggcctccccagccatgtggaactgtaagtccaattaaacctctttttcttcccagactcgggtgtgtctttatcagcagcatgaaaatagactaatacaccctcaatactgcagctgcaaggaactgagttctgccagcagccaggatgaacttgaaagtgaacctcaatctccaaatgagaaccttgatgtgccgacaccttaattttagttttgtgagattcaactctaccatgcccaaatttctgacctacagaaacaagataataaacatgtgttgtaagtttgtgtaaattgttacctagtagtagaaaaccaatacacaataccrtataactactattaactaaagtatgagctttgttcagaaccagcttttccactgtcttgtcttctgttccaggatccacccattcctaataggtctyttatttttaataaatcaaggtgaaattacacctgatatttcttttttttcttttctctctttctttctttctttttttttttttttttgatayggagtttcattcttgttgcccaggctggagtgcagtggcatgatctcagctcaccrcagcctctgcctctggggttcaagygattctcctacctcagcttcccaaatagctgggattacaggcacctgccactatgcctgactattttttttttttttcwttttggtgcttttgtcaagacaggatttcaccatgtcggccaggctggtctcgaactcttgacctcaggtgatctgtctgcctcagcctctcaagtgctgggattacaggtttgagtcaccgtgcccagyctatacttcatatttcgtgataagcaatcaactagtacaaattcagtatctgtaagagatttcatctcactgatttgccagggacgggggtcaccaggcagtgtaatctgaacatttgagttcaagtttggtcacattaatagtgtgtggtgtgattccctctgggacttttgtctgtttgttctcatctcttttgtctgtttgttctcatctctgtckaaggggcctctccaggtgacttgtcacgtgcatgcgaagctgtaacagaatactgagaatctaagaaatagacctyagactctgttgtcttttttcttcttctaatgacacagaatccagctgtctgagaagratgcaattatgtgaggaaatgcctcctgctggcactaattcctgagctttgaattgttggtttgggtcctggcaaggtatttttgaaaactcaaactgccatataatcaggatagttgactctatcctcagtgcattcattttacaagtgacaaagtggagactgttratggtgcacaggttttccacgatcagaatctaggctttcttgcttctagtatgttcttactacaagcaggttagtcttttcaaacatggtttgccgtattgctcatgttagagatcratggtcaggtttgggtgctatgttgatgtaatttatccaagggtcatgaatatttatattgtgccctgccaatacttcatgccctgctttgaggttctgggaggctttctaacttgggactcagaatctacttcatgagaagcttcaaaagcatctagtactgcaccctaactcagattaaaggccactgagtccattgatccactcatggagcccgggggtaatgggtgggggcagtactggttcagctgggagtcccgagttcctgcttcataagaccccactactccatggctggttacggtggcctgtcagcatccygtgttcagaggaagcagattagcaacttctccccatcccttgtatgtctgagaggtgagctgcaggtaggcagaagtgagcaggatggaggagggtggtatgagaagctcctttcttctrtaataccagattcagggctaggtgctgggctagyaaaaacagtttctgacctcaagaagtatacattttagtggaggttactcacagaaataaataaatatactacagtgattctttctgaggagtgaaacatttcacaggagagctatttaggctgagtttcagaggttgaataggcctttgctaaacagatggggctggggagtggcggtgggggtggagggtggccataccaagcagaagcagctgcacgtgcaaaggcactgaggcatgaaaccgcactgggggtatatgtgagacagtttggaaaattgctcagtatttctaaggaatttttaaacagaagtgacatcagacttgcatttctgaaataaagcaatatttctattataaaaataccagaaagcacagaaaacaacaaagaagaaatacttgacccgggtttgggtttgcccttctgttgactcccttagggaccctgcaggacctagcttaccattttggaacgtggagcaaggagaatggtgctttgtccttgcaacgaaagggatacaagtgggacagccccactctgcccctgtttccaaggactcttgggctgcgtctgatccaagtctctagctctgtccattcctagaagctgctagaggtgcatctgggactggaggggctttaaatatgtggtttttacaattacatgttatctggctttggggttctcgaaaggtcagtgccctggggcaaagccttggctgcctgccccagctctagcacctgttatacctctcaccacacaggatagactttgcgtagctactcaatctggtatgtaaagcctctgtagggtggcaaaacagggactgtccagtctacaatctccagactctagcagggcacctggcacatagtgtatagatgcttagcaatcatttattgaatgagttgaagagtttcaatacacagagttcatcaccatagcttaatatattccctcatcttttgcatatgtatagatttactttcattttatttattagtattgttggacagtttccagtatttgacttactttgtttttgagaaatgtctgaattatttggcatgtttcttggatttttttaggacaaaaccctgatagtctagaattgtgctgttaaatatgtagctggtagctactagattggacaggacagatctagaacatgtccatcatagaagcttctgttgaacaaggctgatctggagagtggattggtgaagagggaaaccagaggcagggagaccagtgtaggtgggttttgcattatgccaagcaagcgatggcagctggaactaaggcattgaccctgtttctggagaggagggattraatcagagaactattgaagagatggaatcaacttgatttgagctgaggtgaggagggaagaggaaacattgatgtcagggtttgtcagggttcaaccagagaaacagaacaagtagctacaaagtgartatgtgggtatctagatatgtatgaattaaagggatgcattgcaaggaattggcttatgcaattgagaactggctaggcaatttggaatcccataggctgaatcttgttgcccacaggtaggaagcaattctttttcctccctttctcctgcaacattctttctctttctttttcttcccccctcccccttccttcctgtcttctttcccttttctctttttatctctctctcctctctgccttccactgattatcagcttatttagcataatctcctataaagtcacctgattagggactttaattacatctgcaaaatcccttcacagcagcacctagattcatgttggattgcatatttgagtgagtgtatgtgggtgctacagacggccayatctcccttccatctaccaactttcaggagaaggtcttccttgtagcccaccctaatcagaaacatactagaaagggaattatggggatattgtttagcctggccaaaatgacaccacaaagccatcacagatgactcccagttttcttaactagggcaactttgtgccttcttatgttagatcactgagattggagttacaaggggacaccattcgagggtggaggggagtaactgatgagttctgtggcttgctgaagttctgaagtgcctgtggaccatcatgtatcctgctcasgaacgtgggtccaagagctcattaggagtctgggctgcagacacagaggatggttccccaacatatgcatggtagttagaaccaggtgactccactcggtggatcwtctggggtagcagggcgagcacctggagaagggaatgttcacacataaggggttgaggaaggaagagagaaaaacaggctkagctacttagaaatgttttgaggtggagctgagcacgggacaagtgaaagaattgtggtggcataagtctgcagaatgacacaattttctcttcccagcctggggaggagcagatgaggccagctttacagctgattcccagtcagaggaagacacaaggagaatggaatcgggagtgctgatggagggtaatcacgacgtgcactgggggaaatcagattgtctcccctcaagtgtataagtgtgcatgcctttatggtgcagcttccaggctgggggttgcaaactcaagtgcctgctgggttctggcaggcaggggaagccccccgatctagtcttggggctcagcaagggttcacaaagaaataatggaagttacaatctctgagatgtgtagtaattggccaaatgaagagggcacctaataccctgccccmacaatcatcctggccaaacttgatctttgcaaattaattcattgactttgttagagcagtatttcacaatgcaggctgctctcaattgggaagatgtctgttttctactaaattacatctaaattatatcagagaggtatttatgtgtgtgtgtatatgcmtatgtatacatgtataattgttctattttaacaacttttttctctctctctcctttcaatgagcatgcttaagtcagagtaaaattcattttccaaaggtcagcttttaaagtttgtaggttttgaaaaataaagatcttcaataatataatttggcagacctgtagacatttgcctgtggcataaatgactttagaatagagtgtctaatccaggctgtctaccctagttgcccagcacaatcacctgaggcatatttcagaaatgctaaagctgacccaacttcccagagattccaatttaattagtgtgcagaggcgcctggccagcaataccagttttaagcactacagaayattctttttttatttttttaattttttattattattattatactttaagttctagggtacatgtgcacaacctgcaagtttgttacatagttatacatgtgccatgtcggtttgctgcacccatcaactcgtcatttacactaggtatttctcctaacgctatccctcccccaacctcccgtaccccaacaggccccagtgtgggatgttcccctccctgtgtccatgtgttctcattgttcaactcccacttatgactgagaacatgtggtgtttggttttctgtccttatgatattttgctgagaatgatggtttccagcttcatccgtgtccctaaaaagggcatgaactcatccttttttatggctgcatagtattccatggtatatatgtgccatattttctttatccagtctatctttggtggacatttgggttggttccaagtctttgctattgtgaatagtgctgcaataaacatacatgaagcactacagaatattctaatgtgcaaccagaattgaacccctggtttattcatatcgtttacatctattttgargaggagagaagatccaccacagcctccagaggaggatagagaaggaaaatagcgaaagaaacacttcctgctaaacggtgactcattgggacctcctgctctcgcccccacctagagggtaagacgttagtacaaattgactagaccaagcctatatggtgaaaatggattctgttcaaaatcagcttccaacagagcagaatccacttgccatcgcaggtgctctgaacgagggaaaatatttttatctcacagataccttcaatcagtagttttctttttttttctttttttgagacggagtcttgccctgtcacccaggctggagtgcagtggcgcgatctctgctcacagcaacctccgccttacggattcaagccattctcctgccttagcctcccgagtaattgggactacaggtgcgtgtcaccacatctggccaatttttgtatttttagtagagatggggtttcgccatgttggccaggctggtctcgaactcctgacctcaagtgatccacctgcctcggcctcccagagtgctgggattacaggcatgagccaccatgcctggcctcttttttttttttttttttttttttttttaagcrtaatcattgtttcaaacaaaatcttagaactccaacccctaccctscagccaccatcctcccatgggaccctttttaggactggtaggattccttaaaacacactttaaaaaccagaccatcaagtgttaaagctacttctgtcttgagtaaaaactaaaattagcaaaaaatagtatcaaattgaaaccagctgttctataagaggaatcaaaccatggtgtattatttcctcctgagattttcttctcagatagtgccctgggtagattctttccatctccatcgtgtgccacaccctgatgggggtcaaagcggggatgaagaacatgtttccttttcagtayaggtaacattttaaaaatagaaacaggcattgagaacaaagtagaatttagtattagacattaaaatagagggcttcaggctgggcgcggtggctcacgcctgtaatcccagcactttgggaggccgaggtgggtggatcacgaggtcaggagatcgagaccatcctggctaacatggtgaaacccccatctctactaaaaatacaaaaaattagccgggcgtggtggcgggcgcctgtagtctcagcaactcaggaggctgagacaggagaatggtgtgaaccctggaggcggagcttgcagtgagccgagaytgtgctactgcactccagcctggacgatagagcgagaccccgcctcaaaaaagaaaaaataaagagggcttctgccttacctctttcttctttatttaaaatgtctgggcaagctttcctgcaaatacaaaataatagtcattgactgggagttgaatgtctaatagtgcaaacctctgaatcattcctgtgtgttctcctggtttcactcagcaaatgtggatgtgaatcattcattcacccagtgtggctgtgccaggtggaacagaatgctttaagattgcaagcagtccggggtctgagaggggatatctgccgggccacttaacagccatatgacttttttggtttgcttcatctcaaaaatgaggaaaatcatatatatttcatggagagttcagagaatagagagagagagtacatcgagtgttcagcagagttggtaagctcaactgatgttaattactattaccgtatcgcgtggtaccttggaacaaaatgcttttgaaggagctcgggcagtgatgctagaagcagatgttgagcgctcagccgagagcactgactgctcygtaggtgaggggcccccaatctctgcagaaagtgcttagtgcctcactgcaggagcatgccttcatactatctcatggtctgtgttcaatatcaggaagcctttgcagatggccctggtgcatctgcggacacaacagccatgaaaacagcccataatagcaggctgctcacacagtataagtcctgggaggaggatactgccaagatttttaaagatctggccaagaatacgcctccagagtggctatctcagactgagcatagactgtatttctaattagagcaaaatatgcgtaccctaggtcagtgaacacaataacttttttttctgagattagagactgcaagaaataaattgggcaacagtgtgtttgtaggggcagaaagaactgaaacttgtacgtaagatgggcgcaagtgccgactggagcctgttccaattcttgctgaaggaaagccataatgtgggtgtgtgcttaaaaaatagtatgtggcagctacatcattggattcaacaccttcggcaactgggtacaatggagaaaactgatcactgaacttacataacgggatgttgggtttgtaagggactactaaggtggctaaattcagccagtcttttccacattatttctgtgaagtggcactcagcccccattggaagcctcaaatgatggtgaactcagacttttgggcaacactgtttcaccttgttcagctgrtttccgctcttggggccagttctacgtcctggggacctatactgtacataccctctcccatctgactgcatataatttcaaaacagctctcctgcccacttgtgttttcttttcctaagttgracatcctcgtgtgtcatggttttaagtctttttaccatcttgattacttgccttcataggttagtttttctctactccttttatgggtagcattaagcactgaatgcatcattaacaaatggcctgatttgccttgaatagagcaaaattatggatctccaccttcatcttcctaaatcaggcttccatcaatgaagcctaaggtttgctagagctctgggtgacagcatactaagcatacttgtctgctgacatctgtagagatggttttgttttgtctttctgatagtttaactagcatctcctaaatttctgctctccgtgtatttgtacactttgtttttagatctcaaatccatgccttttattgatccttattttaatttttcagcatgtacagattatcagatcctgatttggttggacaggaagttcactaccaccctgggcttcatcctaaccagagatgtgagaatcttgccttctgtgttaccattcaagttgcagcttgtgcctgccaggcaagagctgagtgaaggggtctttggcaaggcttgagccagcccccatcttcattagcatgctgtggacatgctcattattagaacagttctccaagttgttcaatcccaatataccatctagtcaacaggaatatcatgagaaccttcacagaggccttagtgatgcccagttctccctaattccttccttaaatttcaccaacagtggatcagtaataaaatttccaagttgttgaaaagaagcataaaaccatgccaggtgacatgaacccattttgaaccagcccagtgctcttttataatcttttgattaatcttggactttcgttctgccttaccaatgttcatttcttcctttctatctaaagaaaattttctttaaagaagctgaatggaagtttccttaaccccaagcaccagaaatactccatccttgatttgctatatagaaaaatattcatggtattttaacgagcccattcctaaagcctaattttgttgtctgaatgatttctgtaatcctcagttcattcttgtctttgggtttctgagtgaatgtacctttcctcgccatcctctttcttacattcaccctgtaagggtgaatcgaagtatttccttcaatttgccttcctaaggtytagtgtgaccttttaagatcagagcaagctcactggtttccatagcaacactcacttttcttctgattaggatttttggggggaattgcctagtaagaacttctaagcttcgtgaacactcttgttttagaatttcatgtcccagaaccatgtccctgttgcctgagaacttccaacctaagctttaccactcactggttgtgtgacccaagatggtttcctctaagcaaggaacaataagacttctcccaggcttgaatccatgtataaatataaaagagggtcctactaatgcttacgtactgaatggccatctgctgccctggaggcagtgcctgttggaactcagctttggccaagagaacccttgccctttggcagaagacaggcatcagaatagttgcaatttggtggtgagttttgcgactctctcctatgtgtcccttccactccttggttctcatgttatagaaacccaagggtgagtgttcagtgttacacaatttggtattgagactgaaaatggcgagacagtttgtttttcattcttacattaacataaagcacggaagctatataaacgtgtctgggctgttcttaagacaatgccatctgaatttcctttgaaagaaaaagacatttgaaatcatgcctatatggatgagaatgtttatcactttgggtcttggactttcctaagcagggaaaaatctctgaccttaggaaatggttctcagcagtcttgattcagctgtgtcctagtttcttagatcccaattcttggtaatagcttaggaaggttgttgcagtggtctttggggagtgccttctctatttggctcaaagtaatatggagacagctaaccattaaaaaaaaaaatggtagctggctgccacaacaagctggagaaacttactgtctcttgactttagatgtatgccctgtttttaaattttctttgagggtaagatgttaaaggtgtatcctgggcctcttggatcatgatgcagtccctggatcctttggatttaacaaccaagctttgttctcctttgaaagtcactcttatccatttatatttccactcttctgtgccagccttgcctgggacactgtcatggtctaagtgtcattcacctgtcactcttatctccctgcaatttatattctggactagacagtggctgaaatgcacttttaagaatgtaagtcagattataacattcccttgtgaaaagtcttcagtggcttcttgcatttcgggataaaaacattctttacagtctagggtggggctcatgatctgcctgtggaatatctcattagctgcatctcctagcacactgtccctctgccaagtgattttttttgcctcagggcctttgcatatatttccccctgcaaggaccctcctctccttcctcacttggttgactgcatgcctaagcttaaatgtaacctcctcagagaagttctatctaacgttctcatctaagttagggctccttgttacattctttagtagtcgttattttcccttaggcaattatcgtaatttgtaattatctccttaaactttgtcctcacaaactggcaaatttatagggctaaagaccgtttttatttattcccgtccccacaaacttttacacagcctgatgcatcatatataattaaatatttgctgaatgaatatataggtgaatgggttagtgcgagtcctctcaccaaatgtggtaaaatggaacctgctctgggatygcagtaatgacatggatctgggctctgatctgccattcagcaactttgtaactttcacctccctgtgtttcagttgtcttttgcttcagtgggggataattaccttgacttgccttgggagatgttgtaaagattaaatgagtcattttgtaggtgaacattctcgggactgcaaggtagagtgccttcttgtccttaacgtcattgctttgccctgtgatatcccagatcatgactagcagaaggtaacaggaactgaaggatctggaactaggctagcacagaagcttggagacagagcaggtgccagcacaaaaggtgcgcatgtgtgtagttgaggatgtacagagctgtggggttatcctaggcagtagcctgtgctaaggtcccatttggatgtaagacaggtactaatgcttagtcttaccaattattttaccatttccatgtggaggctatgtgacagagtaggaagacacccaactcagatgagttatatcaaaatagagtcctaaccctgccactaaccaggtctgtggccttagaaacacatttaacctctgtttttttgcttccttattataaaatagaaattaaaaaagtagtatttttcttgccagtcttaaagggttgttatggggaagtattgaatgaaatttatagtgaaatgtataaacatgctttgaaaatgtgtaaggtattatatgcagaaagtagtatttagattcaaaattgtggaagaatgcatttaactgtctaatgtgccttctttgcacatactttatatataaatttcctggaaatacattttagttgaataatttcatttgcagttagagtacttatgaatgtagtaaatattatatgttgatttgtaaaagaatttccacacatcctgattggtctaagggtagtatattttgatcaacatttgccagcaaaagagccactcttaccatgtttgcatggtgactgctaaaacatatgcaaatataattattctttcaacacagaaatcatgcatttagaatataaaatccattatagagagattgagctagaaaatgtgcctctagctaacaccatctgagtagactaccacctactgacatcaatcgattttaagccataccagaagttagtatcttagtgaaaaaaatgccatcatattccatctatgccatttgtaaaattcattgtgattttaggagaattgaaatgctagaagtagatcttagaatcaagaacacatcctgtcttgttcttytggttagtgttatatcttggttgctagagcatcacaggctgtaatgtagcatctagaaccatgggcacttcttactttcctcagaacaccactgttgtactctcacgatgctgtcaaccctgcagtacttctgtctcttgataggrattaaaatgctttccttagatatgtgagatttcaggctagaacagaaaatgattgaagttgtcttcttctaattaacatgtttatacctcatctcagaaattctgatgagattacaaaagccacacattaaactttaggtttatggagaaacatttggctagaaackgaatgctgtatttattttcatagatccaggtttcaaaagcttagtgagagcttagagcaggactttgtaaatcctgaaagttaatattctgtgacccactgtaagagttacagatgccacagacctgccctgtgcyatccatgtgttcttttttgtttttgtttttaattgagrtatgatttatatgccgtacagttcacccatttaagatatacaattttggccaggcatggtggctcacacctgtaatctcagcacttygggaggccaaggagggcrgattgcttgagcttatgagttcgacaccagcctgggcaacatggcaaaaccctgtctctaccaaaaatacaaaaaactagccagatgtggtgacacatgcctgtagtcccagctacttgggaggctgagatgggaggatggcttgaatccaggaggtggaggttgcagtgagccaagatggcaccagtaccctccagcatggacaacagagtgagaccctatctcaaaaaaaaaaaaaaaaaaaaagtaccacagttcggtggttttcaatatattcacaaggttgtctaaccactaccactaattctagaactttttatcaccccaaaaagaaacactgtatttattagcagtaactactccccattctctgcctcccctatgcactaaccactaatctacttgctgtctctatggatttgcctattctgaacatttcatataaatagactcatataacatcgttttttttgtctagcttctttcacttagcatagtattttcaagattcatccatgttgtagcatggatctgtacttcctttttatggctgaataatattccattgtatggatatatcacattttatttatccattcaccagttgatagatatttgggctgctgtcactctttggctgttatgaacattaatgtacaagtttttgtgtgaacatgttttcagttctcttgggtacatacctaggagtggaattgctagatcttatgatgtatatttaactttttcaggaattgccaaactgttttccaaagtggctgcaccattttaccttcccaccaccagtgataagggttctaatttctccacatccacascaacacttgttattgtatctttttttataatacccagcccagtgggtgtgaagtggtatttcattgtggttttgatatgcatttccctaatgactaaagatgttgagcatttttccmtgtgcttattggccatttgtatgtttctttgcaaaaacgtctattcacatcctttgtccgtatgttctataagagtctaatattagcattaagtccctgggtgttccagtctaagaacaaacctgtcatcctcccatattccctcctaatccattaagagaaccattctgtcctgtcgacaaagccagaaaccagagaatcttcttttctcccctattcagcatgtctaatctgtgattgtgtcccctaaattctttctctttagtatctttcaaatccattcttttctccatttccacccatttccgctgtcaccatgttgcttcaggctgtcctctcatttctcttgaaaaactgaaatgacctcttcattgatctccctacctacagtcagcctctcatctctcttctgctttgtctggagcaaaatctgattgctaaaaacccctctatggttacccaaattctgtagtctaatggccagcctcctaaaatgagctgcaaggccctggctccatcccttttcactagtgcacaatttcgtcaaattcgagtccaagattagattcttctctggatgccctccctgactcaaggcatctccaatctcagctttgcttcctctccgtttctcccacaatacctccccatatttttgtcatagagtttatttcactgcactatgtaattactgtggatgtcctaccctcccttctgcttttgatagttcctgggattagagtagcacttcaagtgtttgttcaacaagtatctrttgaacatctgcaatatgccaggccctgtgttgggtactgggagcatctaaacatggtcctgctcctcgatgaaggattgggaaggcctctctctgaggcactgtaaggcaacctgtaaaaagtgaacagaagtcagctgagaaaagagttgggggtaagagtgactcacacacatggtacagcatgtttgaaggccttgaagttaaaaatattatgatgtgtttgaagaaaaagaccagagagtagactcagaggaagcattcttgaggctgtgatggaggcaggggttagctcatacacggtttcaggccaggttacggaactttgaattttatcccaagtgcattgagaagtccttgcaaggactttgagcgggagatgggatgttgtcatgctcctgttttaagttagaatatccacagagagatcttttatgtggtagtggttttgaaggacagcaaggcttggaggcagggaaccagctaagaatgtagcatagaggcagtgtgtctagtggctaagttgtagtttctgaagtcacattgcctgcatccaaatcctccctctgttactctaggaccttgggcaagtgcttcagtttgcacatctataaaatggtaccattaatattacatgcccctttgaattctgaggattaagtgaatttatatgtgtaaakaatttagaataaatcttaaaatgaatgaagtgtcaaatataaaaacatttgaaagtaaaagattttaaatgactttaataagagtactaaaacattatttgtaatacataaataaatgataaaatgaaaatactgtgaaaacaaatccataagagaaactccaggaagatggttgttttcattgcaatgtacctttatacccttgttcttaatatctaaagccacatatagggtattgrtgaatcagtgtatgacatcatatacagcaaggtgtacctccagaggcacaagtcatgttgttatctgtgtgactgtgtgtacttcgcagcacrtagtgggtacagcacacagtgggtacagtgagtggttcagaccaggtctgggagtcatttacacctggtttttatccaggttcttctagttttggctgtgtaactctggacaagttttacaggcttagggaacctcagcttcttaagtgagaaattgggtatcctgaggaactcattggagattgagggtgttagatgacaatgcgcaaacagccctgtgcgtagtgtttgcaccatcgtgcgcacccatttgtgtgccagtggctgctgccatgtttttttatcatctctgaagcagttcttttccccattggcacttccgtatctcaagttatgcatcttctcctgtgcatatttgtacagggtattgtaatattcttgaggtaagtgtaaacagctcttaaaagtaaaaattaaaatttgagctcatttcctgctgagaattagttgctacagaaacagtgaatgtttcagtagcggtcaataagatggtgttcagtggatgccgtcctwgtttttaaaatccagctgtgggtttatctatttgggggaggggcaagtgtgggatctgctgctctttaacccaggttcttcactgccagagcagagacaattctgcctgagtcgccgaggcagggaaggctttgtggatggccctagcaggmagcgggctccagcttgcgacctacacgttgttcaggctcagatgttacatggtctttacagggaatctataacaaatccttaatttccagatgctattaagggggatgtagattgagcagaacagaccatggtgtcatacacctggcttctaagaagtctgattggccttgaactgttcttggtattaagaaaactgctttcaatccttggtagcacactgcaggtttaggacaagccagggsaggagggcagttatcatgcatttggcagccttttggtaacctacactgctctcaaccttgtcgaagtcccacagtcctattacatcttgttagacatggtgagacactgagacgatagtgacaaaatgaaaaacataaccaaccctctggaagcaccccagaacgtaatatgggcatttacaccagctgctgtgatgcccatgaaaaggcaatgcattttgctcctaacactggtttttgggcatcataagcaaattccaaaagaacatttgctttctttgctggataaatgtactcataagtcaagaccatcctggctaacacggtgaaaccccgtttytactaaaaatacagaaaaaaaaaaatagccaggtgtggtggcaggcacctgtagtcccagctatttgggaggctgaggcaggagaatggcgtgaatccgggaggcggagcttgcagtgagccgagatcgcgccactgcactccagcctgggtgacagagtgagactctgtctcaaaaaaaaaaaaaaaaaaaaaaaaaaaaaaatagtgctcataaratgtatttcaggagaggaagctactttaaagtcattgtatcagctatgatgaratcctagcgtgttttgtttccctgcggttatatttagcactaatatgggtctatgggaggaggcaggaaggtgaattcagaaggaaagtaggtaagagggcaaaacaatcaaaggggaaagtttaaagatacaaagtttgaaggaccattgctctggtgtaaaatagaattttcagcacttctaatgtgcagtaagtgactgataaagtaaatgactgattatctgaagtgaggaccatggagataaaggcattgaagctatgacttagcattagattagcacagacagatgaaagtgtcagccaaatttaatgctccaaatccagatcctgtattaataataaactcttcataatcaggagacaggttacaaattaccatgcactgtcttaagttctgtaagcattcgaggatcaactcagctttttggtacatttttctgggttgtgaatgagccacaggaaaggctggaactggaggtatttcttgaataaacatttgtggaatgcctgctgtatgtgaaaccttgaggcaggagggggaaagcatggggtgtggggtggaagggagcagggtagagaaatactgattaagactggccttgaaggagctcatccctagggatgagcgtcatggactcaattctaagtgacagaatggagaaaggggaacagtgctgtactagttatctattgctgtacaggttatcccagtctcagtggcctaaaacaagtatttattatgtcacactgtttctgtgggtcaggaatctgggagcggcttatctgggtatttctggctcagcctctcatgaggttcccatcctgatattagctggagtcataggcatctgaagatttgactggtgctggaggatcctatctgaaatggctcactcctgtggttggccagttagtgctagtttttggtaggaaacctcagttctttgccgtgtgccctcatgacatagtagctgacttcctcgtggtgaatgatccaaaagagcaaagaggaagccttgatgtcttttaccacctgtttacacactcttcctgccaccatattttataaactagatgcaagtcattaagtcttgcccacacttaggagggagggaattaggcttcactttttgaagggatggatgtcaaggaatttgtgaacaggctttaaaaccaccagaggggataagtgtagatgtcaggaagtaccaaagtcagtgctccaaaccctagtcctggaggaaytggacaggctctttacctcccagtgggatagcaagacatcaaaaggacagggtcggggagccctgctgagatcaagggacacaggaagaagagagtaaaaaaacagcttgacacaagtctcttggctttccctcttmgcagtttcttactccaatgacacccctcccacatctgacataactagactgcttggaagagaatgcttggagttcaccacagacgttggcttgtataaatgcatgctgagaaaaagctcttttgctgagctggaagtttagggaatttataaactgagctgggacccaatagtcgctgtggctacttatgcattaagtggttactactggtcaagaacaatttgggtgtttaactgggtcttatagggagtctgaaaaatatactttttaatattctctttacctagaaagagaaacctgttagaagtgagccctttaggccaggcatggtggctcaggcctgtaatcccagcactgtgggaggccaaggcaggtggatcatttgatcccagggttcgagaccagcctgggcaacatggcaaaaccccatctctactagaaataaaaaaaattagcaggacgtggtggcacatgcctgtagtcccagctactcaggaggctgagacatgagaatagcttgagcccgggagacggaggttaagtgagacctttaataatctagaagagattttaaaaaaatgacaaagggccagaaaaaatgatccagagagaatacagttggaattcaagtgagggtgaagttcctagtgggaaggtttgagagcagggaggtcaaaactaggagctgaaccctgaagggcatgtggagactagagagacagaggaggggaggatattacagacagtgacggtgatggggtggagggaaggaaccacatgaataaatgtgtctctggatggcagtttgtgggatggttggaagccagctgcttggacagagagttattctggggagctgaggagatctggtgacgtctttctgaaaagcttggaccagatccttgtcaggctactaaataaaatgaaaggacaccttcttaggaggggcttctttgcaatccctccctagtgacagacatagtcttcactcttaattggagagaatgagcaaaaggaaaaataattatccacaggatttggccagccagccaagtgctctttccctctgccgagagagaattcatttggccctaatgaggagtggacatttaagtattattggcagtttatcatttctcattgtgattgctcaaattatcatcttaaagcttcacctttaaaaagtaataatcctaaaatagtctattgaggccttttggacttcaaaagtattttcaaaggtcatgcaggggaaacagtttactcaaatttgtgccatttcttgtaggcttagcttaagggaacttgagttgcatattgaaagcaagtttctcataaaaacattttactcatattgtacctgtgtgtgtgaatctgttccactattattatgtgataattctagctttaagaatgactgctttgatttaagaagttctcagtgggaagataaagtggttaagggttaaagagaggtttggatttccaaatctaattttcctgcatgaatttcaatattaaaaaagttttcatatatctacgtatattttgttcctgcaacataaaagtaacttggttgttctaaactgacagcaatgctaaatatcctgcaatcctgcaaagctaaaattctatatagcagacaaaaccagcaagtgctcattgcacagttcacaaattctggtggcatgagaatgtcagctaagtggccagtcactctaggttcatgttatcttctttaaatataatgcctatttctgatttttttaaaccaatattagttcttaccttacaagttatgtaccatgcttcaacagtaatgccatacccaactttattactgcaaacttgctttgtagaagcgcccaccttcttactttacctgtagaccagccttttgtagccttggcactaatgacattttgggtgggctaatttttgttgtcgagggctgtcttgcacattacaggatgtttgccagcatccctgggctctgcccactagatgcctgtagcacccttacctggctgctgcaaccaaactgtcttcagacattgtcaaatatcccctgcagtagaaccagtrctctaaacttaaagtgttggtgctagcagataaatgtgcaaaatgagattataacaatgatgtggatgaatggagctagaaaagatccttatgtctcatggttagatttattgctttgccagtttttatcaagagcctcgataatggaaaaagcattgggaatgaaattaggatacctgaattctgctgacaaattgggcagtggtcttagwcatatttagtgactgtgtttcctgtgtctgtcaaatgagaaaatatccctgaacccttttccagctttaaaattaaacccacttttttcctgaaattcagttctcccttttcattcaccttgatggtacggtgtaagacaatagcaaccctatagtgcctatagtaagagtcagattaactcttacttaacaagcaaatttaaaaatttccaaacttaggcttatggagaatgacagtattgcctctacayatttgctttcttttggggaacactaattgttatattaccttatgtgtgaaagtgagtccattgaaaattcacttgtgggaaatggaatataggtratcaacaatttagccatagtattagayacccttttgcattttgaatgagtatctctgaataggaatatgtggcctataaagtccacatttgtgaataatggggtgtggttaaagttataatcatttttacttaaacagctctgggccaggcacagtcgctcatgcctgtaatcccaacactttgggaggtgagagcagggggattgcttgagcccaggagtttgagaccagtcttggcaacatggtgagacccccatctctacaaaaaaaaaaagtcagaaaaattagccaggtgtagtggcacgcacctgcggtcccagctatgctggaggctgaggtggaaggatcacytgggcccaggaggtggaggttgcagtgaattgagatcacgccactgcactccagcctgggtgatggagtgagcctctgtctaaaaacaaaaacaaacaaaaacagctctgtaagtggaagcaatgctgtataatataatttctgtgaatttaaaactttgagtgattcttagggttatttgatattattctaccttggagagcaaaaatctccatttaaaaatgtattgaattttcactaaagcatttttaaaagattgaaatgatgtctgttaaattagatgataaaggataaattggtgttttactatatctctgcctttcatatataaaagaatgattggaatctctgactaatggattttctcagcacattttttaaagttgattatgccatgagtcatatatttctaaatatgatattaaagtgctgcctctctttgctacttctaggtttgtttcatcagagaagatagatgtctgtacatatctgttaaagctgtacaccaaattcacaaagattcttttacatttctttttattccaagttttttcaatttcagccctctagaaatgacattcaaagaggcatgggttatgtcatcaaaacaaagtctttgaaagaggcctaaggatcatatatcattcatgcatctgaaagccttgaagactcgatagatgctcagaagtaytcaagtcagtttgcctctcgcagacattcaagtttatttaggtcacagccttatatgtagtgaaaagcccttatatctgttttttcatgcaaaaacctctctcaaaggccttgttttccagctaatcactctcactgtcatcttctgaccattagaactcttgcctctcctggggccagtagccatcttatatcctaacccccgacttctccatcttcctactttccagtggattctgtttaagatttcatcctttttaggtcagcagcccgctctctgggtctgtcatgatctttgctctctgcacaattttccaggtagaaaactctagggcagagtttctctgcaatttggtgtattagatctcagaaggctttagggtaacacaggaaatgttggtgaccagatttgcgcataagcattatttgcacataagcattatttggtttgggccagatttgcacataagcattattttgtttggcccacrttgtattttcaaaaatctagaaatttttcataatacagattcttggctttccttgaaatgcctggagacttggtaacactgagccatattcccaggcagctggagctgtgtacaagctgcccctttagaagggacacatgctctccagcttgctgcaagcaccacggtgccctagatacagcattctggcccaggaaatgtttgggtctatgccctgcttaagggaatgagacttactgattccttccaggaagtcttagcggtgagggttcgtttcctcacctgcctctttctctataaccatatggcttctgttctggaattaaacgatctattactgggagtaaaatggagaataagacatgtatttgaatatacaaagtgtgcaatgtgtctgacgaggagaaagcaacctgcaaaaagtcatagaaagtcaatagagccagaaatatttaaacaaatagaaaaggggatggctataaatgtcaactgaagctaatcatctgttgtcagctccatgtctgaagattctgtagtttaaatgaaactgttagtattaactacttactgtttccaggacttgaaacttgtgatttgttggaatgtttaattttagtgcttcctaatgctagccggcatttgctgagagactgctgctgtgccaggcattttgcagaatctctgtctaatcctcaaaaatgcctggaaggaaggtggttatggtagctccgattcagaggagagaaatgaggcccatagcttattttgctagtaaagaagcaagtgggattttaacctagtctagttcaatttttaagctgatgctaatctcaataaatctcactgcctgtcttagtttccaatatcgtcttactcgtattacattttgttgccattaggcaggtctgagactcagttttcttatctagaagaagggaggtgtaatgcctgctcttcctgccacataggagtgttgagtgttaaggaagatgatgcatctggaagtgctgggtaaatgataaaacacgaaataagagacagtgcagtttcattttcccacacccagtcagtgttaagccatgttcatccaacaaccccattgtttctgtggcgaggaaacttaatagcaacaattcaaactgctgtaaatcggagcaggggatattggaatatgattctttagaaggcagaggttatagtgatgttgtaaatttaatctttacgcttggaaggaggagcaccaaggcatgctgagcctttcaacactgagttgtaggagatgcgtcagggattcagtacgtcataatcagggttatcaccatatgaccttrgacaacttggagaattttctacagttcattttcttcatctgaaagatgaaacagtttatataaatcattttcaaagtctgacttctgcttttcccataattatcagtttagrtgacatagagctttgtgcctgttttgtttcttgattttttaaatggatatatattaagatctttaggcttgaaaggtatactttcaaggttttgattgttgattcttttcaacatcccctgtaatatggtttggctgtgtccccacccaaatctcatcttgaattgtagttcctataatccccatgtgtcatgagagggacccggtagggtaattgaatcgtgggggtggttacccccatgctgtctgcatgatagtgagttctcacgagatctaatggtaatggttttataagggactttcccccctttgctttgcactcctccttcccaccaccatgtgaagaaggatgtatttgcttctccttctgactcgattgtaggcttcctgaggcctccccagccatgtggaactgtgagtcaattaaacctgttttttaaataaattacccagtctcggatatttcttcatagcagcatgagaacagattatcctcacgtcttcacctccccagaagacaagcacacatgcctactttctctttcagcctcttgggtttataatgttctctgttagcgcatgctgtattcctttttaattctgtgcttctaactcttgaatgtctcttaagaagtgaaagagaagcctactgaggaaattctaggcagaaggtggcccccacagcaacaatggatgtgccctctccttaggttttttcaaggcaggggctttgtcccttgggatgtgaagggcctggtggcaagcactggtgtcagatgatagctttgtttcttctcattcaggtgatctatttcctaacttgacatttttgaatgcaaagccttgaaggctttgcatatgtgattgttccataagacaataagcagtataaatttggaagaggaattaggccattatttgactgactgatgtgaatgaatcactattcagagcttagattactagctgcagatgtgaaaggatcattttctgtcatttgctgagacagttaacttcctccaaaatgtggccagtgctattattaaagataatgcaccatgctgtttaaaatgcaagtcactgcagggttcattttgaaaacagacatttgggcatcttgctttacctgtggagccggaaaaggcacaaaaatgaacaaattactgattccagagctagatgtgaaaatgtaacatccacctgttttgagatctgaccttgctttttacacactatttcccccttgttttttggatgaatgttaatgaggaactagaattgaagatcgcatgcttcctagtggcttgtttcctaatacagccaccttaagctacccctcccctgtttcttccagggatagcatttgctgctgttactgaagctggatcaatgtatatggttatagaattcatatgtatccattatggtaattgtcagcctgttgctaccaagttagcttctgactttacggattttttagctcatttgtgtttgtacatagtatgaagcaaataatgagaaattaatgtgtgacaattagaataaaggaagaaatctttaaaatgggttttaggttgtattctcttgaaattctatgaattaaaacattttgtcccccatgactgttcatcttcctcatctggcagagagtgagaggtatttaaagctcctgtattgtaccaaagcagttaaattataaaggtgttatagctgaggaataaaactgacattgaataatagtcatgtttacccatatctccttatttgcttaaagccttaagaagattttgatgaccagcatttcagttttcctgtcaactgagtattagacacagwgtaaaatttgactaaaaaagtttgaggacagttttgaaagcttaggcagacctgccgggacactataggaatggcagtttactcacaatttctgccctgtggaggtgtggacagtaggggagacagattgcatgcttgcaagtggtttctgaaaagcaaacttttaggaaacctgtagagttatttatgaaaaaaacaatgaacaacaacaacaaaaaaagcatttcctctttgcagttacacttggcagggctraaaaatgagcctaaattagcttattaaactggctagaaaccctagggaaaggcttagccaatctcaattggtgcctgtaatcaataatagcataatataattatttgtaccccaatctctgggccacatcctgcaggcagcacaaagatgaatactactgagttctgactctggattcttgtcaatttaatagggtagaaagatacctgattatgtaattataatacaaggctctctgtggcagctactgaaagagatgtaaaatcaaatggaagtgaaagcaatggagagattatctggggagtggtagggggcgtggtggggtgatggggtggtggtggtggtggtaatggtccatttggggatccattgcaaatgtagactaggacttatttttgaaagatgggtcaaaggggagccataaaaagtctgaagmctcatgacaaatagataagggtatatacattaagtaattatcatataaaaatatatgcaaggcgctgacctgggtgcatgactgccctcatgaaaccctcacaaagaaaactaactgtgccttcaaatgagtacaataaaatataatgtgcacaatataataaatgtttaatataaagttcagagttatgaggggctagtataaagagcaagcaagggtggtctaatttggagaggtgaaggttgagtaggaccttcagtgacagcaatgtgataacatgaatttgagcttcagcatgaagggcttaaataaaatttaaaaacttgacattcagtggacttgaacccagacccaaaacakctgaatctgttcctgaggcatcatcatgaagactaaaagagaactttcaatttggacttataaagagcatgtgaggctgttttataagcagatgttatgtctttggagtgatttataatcttacctattatgtgaataaatacaataaattttttaaaaaactaggattagttgggtaacaactacaaaacccagttatctgtgttctcattgatcacaaccaccattcttccctttgcttctaaccaaaccaggaggacaaaggaggttatatatgtttcactcaagatgccttggaaccactgaatggagtttgagttcatgttacatatttaactggccaaaacagtagtaatctttccttccttccttcctttatttgtttgtkaaaatatttgagtgctgtctttgtgccagccctttgctgggtgctagggatgttgtggtaaataagttrcatccctcctttctccaccacacgcacacactgaaatctggtcttcactgaaggtgaagacagtagggaattatatgattccagaagatcctttcacacctttgagtctgattcataaactactataatgatcacatatacacattagacctatgtattacccaatttaagaaaagacaattcttaggtaaattaatatcctagcatagctaggaggtgaaatagattattgtgacaaaatgccaagtgtctggtaccctgtgaagccgtagggatctttcctgctcttgtgatcacccaaaaagccacaagatcccatccattgttataaatactgcttcactctctaaagtaaaattttcagtgcagtactagatacagtgtcagatcctgtttggcatcagttcatttttaaaacgttgacaaagattccctcttttaatttttaatttttaaaattgacacatagttgtacatatttatgggatacataatgatgttgcaatacatatagtgatcagatcagggcaattaccatatcatctcaaacatttatcattttgttgtattgggcacattcaatatccttcatctagcttgaaaatgagcctgggatatttctgcatctaaccaagatgaagtaacagtaatacattggatgtaccatctcatctgacaaaataaaaaaaagagacaacaaatacatgaaacaatggtttgtgggacactgggcatcaggcaacaaaagatagtgatctctgaaagatgggaaggaaatggggtgagccctgtgattgtccccactttgagagattgccccctctttaacttatgctcattwgagaggcccccacccaggcagaaccaagcaaaccctctgagttgaagaggagttgagagtctgaggagaccaagaaagctagatttcacagaacagtgtcctggagaagacatagttgtacagagggagagttctggagatctgcagagagtctacctcaagtattcaccaaggttctgatcagcacattcacatgaggaaaccagctggagaagaagccatccaaatgcattagagggaacagtacccagtgcttgcacagagccaagaatagtgcctcttccatcaaccaaatgggaaaacctcattcacagtgcatytggaagggtcttgccttaaatagtagtggataattagctgtacacttaacacagtctcatcccacataacacatcttaaagggaaaacctgaaaggatcaaactctttcaaagtaactatgtccctttgtttgagaacacagctcaagaatatttatggatatayaaaaatatccagtacccaataagctcaaaatcagtgtcaggaatctaattaaaaattgccagacatgcaaagaagcatgaaaattggactcagttgttgactcttcacttgacagttcattcacaggcccagagacctggaataacatgggtgctttagatgaaaaagtcttgaactttctactgattaccggaagattggattcatacaacttgaaatcccagggatccaaggaatcagccccaaatgtaacacattaacccaatgatgttgggtcctaagaagtcatcttttctcgctgctaattgaaaccttagcgcttttggcacygcagtgttcaaaatctgttgtgactcttgggcttcwttccatgacaacctgtttctgctcattgcctcagagataatcctctctgggttctgcgtgtgtctgaagtatagtttgcccctttctgccttcctcaactttagacttagtagtttgttggacgtactgtctgatatctatgtcagtttccaacttaaaaagtctccagtctgtgtcgcttggagcagtgttttacatgaagagcaaattagctttaaggagggttaccaacatcatggtttgccaggaagcgagagggtgggaaaactttcagcactaaaaccagaatagtgccaggcaaactgggatagctggtcaccctacatttggcctattattctactattactgggatcagtacattctttatcacatggggaaatttttcaagagcattctaacacagtggcttttgctgactctcctgtgtttgactctggaaagtggctggtttagaggaaactatattagttaccagatgtctaatccctgaagcttatactaagcctatactgtgggtgagggtcagggtcataggaagtatctcttgaccactagaagaaaattttggtctattctccctcttctttcccaaaacaaacatacttctaaattttttatttttatgtttttttttaatattgcttttgtgtcattctgccttccagaagagagtgacaaacatttacctatttctgatggctacaaaatgatttaagaggcatattctctcaatgtctgttaaataaaagtaaagctttgatgtgatactcgtgatttcatggcgattacttacgatgaatctacctaaaaaataagtgtgctgtaacatttttgaggccctacagtatgccaggctttcacaggttgttataaaactcatttgatcttcataaccctgagaggttaaatactaaattatcctcatttttaggtggagaaactgagctatcagtaacttgccaaggtcactcctgcccacccccacccctgtgactaccccaaataattagaagtagtgtgcacataaggcaaaagggtaaagcttgtggagagtgatcaaagtgtcagatgcgttacttttcagcattaaatgttaagattttctagactgtagatcattcctgagttgcagcagaccagagtaacttttaagaaaaactctggctatgtgcaggtggggtggccatccattgcggttaagagttgcctgagtgatctagtttttccagaagtaatttctacactgtttatacttgtcagagttcaacagtaaatgtgctgctcagctttaaagaaaaagctgatctcttttcaacaatacagaaatcaatcttgtttccgtatgtgagcaacaaacagaaaatgacggtttttgttgtttttttcatgttttgttttgttttgctttgttttgttttttggtctgctgcccagctttttatcagaagacttttttggagcagatggcatgtatggaagttaatttgaatgacgtgcagcttggccatctctgtagtactctgtgaattttgtctttattcttcatccctacctacctctcttcccaatagggctttcagtgcacttgactttggaactacccccttaccttctgtagagagatagacaatagaacttccttatcttctatagcaagacagacaatagaaaggagtaggctcccttccccttgcwtatattgtgggggtgatgatgaggatgttgttccctttatcaatgagtttttcccataggaaacccatgggaagaagcatttcctctgaaccagctctagtttccctacagaactagcagtgttggcctttggatgacggaaagttgcgacagtggccacagttctgcgtggcagccaggaaaccgagaactacatttgagtcttaatttttaataagtatctgaactgtggttagtatatgtgcattgaaactcctcccattcttgatattttcttttattcctttttctataattktgaattttacatatgttttcacattttattttatgcatctgtaaaaactttcatttcctcataggattaaagcaagatgtagattcttctctcaaccttttattaaacatttcaaacatgtagaagtgttgaaagaataatttaacgtgtacctgaatatctttcacctagattcatgttattaacatttcgctagtttgctttatctccctaaatacattttttcctttgaatccttttaaattatctaacccttaaatatttcagtctgaatcacctaagaacaagcacatttctcctgcagaagcacaaaccattattgcccccgagaaacttctcattgattcatgacatatggtccatatttgcatttccaccgcccccatcccagaaatgtctttttatggcctttttattataaggttgaccttttgaagaaaccaaactagttttytacagactatcataatgttttagttttttctagttgtttccttgtgatgtttagcccaattctctatctcctttgtttcccgtacactgggatttatgcttaaaggcttagttagattgggaagaatactttctagctgatgctgtgcatttcaagttgcgtcacatcaggagatgtatcccactcatgcagtgccgggtcatcccactcacaggacccatgtttgatcacttggtttcaccaccatatctttcccttgtaaaggtatgtttatctccatgaaattagcaagaaatctgtgaggtggcaccacgtaaccactcttttgacaataatctttcatctaagagatttagcatctgtggatgatctttgcccaaaccaattatgtcattgcagattgcagaatgattattttccaattatcaattcctctacatgatggcatttttctgtaaaaaataacatttctttattatttcttagtctgggctgctgtaacaaagtatcgcagactgagtggtacataaacaacaaatttacttttcacagttccggaggctggaagtcagatcagggtgccagcatggtcaggttccagtgagggccctcttcctggttatagactgccaccttcttgtagcctcacatgtaggaaagaaagccagagagctcccaggggtttctcttataaaggcaccaatcccattcaccagggctccaccttcatgacccaattacctcccaaaagccccatctctttttttttttttttttttttttgagacagagtctcgctctgtcacccaggctggagtgtggtggcacaatctcgcctcactgcaacctctgcctcccaggttcaagcaattctcctgcctcagcctcctgaatagctgggattacaggcgcccgccaccacgcccagctaatttttgtatttttagtagagacagggtttcaccatattggtcaggctggtctcgaacccctgacctcatccacccacctcagcctcccaaagtgctgggattacaggcgtgagccaccgcgcccggccatccaaaagccccatctcttaacagcatcctattaggggttaggatttcaacatatgaattttggcagagacacaaacattcagtccatagtactttattaactgggaaaaaactagtttttttctcagcaagataggtcagtgtttaatttctctcctttaattatcaattttcagaataagtaactagtataatagtcaccttcagttgtaacaatttagttttttgtttgtttgtttgtttgtttgagatggagtttcacacttgttgcccaggctggagggcaatggcacgatctcggctcatggcaaccttcaccccccgggttcaagtgattctcctgcctcagcctcccaagtagctgggattacaggtgcctgccaccatgcctggctaatttttgtatttttgatagagacaggatttcaccatgttggccaggcttgtcttgaactcctgacctcaggtgatccacccaccttggcctctgaaagtgttgggattacaggcgtgagccactgcgcccagccctagcaatttagttttatttttccttttaactagcactgtagatttagggatttcttttttctctgtgttaatatttgtttgtttttgatgttaattgactcagaattaaccagtgatagccccttcaaacatactcctgtgtccttctgaaatgccctattatctttgagtgcttttatgctttctggccctacaagctgcctctgcctcaccttacacttttactgtctcgtatctggaatcaccattttgccaagaaacgctggtttctttcagtggggagtagtatttggaaaccaaagtctgggtgtttagaatgctcacagtcctaggatgtccttgtttccaggccctttgagtagacagcattaaaaaatacatgtatttcaacagttgacttcatattgatatctccaattcaaatttaacattacaaggtttttcttcaatttaatttatatttattgccttacattaacaattatggctgttaataaataacatttattctatatcccattcttacctggcaggggagataacatgatcacgaaggtggttttcccagggcgaggtttatccattgcactctgggtgtgctgacccctgtgatttccccaaaagtgcgaaactcgactgcatgatttgtggtagtgggggactgcattcatgctttcccctaaaaaagaaaaaagaaaaaaatataaatatatatatattttacmtatatgttactagaatatatattttatataatatatattttaaaatatatctttatatatccatatatacatagtttcaacatgtcaataccaatatttctaacagtaaaactgccaaggacattttgggatttttttgctttttacagttttcctctttagatttttgtcctatagttgtttaaaagtcacttgcattttttgattactaatttgtattgttagattaccaatttgctatgcagttaagtttttaattattgggtgtgctttcaaaaatttttatttaattttcaggagtcaaaattatttttaaaaaataatttgaaagtttraaactaaattatcagtaaatctttaactacaaaaacatatatattaagttttgaaatgtccatggaatttgaagctaacttaaaaaaattgttgcccaggcacagtggctcacacctgtagtcccagcactttgggaggccaaggcaggttgattgcttgagcccaggagtttgagaccagcctgaacaacatggtgaaaccctgtatctacaaaaagtatagaaaaaaaattagccaggcatggtggctcacgtcagtagttccagctgcttggaggctgagggaggaggattgcttgagcctgggaggtttaggctgcagtgagccatgatcacacaccactgcactccagcctgggtggcagactgagaccctgtctcaaaaaaataaaaaagtaaaaaattgttatttaattactctgtaaattgctatttataatttctagaaagttgtgacagcattttagagcagttgtttaacagtgtcacctttggattagagctaaaatttgtgtagaggcatggatgctctttcaagtttttaacttattcataaaaaggaagcagacaagtgaaatacttccctggaaacgaatgcattccatctcagacttagtgcattttatcatcttaaaacttttcttcctctgggaggggagagtattttagtactttgaattttatagtccttaccagtggccactgataacctctttgccatatctagtgggcacttgaacttttcttagcacctggcacctttccctcttaaaacctcacacttggcttgtatgatactagtggacccttggttttccttctagatctgagagctgctcagcttcctttctctgctgcatagggtagtgggtgaataggctttggaatcaggtgggatatcagtctgatattaccacccaatggctatctgaccccaggtcaatcagctttctggattcagtttttatagaatgggacagataataccttccctatctatcttgttgttgggaggctcaactgagacaatatgcaattaaatcacaagtatttacaagtgttatttcagtcctttttctttctagtaaaagtgtgttgtaattgataatttagatagtgtatcattatctttgatataaaaagagttgtcccagatggttattcacctttcaggttggatgtgctgagcaatccagatgccctgtacccctttgtatggcagccacttccgccttgggaaacaagcttcctgtgtgtcccctgccctctcccaccctctgttaccatttcttttctattcccaaccatttcctaacaggaattccatgtgaggtagtctctcactcaccactattcccactcccttcccctgcagctaatgacctgccagtatttttgttcccaacttttttgggagtccccattatcctagtccccagtcccccttgtcccactcccagtgactgcccccccaaccccaccaggtttatgttcctattaccataattcaatgcctcactaggatcccctttccatctctaggagtctcttgagcttctgactctggtagtaccagccaccaccagtggattataaactaagggtatatcacgtacaattctctagctcagtggaatgaggctgaggttgcagggsaattccagtgcttggtgaaattaaaacgaccatgattcatccaggccagtgcaactcagtcatcatcagtaaacccaaagtgtcaccaccacttgggagctttgctcagatcctaccttagatctactgagtttgaatctctgagagtggggccctaaaatcaatgttttaagaagtcctccagatgactcataggcacatgaaaatctgagaaccattctacccaacagagcttggaattctaaatatagcttgccatggaaagtgtcctagattgcatttgtagtcatttagtattgtgttttattaagttgtggtttaataaaattttcaggtaagcctgaatctaacggtgatttggtgttggttttggttaattcatatatcaagtttatcagtcatcttattaatgaacttttgcaccttagttatttttggaataaattaatgagttaggagctattttgaaaatgtaggatgtaagaattttatgtatttactgattaatttatacttcatgtcaatacagaaaggatattttgcaaccagcatacaaaaatatatgcaatttagaaatgtaatgaaatgaaaattaacctcatggtcctttttatgaagaaaaatttttcctcatgatttcctctcttatgcttctggttccgctattaaaatttattctcagccattgagaactcatttcttaccataggcaggattctggaacaatgagatctattttaatctctagattaaaatgcaataaggaaggtaaacagttacctcattttgagtctgtggaatttccaacaatttctgagtccttccgcatcccaggccatgggagtgatgatttgtttttttttcagttgctagatttctgaacagcttactgtctactcttggtaagcttcagtaatagttatctatgtaagtttaacagctttttttttgaatccttaaaataaactttgatttactcaattgataataaatcaaagatattcagaagattaaatatgccygatcagtggctgtcagatgtttacctcactggcttgctctggtcataactggcaaaaatttgctacttcttgttgtcttttacctcttagcacaggatgttaggtagagatccttgagcttgtgatataaattttaaccctgaattataatttctcccctgaagtcaacaaacctttcatttagtaggtacttgactgcctgcagtatatcaggcactatgctaatctctgagaatacagaattaaataagtttctacccctaccttcacggcccttgcagtttaataatgatagtatagtgagggtgtattgagagttgggtcttgctatactctagcttgcaattgacagccattcaagggaaatttattagagaatattggggttacccagatattccaaagacaaatgggtcttgggaacacctagaactagggactctgttgagattctatttccaacatgtactcttctcacaaatatgtactcttctcctctttgtctctccctctcttccccttcttgccttctgctgcctttttctttctttcatttttcayagaagggccctaattggctcagctcagagatcaggtggccatccctaaaccagtcacctctggccatggaaaaaccatatgaatgggayggaggagggtgggaaggaaagatgatgtctaggagaaagggagtctgggcagataaaaacatctctgacaggtatatgcactttacatttatgcattctcttagtccacacagtagcccattaacctccccaagacacacaactagccagtggcagagctaggataccaatccaagtttctggtgatttccatactatgagcactgtgctacttactggttacactgcagtctttaagaacaataaagtgcatgcaaaatagccttaacaaactgaatactgaaggacaagggatgtttgtcagacaagaggaggttaggtcattgcagggggtggaaaaggcatgtgagaaggaatcgtggtatgtagcaactgggtgctttttgtaaaccacaaactgtttattatggctaaggatgagggggtgcgaggagaccagatgggggaagctgaggatattcagagggcccgtcaggaagacactgatatggtaagctaaaaagttaaaaaaaaaaaaawtttttttttttttgaggcggaatctcgctctgttgcccaggctggagtgcagtggcgcaatctcggctcactgcaacctccgcctcctgggttcaagagattctcctgtctcagcctccttagtagctgggactacaggtgcctgccaccatgcccagctaatttttgtattttttttagtaccgatggttttgccatgttggctaggctggtctcgaactccttacctcagatgatccgcctgccttggcctcccaaagtgctgggattacaggcgtgagccaccgcacctggcccaaaagtttaaattttatcctgaaatcttcagagcccatttggagatatttgagcatgggagagacatggccacattcacggttgagaaaggtcagtccgggcctgctgtgcaggatttactaagaagagacgacaggttaggaggtttaaatattggtgcctgctggatgtgacaagggcctggacaaggcmtggaaatggggatgtaagtcatagttatgacttagccccgcaggctgagaagctagatgtggggagagtagtaagctgggaggacaaggatgctccttggaattctttgtccactaagacaaagaacaccagaaggaggattgtatttgagacaggaaggagacagcagaaggaaggagaaatgaatatagggttgggcagcttgcatgttgtgcaacatgcaaaggcagatattctacaggtatttggaaacacaggccaggcacccccagagatctgtactgtagatatgattttggcagtgcttagtgtttggatcttaaatgaagccttgggaatagagacgatctcccagggaaagttgtctggggaggaagaacagcaagccacatttgcagccccaaggaacagcagcacttgaggttcccttgtacacccgtattaaaggtctagttggggataggaagtcaagtcaatgaaatttccatttttacaagactttccatacctcatatatggtctaccaggtgtcagagaattgcctcagcaagaagtaccactccccttttctaaaactatgttccatgtaaattttagctctgaaagaagtatagattttgtattaactacagatggaggcaagaagaggatggaggtataggctcaacagttagaaaagaagccttaggaacttcccattccatgcagagaycctcagagtatccctgggaggtcataagccagcttttggacatttccagtgaagggaattctactttttgaggtaactcattgcatggctgggtagcttcaaaccgatagtgtcagaattatctttctgctacttccaggtcctgtttagacctttggaatttccctcctttgcagtagtcttttgatgttgtaaaagagccatcctggccctccagggccttcttggtcggctctaactgttaatagggtgagaacttatttataaggcagaagccagaggtggaatttggatgaagaggtaccctaggctctgacatctatcagctacttctttgctggagaatgtttaggggtcactttaacatatcctactcccaagctcatttcctagtagaagtgcttataattaatttttttctatggaatgcagaaatcaaatgaggagaaactccaaatattgtaagctttaagaaatatataggcaggcttagaacaccktcattattctagtctctctcccatggggtgttatggcaaaatgagttcatttgtttattcattcaattaacatttatcgagtacctactccgtgctatgtgatttgagatagggagaacacaactgaaataaacacacaacattttggaacacatctacccttgactaattgaaatatattggtagtccaccttgtcctttttatttaaggatggtattaagcatctaatttaaaatcgcttacattcagcgcatttgtctccttcaaagtgtgaaattaaataatccaaacttaaagctgttggaactttaagttatcttgagccttgaggggaatgtggctacgtagcctgaatcatgtagcatgcagttgctatttctgctttttcctataaatgattagcaatgaagaagcagcatcagagataagacgccccccttgcccctcagaacattatttctcctcaggaatgctaaagcaatcttccttggaatgtagtaatccatactaagcaaatcactgtaatgttacatactggctttgtacagaaagtgctgaaccctgctaaaactgtttctgcctatataagtgaaaccttagcttccccactttggaacaccaaccccatccatttggagtgtgtgctgcccaggtggctgttcttaagctttgcactgcgctggaataaactcgatgcttaatcataatttctgaatctcgttatttaaggttgacaaaggcaaagtcttattgtactttctagcttccttagggtagagaaatcagtttgcctaaaatgaaactcagatgggttattctgagacctcaagggctaaattagcatgttctttcccttgtaaattagggagacttggattgctaactgagctttgccctgggtctggggacaaaggtaaaaatatttgatcagataacagctagttttcaaagggctacttgatgtattgttcagtctttaatctggaaacacactttctctgcaggttaattaacactagggtaaagatttttcaaagcagattgttttcagttaaaataaagtactttttttaaaaagtactttttaaaaaagactgaagtagtaaggggaaaattaattatcacttttaatgtacatttgcagtaatactgtgcttgccttggaaaaaatatattgaagtactgaaaccatgtgaagtgtcacaattccttcttgtgttacctgtgttttatttatagtctgttgtgcaactaattgcaagattatcatatgtgtgagcacaatacataatgtaaaacctcagttgctataagaagatatcagaatggctcacctaggacatttacctaaataartcatcatgcatatgacattgatttggccaataaaatgaggataataacaacacctttctcacgtttacagttgaaagcattaagttgttaagtataaaacacttgtggttttttgtttgtttgtttgtttgtttttttgagacagattctccctctgttgcctaggctggagtgcagtggcgccatctcggctcactgcatcctccacctccggggttccaagcaattctcgtgcctcagcctcccaagtagctgggactatacgcacgcaccaccatgcctggttaatttttgtatttttagtagagacagggtttcaccatgttggtcagactggtctcaaactcctgacctcaagcaatccgccggcctcagcctcccaaagtgctggaattacaagcgtgagccaccatgcccagcctatgaaacacttttaacatttctttttttacaacagtcagacagctaccatatgagaaaaatactgttcattatccccatcttatgagaaactgaggcacagggaaataacttgccaaaagtagtgcagttacctacttgcggatccaggattcaaacctagggagtctggttccagagtctctctgctcttaaaagctgtatgagactgcgtctccaatttctagcagagaaaaaacctgtctacctgcccctcccatgtttcctgctttgctgtatgtttaggtggagtggcctcctatgtgaaggtggatagcacctctttaaagataactcccaagttagggcttaaaaccctccttactacataacagtccccttctgtataactttattcctcttgtgttactttaaggtttaaagaaaaataccagaggcctagatagtccaataytttctttatccagcaacaaggagaaagcctaggtggtgtctgggatttttgaggacctgtcaattaaaaatgtatatgttttatctgaagtctgttgagattagaatacttctgtcttttggtttcatattttattagtttcaggctttttaaagtttgggtttttaaattacacatttgaaactgactttcaaaaaaaattttgtttaaattacacatttgaaactgactttcaaaaaaattttttgtttaaaaaaatttctcacattgccgatagtactgatacagctggtaaataaaacaaaatctgatctttagaaaagcagaactttgctttttttcccttaatcaccaacagatgcaaatagctatatacaaatgatattgttctaaacctgcaaaaagcattttttctgctttattttatgcaaaacttcaacacttcaatcttatttggattggcgtttattttgatttcagttggctccaacagagcagcactggggccttctacgggaattgttccagcatctgacagagcacagacttccttatttaaataaggaagttggacattggtggtattaatggttttgccaaggggacccagaggattattgaaaggaaatacacaaagatgactttctgattttcatttttactatgttaaatgttcatttctaaacaaccaatatgaagaagaaaacgctgatatttatggggggaaatctatgaggcaacattatatcttcttttgatctttattgtttgttttttcattctcagttatttaattatattggtgaaggggatagaagttagtgatggcctccaaatggtaaagcaaagtgtatccacagctaatgttactactaatgccaaactgcatgttaagttctacccaaacctgtatctctcttttgcttcacctatgtattacgtgtaactatgtgaaatcgtcagtattcaactgtttttgatctgcaaaaacaatttcagataattcaacctaataagttcaggggtcagtacacgttttctgtaaagacccaaatagtaagtaattttggctttgtgagccagatagtccctgttgcaactactaataactctgccattatagtatgaaaaccacaagagacaatatgtaaatgaacgaatgtggctgtgttccagcaaaactgaaatttgaattttacataatgttgacatgaaatattcttttttccccccagctacttaaaatataaaaatcattcttaacttgcaggctgtgtaaaaacaagcagtgtccagctttggcccatgggcaatagtttgccagccactgtttaagttgaacttggcagctactgactttgaaatttctggtaccttgtactctcttttcattgacctaaaaccaattgcattatctcacccctcagaactccccaccaccaagacttgtttcaccttctcacctcccttcattatcagtggcacctcattctcctcattctgccattttggaaacatgggattcatcctcttttctctcttctccataacccatgtccaacaggtttcatgggacttctcggttcattcgcctactctcttcccttccaccgagagccattgttcggttcacaacctctttgtcactaggactattgtaagagaccctgcctgagttcttcctttgtcatttgtcctctagaacccattttctactaagccacaagtgttatttttctaaagtaactgtgatcatatcagtccctagtttaaacagtcttagatttcttccattggttataggctgaatagaataaagctcctataaaatttcgtggtctagttctgatgtagctccctcaccaagccaatacttaggtcacaccctacacctctttataaacttcacaacatcttcagttttcacaggctgttcctctgctgggagagccttttcttaccttttctctgagtgttgatttccttcattccataacactgagctcagatgcctcttcatctgtgatacttcccctgactcttcttttgttgacttgcctcctctgtattctcagatcccttgygacataggcctygagtatggcattaattcaagcaaattgtagtttttgtgagaagggccaatggactaaatgtgtgcatccctcccctcccaatgcatatgttgaaatcctcaccgccagtgtgatggtttttggaggtggagccttttgaaattgttcaggtcatgaggatggagccctcatgaatgggattagtgcttttagaaaagaggccccagagagctgctttgtctcttctgccatgtgaggtcacagtgagaacacaaycatctatgaaccagaaagggggccctcactggacacaaaaacttgctgatatcttgaacttggatttctcagccttcaaaactgtgagaaatttacaagccacccagtttatgttgtgtgtgtttttgttttttatttctctcgctctctctctctctctctctctctctctctctctgtctctctagagaggcacggtcttattctatcatccagactrgagtayggtggcacaatcatagctcactgcagcatccaacttctcctaggctcaagcagtcctttcacctcagcctctcaagtacctgggactayaggcacgtgccaccacactgggtgttttttttttttttttgtagaaacaggatcacaccatgttgaccaggctggtctcaaactcctggcctcaaatgatcctcctgctttggcctcccaaagtgctgggattacaacaatgagtggtattttgtgtcagaaacccagaaggactaaaactaacataaatgactatagggtccttgagagtagaaaccatctccttgccatcttgactttttttttttttttggatttactcataaagtcacagagatctaattgcaaggttacagattcaaatgcccatgaggccaggctggtcacttcaatgacaaaagtggacagagtaagatctggggtaaactagcaaggacatgtcctatctcgcgggagtcagcctctcctcaggtccagctgattatagtcattcaagagtgtgatgtgtgtagctggatgtattaattttcaaaagaaattggaaaattaagattttaatgtaaatatcccaattttaaaatattggcaactaatttaccttttaatgaacactttgtggacaaaaattttaaaatatcaatctgattgtgggctgaatgtggcccttgagaccccagtttgcaacacctcgttggtcactgctcttagccacagacagagcctgggagccagaagatctaaggttgtgggggtacagaaggacctcttcctagcctgtgtttattctgcctttacatgtggcttcctccacaagatggcacttagactgcccagccacactaccacacaagtcatgagatgttacttagccaccttcaaaaacgtgaaagccaaacaccacagcaaattcattttataccatcctttcttctccctggtcatggattgtgaacaggctgagatgatctcctgtccccctgccacccggagccaggtgaaaccctctgggagaagctattattcttttttttttttttttttttttttttttttttgagacggagtctcgctctgtcgcccaggctggagtgcagtggcgcgatctcggctcactgcaagctccgcctcccgggttcacgccattctcctgcctcagcctcccgagtagctgggactacaggcgcccgccactacgcccggctaattttttgtatttttagtagagacggggtttcaccgtgttagccaggatggtctcgatctcctgacctcgtgatccgcccgcctcggcctcccaaagtgctgggattacaggcgtgagccaccgcgcccggccagagaagctattattcttgatggatgttttgactggccatccagctggatttgctgatggctgttaccaaatgcttaggttcctggtcagagctgtggtttcttttctcagtaccccaagaataagaggttattactgcagctaggaattaagttgtccttcttttccagcccatctgtgtggccagtaaccacttgagagaaccacatgagacattgcccaagaggttacctggaaaagagaattttcataattgatagctttatttggtcttccataagttattcatctccccccccccacacacacacacactgtattttactgtctacctcctagttatatataaatctcacttcacctgatggccctcaggagacacctgtccttaaacatttgtcaatactgtctgctaaccagtatgaacacttagtgtaaactttttagcctgaactgtcaaggctttgatatttccttgaaaacaaagcaagacaacaataaccacaaaagaagattctctatttggtctttttctgtagtcctgagacctgtgcttctgaggccaggagcttgggggcccagagccgatgtgggtgggcagatcggggtgggaatctggaagcagcatgttcagaaccatgtggatactctcctgtgtacagagcatgtggcttgagaagagggctcagaggaggtccctgttctgggaagtgtcatgccttgtccctgaaggctctggatgtctggccatgtgttcctgagggaggcagagggatgctgatggaaaggcgtagaaaggaggagatgctcctctaactcgcatggctggataacatccttgggtcctgacagaagaggcagctagctttgcatttggtgtattattattaaataacatattttaagtgcttactatgtaccaggcactcatcaaatacttttcatgctagagcatttaattctcataactcttttctgatgggaagtgactattcttattttaggggaaaaaagtaccttgcccaagtacccatagctggagatagtaattaacagagaccaagtttgaatcagttctctccaaccattgtccctgtgtctgccttctgcactatgctgaatgcctcatggtggggagggagagagagttggtgttgagtgactttgccacctgtgaagtatttagcaccatacatgccacatgggaaaccttcaaaaatgtccaatctgtcctttgttgattggctatcttttgtaaatctgttgaaaactattctggggccaatggcctttgtgacaggaccactatgtgagaatacttgaggtacttactttgtctgtgtttagtgatagggatgctttctaagtgtcatgtcatcagatgagtgtccttgaagtcaggtttataaggtgagaaggcagataacttgacaatttaacagttgcatgtaaaagcaagacttttctgctgaaattgaggtggtgatgattacaaaataaattgactagagtatttcacaaatagaagaaaaatgagttttccaagtgtgtgtatcatggtaacacagaatgaatcatttgctccttttaagtagattctgctattgctatgatctcatgcatgttcattcctgagatttaggttataatttcaaggtgtatctgatacacatacaggattttttactttcaagtttgtaaaggtctgtgtttacctacttttacaaagggaaaaatcttaggggttttggttcagttgaaggtaggctggtaggttaaagcagtatataaataaatttaactttgccatgtgtctctcccagggcagatgtgtcttgttcttctaagagttgaataaactgggtataaactttccatattgaggagacagtagctgtgcttcactttcaacctctaacatttttcctacttgaatttaaacctaacttcaaaattacccatgtgtttaattatgatgactaaaacacccctccccaacacacacacacacaatcttaataagtcatagaatttaatccatgaagtacagctaaggaactgagatttgcaaaagttaagtaacttgaccaaactactctgccagtcactagctgtgacttcgtttaaaaagggagtaacagtggcagctaccttatagagttgacaagaggatgaaatgagttaattactttctacaaaatattaacagcagtctctggctcatacatagttctcaacaaatgtgagatactgttatccacacctaggaagtagcagagttgatttctgtcagattcattcattcagtaaacatttgttgagcacctgctatgtgctgtattctagggagatagtttttgttaagaaccaccatgacttattacctccagtttaatttccagaaaaatactttccctctttgtaaactggaaaataatgtgaccaaaggtatgatgattcgtggtccaccagcatttctttaaagccttcaaaataagcatcatgcgtaagtattgtttaggccaagaatgtagatagcatagtcgtttttcctgttgacctcaaggtggtactgactttacgctggagcatacagcaatggagtggtgcccctggtccacctgcttgcctttaaggaatctgttgaatctgttaacagcatgctgctcctcagcttgtgaaacaaagtttttctcaattactttttataaaattaaagattttgttcacatatagttaacaaagcatttacctttgaagtgcaaaataaaatatttaagttgatactggtcaaacttgttagagccaaatgagattgagaagaatgaggcctttctactaaagctgtgtaaagtaggggagttgaaataatataaaataggggataagagttgtggcattttttttttaaacacagtgactttaaattgatatttaaaatttaatatttaaattaatattttatcatctgaatggtaatcaggtttctgacaaaacaggcttacataggtgggaccaccatcttcccattagattgacatttctgactgtctgatacttcattagtgctattcataagctacgttcaacatgaaatggcaaagtaagggcaccagtaattgttctttcacagttccctgggtttgagtcattgcaggacagacctctgaaccaggcaccgacaagaatagatgcacaataggaaaataaaacaacccaagagctgaagcagaaagctctcagaactcccaagtgtgttcgcatttagctgtgtgaccttgcgccagtcatgatcatccaggtcactggttttctcatatgcatgcaatgaagtttctaagacctcttgctgaagttaggtcaactttggagtttaataaccactcagggaaagacaggagacgaagcacgttaaggggacagggattcgtgatttatgtaattatagtagctttgttgtctgttggaaacggcagtggtggatgagtcaccttggcatgtagctgttggagatcagcgatgcttttttggttcaaaaaacgaaaccaaaggaaaaaacacctttctacagcccaagattaggtgccagtggtcagagtgatgccaagttctggaaatagcatccaggatcttgtacggatgacagtatggagggatggttgtcatgaacaggttttcccagctgaacccccacttgagctttccccagggaaggcgcacatttgggacaccatggtggtataacatcacccagtaaaaaatccaccccaaacatgttgcttgggaagtcaccaccagtgaccgagaggaggcaggtggtattttggacctccttcctctgcctggtttggttctctgaggagagatgtaaaaggcacgttccagacgaatgcatgttctgtactacgagcttcagcagcaggcccccccagtgacttggcctggatagcatgagcttctctagggacaggcagatctgagccacctgttctttcctctttcctgggccttttcccagactcctccaatagccagagatgctgggaaaggcccgccctctcaggcctggaccagaccttgcctgatttttttattctatgcttccccacagtccagctcaacctgtcacagactgatgtccccagggcacaataggaagaggttgggttaggggtcaagataggctcattctgaatcccagctgtgccacttcctggctgtggagcttctgataagttgcttagctcargcagtaaatgcggtaggattaaccatcatgcaggtagcctcattgtgtccctaatatttacattttatccttaagccatatgaaaatgtctttccttagaggaaagaggaaatgcatttccttgaaggtgggacaagaaaatagacattgaatcctccctttccccactgctcagcccctgagagtgtgtgataagcccccgaggccaatttgacaagccccaggacaacaattgtcaaactttgtaagcaacagtccacttaaagacaaatcttaggaaatactgtaatatgtgaaataagtaaacataggcttttgtttatagaaatatgctaaagttgaaattagtagtaaacccgataggaccagcgaagccctttttattgatacagaaatttgaaattgaggaaatagatgactgatatgatcttttcgttagaactttcagataagtaattgcaaatagtagttaaaaaaaaaattctccttccaatcaatgatatggtcaattgaaaagatagatggcttaatatgctaaagctgcccaaaatatgtcaacttgcatttatttgatcacatgtacagatgggaatgaacttttaaattattgcattttttaaaaatgtgtatacatttttaaaataaagaaaatgttaaaatttctgaaacacctccatagagttccagagtttggcagaagygtgctttgaaacacgctcgcttacatcttgcggcactcaaatctcaatttgctttccatttcctatttggttgtggcatgtgtgtgttggcttatggaaattgataccatttttagtactaaaagctatttgatgtaagaaatggtgaaatttgaataaggtcaggagtctgggtgagagtattgtatcaatgtcattttctcagttttgatattgtactgtcttatataagatgttaccgtttggggaattggtcaaaagctacatgggactctgtactatttttgcaatttactctgagcctataattattgtagaatgaaaaggtttttaaaaagtcatttgaaaataatgattttgaactgttaggaggctgtgcaactcaatcaatagagcagtgtacacaccacacttatagrgctaatttttatttagcttaccttaaaaagaaaaaacacaccttttctttccttgctactgagttccataaactccacactcactctgtcaggactgtgacactgttgaagctttagaaaggaaacgcagccagtggcagatcaaggagaactctttaagggaatctgttttagctgctgcttaattacttaagaagaaagcggtgcggaaacccaagagttgagtctatagtcacctgatagagaaaaaggtgcatgaatgatgcagcatgttttcctgaagcatttctatgcttaaaacatgtagtaattcgagcaaagcagtgtcaacatgccttattattatgtgtcttggtgtccaaatcagagtgcctatagcccagtgtgatgagtattattctacatgaaaaaagaccaagagttaaaaatagttttaaaagagtaaacctttgacccatttgcttgcctttgtgtaaagcaaaaatgggggggtatggccgtagtgaaatatggttctctgttctcttggatttttacgacatgctgtaagttactgccatgtaccttgataagattgatggtggttttgctgtttatcacttggagaagtgaaacagaattccctgagtcagattatctgtcttcattgtaattgccgaaacattcaggttccttaacctgaaagagtgattgcctcatgtgttttgactaaaatggattagtgtakttgatcacatctatcagacacctgtgggtgaacargtctcaaaacaacttctttagtaaatattttaatgggtgctaacataatgccattaaaaaattttcatttatttgggaacataaaataccaagaccataatgttcttagcattaagcagggctgtagttctgggccagttgtagagactgtcttggctgacccttgacaagggactgtgccctcagctttatcggtctgtctgaccagcttttccggcttcttctccagggttatcaatgccgggaagagcacacacaatgaagaccaagccagctgtgaggtgctcactgtgaagaagaaggcaggggccgtgacctcaaccccaaacaggaactcatccaagagacggtcctcccttcccaatggggaagggctgcagctgaaggagaactcggtaagacccttctcgatccttggttctcaggtgagaagaatggcacacactttggtcccactggaagacattagggcttcacctaaatctggaatggaagtgagaaagcagtgtccccagagttagtggggtggcgggcctatcgtcacgacatcacacataccaagctgaaggcgacacatgtatgaccagcttgtggttaggtttttaacacaaagtaaatgaaacacccacaccatatgtatctagctcttgttgcaataattgatatatttatgtgtgtgcatatatatatatacacatatatatgtgtgtgtgtgtgtatacgtatatatatgtgtgtatatatatatacacgaatatatatacgtatacacacacactcacacacacacacacacacacatacacacacaatgtttgacggtttcaaaggagccacttctaggtctttgtaaggaaatagtccgaaagcctctcatgaggggtggaagtaactctggctgttgctttgagccctgccatgactctgcccctttctcctccttgcctgctcatgatccatttgcagcctgtgcctgatgttcttccaaataaatatctatttcaattggcccaaaactcttgcagcccatggggtggccttgcagactgaacactgttgaaaaaccacaaaatatttmtcctgtctccagtttctggggaataaagcagtcatatcctcagaaagctctgaagaagctctcagcaaaggacggggagtcattgacactctgtctgccagcagatgatgtgctttagagagagatgtttcctgggaaaatcaggagacacagaatggactgacccaaatgtgactattcattctgatcatcttgaggatatttttgtgtaaaaattttcataggattttaaaagatctaggaatcttttcttagttttagaaatagtatctcattgcggctgggcatggtggctcacgcctgtaatcccagcactttgggaggccgagacaggcggatcatgaggtcaggagatccagaccatcctggctaacatggtgaaaccccatctctactaaaaatacaaaaaattagctgggcatggtggcgggcgcctgtaatcccagctactcaggaggctgaggcaggagaatggcgtgaacccaggaggcagagcttgcagtgagctgagatcacgccactgcactccagcctgggcgacagtgcagactccatctcaaaaagagaaaaagaaaaagaaatagtgtttcattgcgtctatgctcagggattgataagtattgatttattttgttagtcctagtttaatttaaagttgacttayggggatttatcaattgtacatattttctaggttgaaggaaggccttttccaaacaaccagagctgaggacccagatgggcagtatagaatggtgatggttaagtgcccaggccctggagtgagatgactgtgcagtctaccactttagctacttaattttgggatggttattctttgagcctcagttttgtctactctaaaaaggaataacaggctgggtgcggtggctcacgcctgtaatcccagcactttgggaggccaaggcgggcagatcacgaggtcaggagatcgagaccatcctggctaacacagtgacaccctgtctctactaaaaatacaaaaaattagccgggcatggtggcgggtgcctgtagtcccagctactcaggaggctgaggcagaagaatggcgtgaacccaggaggcrgagcttgcagtgagctgagatcacgccactgcactccagcctgggtgacagagcgagactccgtctcaaaaaaattaaataaataaataaataaataaaatataaaggaataacagcagtaactaccaaatggtagaaggaggctgattggaaatatgaactccagtagtccgtggaaaatgttgagcatgtgtcttaataaatctgtaataagcgttagtgattattatcctgaggttagtcccacttcgttattctctatgagtgaagtttgcatgtttcttcacttgtgaattagagattacacaattcctttcatacctactcgacaggattgttttgaggattgttattatgggaaagggcttggaaagygtgaagtgttcatgatcattgaataggggcgccagtgacttagtgttgctctttccactgatattttccccctgcccctgggatataaagtgatctctgtaaaaatcagtcagtgttgacatatggcccaaggccagttggtgatggcatttttcctttttactgagttccttctagaaatggagctggggtgactttttaacttcttgtccttaagaacagtgaaactggtgcataagcactttgggatggagctgtggccctcccctgtggtggttcccaatatctgtggggtccgtccttcaagagcaagggaccagcagagtggagacaccctggtgccccagtcctgctccgaccacagcagcttcatttctgtctgctttacctattaggcttcttactgagtttaagacaagagttgagcttcttttcctttttttaaattgtggtaaaatgtacataacataaaatttaccaattttaggcatatagttcagtggcattacgtatattcacatgtttgtacaaccatcaccctcatcatctccagaactttttcaggttctcaggctgaaactatgtattcattaaacactaactctccattctttcctcccttggtgcccaccattctatttcctgtctctgagttgaccactgcaggtacctcacataagtagaatcatacactatttgtccttttgtgcctggcttatttcacttagcataatgttctcaaggttttacccatgttgtaatgtgagccagaattttttacctttcagctattctgaataatgctgtcgtgaacataggtgaacaaatatctctttgagtccctgctttcaattcttttggctatatatctagaggaggatttgatgaattatgtgataattctgtttaattttttgagggactaccaccgtttttcacagtggctgctccattttacgttcctaccaacaatggagaggggttcctatttctccacgtcttcaccagcacttgctttctgttttctttttttaatagtaatcattctaatgggtatgaggtagtatttcactgtacttttggtttgcatttccctaatgattagtgatgttgagcattttttcattattggacctttgtatatgttcttcagagaaatgtctattcaagtcctttgcccattttaaaaattgggttgtctgttctgttgttatttttgtttgtgctgctttttaaaaatttgaaaaccattacctagtgaggaagataaatcactgagcacctgctatgtactgagaactggatgctggagatttggcagggaatgaaatagacaaaatccctacttagagggagcttccattcgtagagggagacaaaatatagtgtgccagatgatagacactatggagatacaaaacaaagtggggaacccagaatataggaagtctgagggtgccggggtagttaatgaaggcatcactgagaaggtgacatttgggcaaagatctgaaattgcagctatttgaaggaagagcatttatcgttctggacaattgaaagacaccaaggtgggagccggccctatgttctcagggtttaggaaggaggtctgtgtggttggagcagaaatactgtaaagcctggattgcaggaaatgttgtcagaaaagtcataggagtggagtgagccagtcgggaaggacattgaaggtcactgtcaagactttggcttccacttctataatttactagcagaggacactggacacactggttaaaagaggccagtgatttttcccatctagaagacatgcccttaatggtaaaactcaaatatggtagcacttaggaaaggatggtgatagtacagggcttagggcaagaaaacatccacagagataagtaaagcggattgtacccacccttcctgttccctcacccactgaacatattgaactctgagtctgcatgctgagctttgggataaggagacaaaacacaacatagttcccatcctcctaatgctgagtcgattggggagatcactggcagtggtactacaatggagtgagttttcagagacagatgaaaagcccaggttgtagggaagtctgactcattttggtcactgatgatttggggaacaaccaaggagaaggggatgggtaaggttaggaaagccttccttgagaaattgacattagagctgggatcttggaaagtgaatagaagtaaagcgagctaacaaaagaaatgggggtttcttatagaaggaacatgtataggcaaagacaggttggcatgagagcacatgaggcatgtcttcctgtgttttggaaaatatatggtctcttggagggttggcaagacaggaagagtaagcaggcatcacaagggtcatcatacaccataataagctgggatttttaccaaagtattttagacaagggcaagatgactcaagacagtgatggcagtgggaaggctgacttgggaaggccaggagtccaaacctagaggctgggatgctagttaggaggctcatgcagaaatatgggtgagaaatgataacggcttaaaataaggcactgatcagtgcaagggacaggctcagaagagattaaatgagagatacagttaaggtgagcaaatgaccaactgcttggaacagggagaagatgaaggtaccaggctcagccactaggtgctggtcactgaaaagtggaccactggatggtaaggggatgggcagagatgatgacttgcgttttgagtatactgattctgattctacctttccaggtgaaagtgttttgtaggaaattagaaataagggtttggagctcacacacaagcctaaggaggcttagatttaaggagttacaagattgaaaattatagttgcagccatagaagtggcttaggtgacacagaaggtataaaagtgtgtaacagaaacatgatgacagtggggttctagaagctccaagaagagakgggtactgtgaagagggaaggtatctatggcatgggccacacagtgataagaaagataaggatgggaaaagtggacatataatgttataagcaaaaaatggaacaacaggataaataatggcatcatggttttatctgcaaacagagttgacaggcatgaaggatggcaaaccgaagatgcatgaagtccctctggaatacatatgcttaatttctccctcctttcttgacctcttttgtcccctgtaaatttagtaaagtcaaaatatgtgttttcaaaagatttctttcatgtataatatatcttcaccttccttggaggttaaagaaaacctaaaatttttaataaaataacatgaaatttacaatgaaaacagtattataggaattttttatttgttagaaacatcagtgatgtacagaggatttcaatagaagtgtgactttatatttcatgacctttcttatattgagtggcaatatggtagccgggtagcaacgagatgacttctttttttgagatgaagtctcactctgtcgcccaggctggagtgcagtggcataatctcagctcactgcaacctttgcctcccaggttcaagctcttctcttgcctcatcctcctgagtagctgggattaccggcaagcaccaccatacctggctatttttgtatttttagtagagacagggtttcgccatgttggccaggctggtcttgaacttctgacctcaggggatctgcccacctcaggctcctgaagtgttgggattacagacgtgagccactgcacccagcgagatgaccttttctactacagataataatgaattggtgttaagatttaaagacaactcttagccatcccaaataccaattcataaagaattattttatccttttcagcctcccattttaaagcaaaccttaaacacattttttttggtagagaaaataatataactgttttctgcctctcccagcttccatgaggcatttactgaaggaatgtcatttcctgtgtttgagctctttttttttaattgtaattggtggtaatttggcattttattattttttttttattatactttaagttctagggtacatgcgcacaatatgcaggtttgttacgtaggtatatgtgtgccatgttggtttgctgcacccattaactcatcattttcattaggtatttctcctaatgctatccctccccctgctccacactccgcgacaggcccctgtgtgtgatgttccccaccctgtgtccaagtgttcttattgttcaactcccacctatgagtgagaacatatgatgtttggttttctgtccttgtgatagtttgctcagaatgatggtttccagtttcatccatgtccctgcaaaggacatgaactcatctgtttttatagctgcatagtattctgtggtatatatgtgccacattttcttaatccagtctatcactgatggacatttggattggttccaagtttttgctattgtgaatagtgctgcaataaacatacgtgtgcatgtgtctttacggtagcatgatttataaccctttgggtatatacccggtaatgggatggctgggtcaaatgatatttctagttctagatcactgaggaatcaccacactgtcttccacaatggttgaactagtttacactcccaacagtgtaaaagcattcctatttctsmacaacctctccagcatctgttgtttcctgactttttaatcgccwctctaactggtgtgagatggtatctcattgtggttctgatttgyatttctctgatgaccagtgatgatgaggatttttttcatgtgtgtgttggctgcataaatgtcttcttttaagaagtgtcagttcatatcctttgcccactttttgattttttttttccttgtaaatttgtttctttgtagattctggatattagccctttgtcaactgggtagattgcaaaaatttctcccattctgtaggttgtctgttcactctgatggtagtttcttttgctgtgcaaaagctcttcagtttgattagattccatttgtctattttggcttttgttgccattgcttttggtgttttagtcatgaagtccttgcccatgcctatgtcctgaatggtattgcctaggttttcttctaggctttttatgattttgggtctaacatttaagtctttaatccatcttcaattaatttttgtataaggtgtaaggaagggatccagtttcagctttctacatatggctagccagttttcgcagcaccatttattaaatagggaatcctttccccatttcttgtttttgtcaggtttgtcaaagatcagatggttgtagatgtgtgttgttatttctgagggttctgttctgtttcattggtctgcctctctgttttggtaccagtaccatgctgttttggttactgtagccttgtagtatagtttgaagtcaggtagcgtgatgcctccagctttgttctttttgcttaggattgtcttggcaatgtgggctctattttggttccatatgaactctaaagtagttttttccaattctgtgaagaaagtcattgatagcttgatggggatggcattgaatctataaattactttgggcagtatggccattttcacaacattgattcttcctatccatgagcatggaatgttcttccatttgtttgtgtcctcttttatttcattgagcagtggtttgtagttttccttgaagaggcccttcacatcccttgtaagttggattcctaggtattttattctctttgtagcaattgtgaatgggagttcactcatgatttggctctctgtttgtctgttattggtgtataagaatgcttgtgatttttgtacattgattttgtatcctgagactttgctgaagttgcctatcagcttaaggagattttgggctgagaagatggggttttctagatatacaatcatgtcatctgcaaacagggacaatttgacttcctcatttcctaatcgaattccctttatttctttctcttgcctgattgccctggccagaactaccaacactatgttgaaataggagtggtgagagagggcatccctgtcttgtgccagttttcaaagggaatgcttccagtttttgcccattcagtatgatattggctgtgggtttgtcataaatagctcctattattttgagataagttacatcgatacctggtttattgagagtttttagcatgaagggctgttgaattttgtcaaaggccttttctgcatctattgagataatcatgtggtttttgtcattggttctgtttatgtgatggattatgtttattgatttgggtatgttgaacaagccttgcatcccagggatgaagctgacttgatcatggtggataagctttttgatgagctgctggattcagtttgccagtattttattgaggatttttgcatcgatgttcatcaggaataytggtctaaaatgctctttytttgttgtgtctctctctgccaggctttggtatcaggatgatgctggcctcataaaattagttaggaagaattccctctttttctattgattggaatagtttcagaaggamtggtaccagctcctctttgtacctctggtagaatttggctgtgaatccgtctggttctggactttctttggttggtaggatgttaattattgcctcaatttcagagcctgttattggtctattcagagagtcaacttcttcccaatttagtcttgggagggtgtatgtgtcccggaatttatccatttttctatattttctagtttatttgtgtagaggtgtttatagtattctctgatggtagtttgtatttctgtgggattggtggtgatatcccctttatcattttttattgcatctatttgattcttctctcttttcttttttattagtcttgctagcagtctatcaattctgttgaacttttcaaaaaaccagctcctgaatttattgatttttttgaagggttttttgtgtctctatctccttcagttttgttctgatcttagttatttcttgccttctgctagcttttgaatgtgtttgctcttgcttctctagttcttttaattgtgatgttagggtgtcaattttagatgttttctgctttctcttgtgtgcatttagtgctataaatttccctctacacactgctttaagtgtgtcccagagattctggtacgttgtgtctttgttctcgttggtttcaaagaacatctttatttctgccttcatttcattatgtacccagtagtcattcaggagcaggttgttcagtttccatgtagttgagcggttttgagtgagtttcttaatcctgagttctaatttgattgcattgtggtctgagagacagtttgttgtgatttctgttcttttacatttgttaaggactgctttacttccaactcttttggaataagtgctatgtggtgctgagaagaatgtatagtctgttgatttggggtggagagttctgtagatgtctgtcacgtcctcttggtgcagagctgagttcaagtcctggatatcgttgttaaccttctgtctcattgatctaatattgacagtggggtgttaaagtctcccattattattgtgtgggagtctaagtctctttgtaggtccctaaggacttgctttatgaatctgggtgctcctgtattgggtgcatatatatttaggacagttagctcttcttgttgaattgatccctttaccattatgtaatggccttctttgtctcttctgatcttctttggtttaaagtctgttttatcagagactaggattgcaaccctgctttttttttgctttccatttgcttggtagatcttcctgcatacctttattttgagcctatgtatgtctctgcacatgagatgggtttcctgaatacagcacactgatgggtcttgactctttatccagtttgccagtctgtgtcttttaattggggcatttagcccattcacattcaaggttaatatgtgtgaatgtgatcctgtcattaggatgttagctggttattttgcccattagttgatgcagtttcttcctagcaccgaaggtctttacaatttggcatgtttttgcagtggctggtaccagttgttcctttccatgtttagtgcttccttcaggagctcttgtaaggcaggcctggtggtaacaaaatctctcagcatttgcttgtctgtaaaggattttatttctccttcacttatgaagcttagtttggctggatatgaaattctgggttctttaagaatgttgaatattggcccccactctcttctggcttgtagagtttctgccgagaaatccactgttagtttgatgggcttccctttgcaggtaacccgacctttctctctggctgcccttaacattttttccttcatttcaaccttggtgaatctgacaattaatgtgtcttggggttgctcttcttgaggagtatctttgtggtggtctctgtatttcctgaattttaatgttggcctgccttgctaggctggggaagttctcctggatcatatcctggcagagtgttttccaacttgtttccattctccctgtcactttcaggtacaccaaacaaatgtagatttggtctttcacatagtcccatatttcttggaggctttgttcatttctttttacttttttttctctaaacttctcctctcactttgtttcattaatttgatcttccatcactgataccctttcttccacttgatcgaattggctatcgaagcttgtgcatgcsttacgtagttctcttgccacggttttcagctccatcaggtcatttaaggtcttctctacactgtttattctagttagccattcatctgatcttttttcaaggtttttagcttctttgcaatgggttcgagcatcctcctttagcttggagaagtttgttattaccgacctcctgaagcctacttctgtcagcttgtcaaagtcattctccatccagctttgttccgttgctggagaggagctgtgatcctttggaggagaagaggtgctctggtttttagaattttcagcttttctgctctggttcctccccatctttgtggttttatctacctttggtctttgatgctagtgacctacagatggggtgttggtgtggatgtcctttttgttgatgctgatgctattcctttctgtttgttagttttccttctaagagtcaggttcctcagctgcaggtctgttggagtttcctggagttccactccagaccctatttgcttaggtatcaccagcggaggctgcagaaccgcaatattgcagaacggcaaatgttgctgcctgatcgttcctctggaagctttgtctcagaggggcacccagccgtatgaggtgtcagtcggcccctaatgggaggtgcctcccagttaggctactcggggttcagggacccacttgaggaggcagtctgtccattctcagatctcaaactctgtgctgggagaaccactactctcttcatagacagggacttttaagttgcagaagtttctgctgccttttgttcatctacgccctgccctcagaggtggggtctacagaggcagcaggccttgcagagctgtggtgggctctgcccagttcgagcttccccagccgctttgtttacctactcaagcttcagcagtggcagacgcctctccccctactaggctgctgcctcaccggttgatctcagactgctgcgctagcagtgagcaaggcttcttaggtgtgggacctgctaagccaggtgccatttgctaaggccattggaaaagcgcagtatttgggcgggagtgtcctgattttccaggtacaatctgccatggattcccttggctgggaaagggaattccccgaccccttgcgcttcccaggtgaggcaatgccccaccctgcttcggctcgccctctttgggctgcactcactgtccaaccagtcccaatgagatgaaccaggtacctcagttcgaaatgcagaaatcactgtcttctgcatcaatcccactgggagctgcacaccagagctgtttccattcggccatcttggaaccgactcgtgtttgagctcttgacagtggcacctgacttaaaagaaataaaatacaaattaatttcgggtttcatctgcatataagtaaaaagtcaggagctaaagaagcaatgtttgaaataagtaaaacaacaacaacaacaacaaaacaaacttaaaaggcacacaaatttaaatgttttaaggtgttctgcactgtagtattttagcctgaagaaatgtaaggggatgtggttgaagttttctagtctccatctccaacactcttgaatggatctaggttttgttctgttttgtcttttaattaagagtttagtgatataacttataatacagaaacaataaacatttctcctttggggttaagaaagcaatgtttggccaggtacggtggctcacgcctgtaatcccagcactttgggaggccgaggcaggtggatcatgagttcaggagttcaagacaagcctggccaagaaggtgaacccatctttactaaaaatacaaaaaattagccgggtgcagtggcaggcgcctgtaatsccagttactcgggaggctgaggcaggagaatcactttaacttggagggcagaggttgcagtgagctgagatcacgccactgcactccagcctggcgacagagtgagactccatctcaaaaaaaaaaaaaaaaaagcaatgttttggccggcgcagtggctcacgcctgtactcccagcacttttggaggccgaggcaaggtggattccctgagctcaggagttcgcaactagcctgggcaaaacagtgaaaccccgtctctactgaaacacaaaaaattagctgggcttggtggcatatgcctgtattcccagcttcttgggagtctgaggcaggagaattgcttgaacccaggaggtggaggttacagtgggccaagatcacaccactgcactccagcctgggcaactgagtgagactccatctcaaaaaaaaaaaaaaaaagaaaaagaaaaagcaacattttgagatatttgatgaagcaggtatgtagtatagtagagaagggcgttctcaatgacaaatgaaggtggaacttttcttgtgcctggatcatttttgggtagcttaatgtgaagagctataagcccacagtctggcaaatagcaaatagatactctttggcaatgtgcaagcctcttgacatgcctacctctgagaactgatttggaaacaggatgggtggccaggaaagaaggaaatctacaattctagcacttccaaaagacactttcatgagactgtctcttaggaaagctgctgtaagcttgttgaggacaataccttattcccaatggcctcctgattcccacagaaggctttttaattaaccagctcaagatttgtgcacatgaatcaccattgctagctyttctttcctttgacttggaaggttataaagagtctttatttatcatactgattgccatmctcaggtgaaaacacagcttttccaagagctttttcttcttagttcccaaatatttagtcattccaggaatgagataagaggaggagggtaccaagtgacttctctgtggaaggagaaagagatcactctgaaaggcatgtcataacctagtgttaagaagtgcgtgtacttacataagatgcgtgggtgggaaatatttagggtattgtggccataaccaggaaatttttttgcccacgtctgactccctatttcgaacagattgtttttggcttgagactagacttctgaacacatgcattccaagtctacttccttaggagcacccttgtgttgtttaatttagccaaaacacatcaaagtgtgtggtttcagtatctgctagttcagtgtctaattacaataacaggagatggctgtgtcagcatctcggccaagaccatcagcaggggagaggaaagctgattatctttctcagcagaggacggggcagcactgtgggaactccaggcaaataggatcaaaatggggcagggaaaggcaaaaggaacatgagaaagggactatttcaactttccgaactgaggttttgccattctttttatctgtttttgtaagaagtactctttcacccccgaaacatgaaatgaaggttgcttctggttctacaacagcagccctttggaatatttcgccctcatcaggcagttggctccctgcaatgatgtcagctataaaaatgcaataggagcagccttttattcatctcattttattatgctaaaattttgttccttgttctgcacatgtgaagaaaataagaattttcttttcttcttagttttttktttgtttgtttgtttgtttttttttgagacagggtctctctctgttgtccagactggagtgcagtggcgctatcttggctcactgcaagctccgcctgccaggttcacgccattctcctgcctcagcctcctgggtagctgggactacaggcgcccgccaccacgcccggctaattttttgtatttttagtagagacggggtttcaccgtgttagccaggatggtctggatctcctgaccttatgatctgcccgcctcagcctcccaaagtgctgggataataggcatgaaccmctgcgcctggccagtttttttttttttttttcttttttttagtttttttttttttcttttttttttttttttttttagtaatgcagkggtttctttcaaaactcttttagttctagggacatagaactcttgccagtgattaagatggatgattttaaaaccaggaattgaggaggcygatgtcagctagaatccctktaaaggccccttattggtgggtgttggattactctgaagaccaggtttgaccaaaatgtacatagtagctgagaacacaacatggtttcactatagtttcccactgtggcaaaatgtaaggtgcaaggaaaataaatcatgttgagatggaaatttcttcttgcttcacttataatctgacttcccacagctttaagtgggaagaacattgtcaagggcaataaactttattttcttctttcatttcttctaaaaaaaaaaaccaaaaccataaataatactcagcactcgtgtaccagacgccgattttagtgccttgctggtattaatttatttaaccttatataggctaagtatcccttatccaaaatgtttgaaaccagaagtgttttggatttcagattttttcagattttggactatttgcatatacataatgagatatcttgggaatgagacccaagtttaaacacagaattcattagtgttttgtatgcagcttacacacatagtctgaaggtagtcttatttctccatggggttgctaaataaaccaaatgtagtgtgcctgtgtttctaccatgacccactgagatcaggtgtagaattctccacttgtgatgtcaygtccgtgctcaaaagttttggatttcagagcattttccagacttttggattaggagtgcccaaactgtaatatgtgcataaatatgtattattawtgccttttttaactggtgaggaagctgaggcacagagctagaaagtgtagatcttgattygacccaggcagtctggcctcagtgtctagacttacaccatgctgcctctgtatccattagcagttgagacatggagcaggaaaatctctttgagaaagtcagacatcaaggaagaataactcctaatgttgacatgtataatttcaataaaatttgacactaaatattttctcatttccattatgatttctcttttgatatgggmgttagttagcagtgtcccctgtcaactcagaaactgtaatagctgttactaagatgaaaaacagagctaaaatgaaattatcatcttctctttatagtccattttcttgctaaattatagaaagaccatcatttgcataaaccatgggaagaaaaaaaagccctctgattggataagcatgaatacctgagtttgaatcctgcctctgccccttactagatgtgttatcttgtgcaagtcagtcggcttctccatacctcaattttcccatctgtaaattggttataacaggtactatttcataggcttattagagtgaagtgagttaaaatatgaaaagtgcttagaatagtgcatggggtaggtgctcaataaatattatctattgttgttgttgtttctaatagtggattggcaactgcacttcagtattatttcacartacttatgttttttccataaactaatttagggagaagttgttgatgtataaactaatagtttaagaatattctcgagttgattctagaataaatcacaatgcaatttagcaaaaaccgttataaactttgtacttccttttataaattaatgttttaagacaggtctaaattgccatttaaaaacaaaagtcaaacttactaaacctatcctgcaccttactgcctcattatgttggaggaattgaaccaaagaaacctgcaattcatattgtcatatcctgagaaggaagcagcatattcattaaagtatatgaaattaagggatttttttcctccactgcagagcagagtatccgaacaatttagtcaaaaaaaaagaggtatggtaaaaagcgaacaacgctgtagggtcatggctccatgtggacagcaatagaacgtgagccctaggaaggtctttcatgaagtcactcaaatgttttctcatctctacctcctcattggcttattcttctccctttcactgtggtactgtgaggatcagatggaaaactggacattgaaagccctgtggatggaatgcctatagcagatactctggactgtgcattatcatcttcactgagattcctggaaaactggccagaaagtttgtggaaatcaaaccatataatcacatatatagtggggaaacagaaaaatatggcaactctgtttccccaaggggaagtgatcaatcccttttctttggtagtgggagagacggggtagaaagtgcattctgtgctcatacaggacattttgtaaaatcaacgatgagatgtcactcaaagtgggatttctacatttgtgataggcctttcctgctgttgatatggcccctccaccggttgtataaatacctgaatagttagggtggcaaagggaagaataatattaaataagctaaggacttgtgaatgctaccaggaggataccactttttcccttcagacaactatttctaaattaacagtctccaaatcgtaagttaaaaacaatttttttggcagggtgtggtggctcatgcctgtaatttcacagcattgggagaccaaggcaggagggtcacttgaggccaggagtttgagacccagcctgggcaacatagcaagaccctctctacaaaaaatttaaaaattagccaggtgtggtggcacatgcctgtagtcctagcttcttggggcggccaacgtgggaggatagcttgaggccaggagttccagactagcttgggcaaaataaggagaactcatctctacaaaaataaaaataaaaaataaagcctggtgtggtggtgcactcatggtcccatctactcaggaggctgaggtgggaggatggcttgaacccaggagactgaggctgcagtgaactatgatcatgccactgcactccagcttgggtgacagagcaagaccttgtctcttagaaaaaaaatgcacccccaatgtgtttgttcatttattgatcatttattgatatataacctactactgtgtatccataaagtatataattattttaaaactataaagatacatttaaaatttttaaatgttttaataatttaagggcaataaagatgaaaaggcaacgttttaaaataacaacagctaacagtgatacagtgttaattgtatgccaggcattgatttaagtgtttttcacacagtaactcatttactgtyttgctaagagcaaagacttcctgctatcattagctaatatctcaaggcaaaattcatcattaacaatagcgagtataattccatatttcaactctccccttgagcgtttcagagtattttggctagatatgatgatgatgattgtcagatatgactggattgtcattcctgggaatatcaagtgccagctctgacatgttcttatttgctcatgttttctatctgtagtttctttgcagaaatttttttaacctgttgtctactatgtgaggaataattttaatttaaaatttagtagtataatcaccagttaggggcacaggtcccctgcaatgggttgccatataccaaaactaacaggcatggaagagcaccagcatcccatgcacgcggaggattgacttacgtaccacgcgagggcgccagtgtcatcccgaatgaaaactaggaaagcatttctaacgtgtctcttacacgccgaccaattccccctcacattcatgtgcttcgtgtggagagcactcgtctcaggggaagagggataaagaggtttgcaaaactctagagctctgtgcagtgagtaaaggaaggcaaaaccgtcgtttccttaagctggaacaaatacctcaaaccccactccttggctttgtgtatttcctctcctacatctgggtatttctgttggtctccacaggaaacgtctgaggttatgtctagaacctctccttctcagttggcactccataaagaggggatgggtacctcacaaccacccagatggctaacgctggctgttttagtctatggattccccggagttcaggtgcacgttgatgtagctcctgttcgagtagggctaaaatttaagctggtcatttttgacatctttggttggccctgggatcagtatacctgaagctgaatggacaccacctgcttgtttctgaaatgacttcagctccttgtttaatagttagatttctgtttggaacaatcttgtatttgttgaaaggcccaaggantcttttccagttagaactcattaagttctggcatactagattttttgaaaaatgggaaaaagaaaataaaattattaaaaagcagtttccttttgcgagaagagaatgtgatagtgagcctactgtagagaaagtctaaaagagaaactgaattttcaagctctcaatttttcaccttctggaatcttccttcatcaggctgcagatgtattcctgaatagaagtaggtaggcatttgtgtgttataaattgcatataagactgattctttgtaaatgaaataatttagagtgcaactggaaaactgcctcaaagttattgttttgtgagtcagaagtgatttctgccaaattgaattatatggtaagtcaggaaggggcttgatactgtttttcttcaagtggagtacacatttaactcatgtttatctggagcaaaaataaggttaaacatttgttagaatgaatatgagtaattttgaaggtattatgtcaagagctaggttactctaattatgaagggtctgatttgcatcctgtgctggtgccccatcaacattttctgaagcttccggaagagtaatgcagagccattgccgaaacatttgagcaatcagacacgtatgcaattactagtaagcaataaacaaattaaaataacacaagcaacactgaagtgcaaggccacacagtaacagaagccgaggagattaattacacaaagttatgtgacactggggagagggaaagatcccttaacttggagtctgaagaactaggttcaaatcctatctctgccacataccagcagagttacttaaactatctgtaccccagtttcactgttggcaaaatggagtgacaacaattttattgtgatgttagggggattaaacataggtgcttgatagatttgtattagtttattctcacgctgctgagacataccagagattgggtgatttataaaggaaagaggtttaattgactcacagttcagcatggctggggaggcctcagcaaacttacaatcacggtggaaggggaagcaaacacatccttcttcacatggtggcggaaaggagaaatgcagagcaaaggggagggaaagcccattatgaaaccatcatatcttgtgagaactcactatcacaagaacagcatggaggtgaccacccccatgattcaatgacctccgacagggtccctcccacgacatgtggggattataagaactacagttcaagatgagatttgggtggagacacagccacaccatatcagatgtcctttgaactaagacttcctttaggggaaataagaaaggtgaacagaagcaacaggagttgcacagtagagcgagatgagtacaccatttggcagaattggaagtcaggagctcagatgtgcagcctggtctccccacctgctcagtgtccctccaggctatttaatagtataagtaattaccattacttctagtgtttttgccactcctatgtgctgaatacagtgctatacattttatcatttttaaaacatacagtacaattaactttttccttttggtatacagttgtatgaattttaatgcgtgcatagatacatatcatcactgctgcaacagggattcagagcagtttcatcatgacagagaactccttcttgctatcccttcatagccataccccttcccgtgtgccccccataccccatggttagctgcacatttaatacatgttatccactcacgtgatgccatgcactttgtttttctaacattcatcacacttgtaattacctgatcatattctagattgttagttcaagagcttgagaaccatgacattttcattttctgctgtatctctagtgcccagcatggagcctggcacataggaaaggaggctccaagacatgtaccattacatgaagtaatcttactgtctgtgccaccattttgccttgtcctttatcatcttcttcaaataaggaaatggagttgagagaagttaagtaacttccccaaggtcacatagtagtacatttcagagcccagatttgtcttgatctaaagcctgtggtctttctatgttaagacatatcatggtagatagaatatgtttgttttaactcatttgagaatgcgtaagtaaatatccagcatttaaaataactaaaattgcccttggactgttaaataatgtaaatgcttaaaccttgttcatttaccatataaacacaraatcttagagttaataccaaactgaggagatgttcctcctttgccaacagtatgaggggtggatatgccctagctcagaagagattggattgagagagagagggagacagtgagtttcatactggttatgtaggaacgaggctcagcaaatcaagtacagccagagatggcaatgtctcttcgtttctttggagcccctctgagattcccagggtcccagatgcagrctccttatttgcttggcacacttggcctcagggagctgagaggacacagtcctgggtaaataaagcaagatcaagtcatccccaatcctggagtagggtagggttatgatattctattggttttaccaatgtgaagtgtcttatataaaatccctatttgccaagctactgtattgctttgaaaaaataaaaaccattctctccttttctttctttgtatatttaataagtatttatcgaacatctattctgtaccagacactcattgggaataccagagcaaatgagacacacctaagtctctgtgagcagggctgatgcatactggtgtacagaaaatgggatgcacaggggctgaggtgatccaagcaggcttgatggaataggtcacgcttccaccaaaaaccgaaggatagttttccaagcagagagatagggatcagtgtttcacgcagaagaaaaacatgatggtcatagttccagaggtcactgagagttagaagagaggaaatgagagaagttcaggaccactgaaggaagcaagagatgtgctgaagagtgaatagtaactagatcattcagtgtctgtaagacatgtcagcatctaagagaaaaaagtggcattttaagggcagtagggagtaactgaagattctgagcagtgaagcaatacatgtgtatttgcagtgaaatcgcaggtttcagatgctttaaaagcatcaccttcataccacttgtgattccccaggcctatctcttagattcacagttgcattgcccaggccaccttatttctggcttagacccctaaccttgatgaaggcccctcctgctcatgtgacattgaggagacattcattccttcatgttcacagatctgactttatgcatcaaaccatcctgcctatcttacggcagttgatggcatcattttgaggagaaccaggtaggaaagaagggagaatcctcatatccttaaaataagtgtacaggccgggcctggtagctcacctctgtgatcccagcactttgggaggttgagatgggtggatcacttgaagccaggagtttgagaccagcctggccaacatggtgaaaccctgtctctactaaaagtacaaaaattagcctggtgtggtggtgtatgccttagtcccagctacttgggaggctgaagtgggataatcacttgggcctgggaggcaraggctgcggtgagccaggatygcaccactgcactacagactaggtgacagactctgtctcagaaaaataaaataaaggtacagcaaaacctatttgatcattccacctttgaaaatagatctttaatctctctaatattttggtcacatttcaaacacatgtagccctctctggcctcatatagttctttgaaacacctcttgcagtccttcatgagccttttaaattctagcacttctttcttgccatccagctttcatagcactcctaggtacagaggcattgcaactcactagtacccaccaggtggtaaaatggaggcttctcagtctgctttgccagactggaatgtcaccctagccctcaaggccgctgtccagatggtgctcagggtgaagtaggggcttctggaaggagatgatatttaagctgagtactgaaagccaggtgggagttatgtaaaggaggtggtgatggttagtggtttgtgatgagctgcaagttctgtagtttggtgtgggtgggatttgagtaagggctagaatgtggggagatcatcagagattcaatcagagacggcaaactggaggctcacggacaggagccagcccacagagcaggctgttagactcataaaagaaaatgaccaaatgttgtgttttaggaaaaatcactctggttgcaactcagattayagagtagaaaaatggactatggcactatgtataaattaaggcaaccttccctctggtggtagggtaggggtggtcaccttagcatagaggttgatggctgaaagcatagactctggtccctgctgcacaacttaataggtggtgacctagagcagttatattctctgtctctcattttcctacaatataaaatgcagataattaccacacctctcacagaggagtggagtaaggattaaacgagttcatatttgtaaagcatttagagtattgcctgctatataaggtttattaaatgatgggatgggtggccagacacggtggctcatacctgtaatcccagcacttttggaggctaaggcaggaggactgcttgagcccagttcactagcctgggcaacatagcaaaacctcatctctctgaaaaatacaaaaatgagctggatgtggtgrcacatgcctgtagtcccagccactcaagaggctgatgctggaggatcatttgagcctgggaggttgaggcttcagtaagtcgtggttgtgccagtgcactccagcctgggtgacagagcaagaccttgtctcataaataagtgatgggaaggtttttctggacctgtaactggatgtgtttctctgaccttagagtctcttacacttttaacagctgagctgaactctaagcacatagcagagcccacaatgtggttgtatttccccgaatagtatgtcccttttttacatcctcctagcataggaggacattgaagattttaacatctcattataaacttgtttttatctagttcaagggattaaaaaacaamaaaccatggcatagaaatgttaagcaaaagggacaaccagctaatggcctaacacctgtcctgccaccactcagctgatgattggtgttgaagatgggattagaatccaaatcttctcacctgtaatcmttgttctttcctctttcctatgagttagagctctttgtgtttttacctttgttttrtgacacttttcattgtttaaatgtgtttcttatggcctgaatgtgactgaatgttttttagggcaggatttacctcctaccttagcatcatgactttcacccttatttcttttctaatctcacagaatagcttgagtgatcttttaaaaacataaattgattttgtcattcttacttcagtcaatggtttttttttgttacacttatgctaaagccaggatccttcatgtgtcctgtaaatattgagtggtctagctgctacctctctctccaccctcatcttgctcctcactctcccactcagccacatggccatggttgagtctatgctcgtgcatcatgcccccattctacygcagggcccttgcacctgctgttgctactgcttgggattctctcccctcccctccttatctcatgaacttccatgcatcctcagcctagtcctcatgtcctcaggaagccttctccaatgtgtcctgtccctctgcaggctggccttgtagtactaagaatttctccttgtcctctctttgatcagacttgtgatcttatgtttgtacgtgtgattatttgatcagtgtcttagtatgttctctcacttctctaaagaaatacctgaaactgggtaatttataaagaaaagaggtttaactggctcactggtccacaggctgtacaggaagcatggctgggraggccttagggaaacgttcagtcgtggtggaaggtgaaggggaagcaggcacatcttacatggccagagaaggaagagagtgaagggggaggtgctacacacttttaaacaaccagatctcgtgagaactcactcactgtcacaagaacaaggggaaatccacccccatgatgcagtcacctcccaccaggcccctcctccaacactggggatcacaattcgacctgagatttggcagaggacacaaatccaaaccgtatcagtcagtgtctgtcttccccactggactattaagatcaggccatgtctgatatctctttcagccagtcttttatctctactgcctactccagagcctgttgcatagaaagtgctcaaatcacatattggytgaattaaaaatcagctattttatttcttagcacctaacacagaatcgaatggaaatcaagttttaaagagcacagagtaatggttcatgtcaccatatctactcagtgtcttctagcattatactaaaaattttatttaatggcttcaattaaaaaaaaaaagccttcagtatttattgccatagggtagataagccagctagtcagaagtagatgttatatccataccttacctctttgtccaccaattttctgaaaatagagatcccaaatatttatttktcttagtgttttatatcctacccctctagttacattttttcaaatgtaatgttttatttctcccagttttattgaggtatgattgacagaaatcatgtatttaaggtgtgcatgatttgatatacgggtgcattgtgaaatgactgccacaatcaagttaatacatccattcccttacatagttaccagtttttgtgtgtttgtggtgaggacacttaaaatctactctctcaggtaatttcaagtatacagtacagtgttactaactaaagtcaccatactgtacattcgatccccagaacttactcattttatacctgaaactttgtaccttttgaccattatctccccactttcctcaaccccagcccctggcaaccaccattcgactctctgcttctacgagtttgactcttttttagattccacatatgagatcaagtggtatttgtctttctgtgtctggtttatttcacttagcataatgccctccaggttcattcatgttgttgcaaatggcagaatttcyttctttttgtggctgaataatatcttattgtatgtaaataatatacaccacattttctttaccattcatctgttgatggatgctaaggttgtttcagtgtcttggctgttgtgaataatgctgcaatgaacgttgggctatagatactgatttcatttccttttgttatataaccagcagtaaaattgctttatatgatggttctatttttaattttttgaggaacctccatactgttttctgtaatggctgtaccaatttacattcccactgacaggacagaagtttcctttttctacacatcctcactaacacttgtctcgtttttttgataatagcgatcctaacaggtgtgaggtgctatctcattgtggttttgatttgcattttcctgatgattattgattttgagcatgttttcatrtacttgttagccacttgcttatctttatttgagaaatgtctattcagatcctttgtccgttttttaataaaaaacaaaaagatttttaaaaagtgagtttaatacattgcagtagaaattaaccaaaatgggccgggcgcggtggctcasgcctgtaatcccagcactttgggaggccgaggcgggcggatcacgaggtcaggagatcgagaccatcccagctaaaacggtgaaaccccgtctctactaaaaatacaaaaaattagccgggcgtagtggcgggcgcctgtagtcccagctacttgggaggctgaggcaggagaatggcgtgaaccygggaggcggagcttgcagtgagccgagatcccgccactgcactccagcctgggcgacagagcgagactccgtctcaaaaaaaaaaaaaaaargaaaaaaaaagaaattaaccaaaatgaagcattaaaaaaatgaaagcatccttaatgagctatgggacaacctctagggactactacaggtgtaattagattcttccaaggagaaaagagagaaggataccaaaaaaaattttttttaagaaataatgggtgaaatttttctaaatcatatgaaataactgtaagtccacagatctagaaagacaaactccaagcacatgaaacatgaagaaaatgacactaaggtacatcatgctcaaattgctcaaagccaggataaatgcaactttattttcttaaacaatcttttttttttgagacagggtcactctgtcaccccagctggaatacagtggcaagatcttggcctgttgcagcctccttctcctcgattcaagggattctcccatttcaactttctgagtagctgggattacaggcgtgagccactgtgcccagctattttcttatacaatctttaggccttttcttttttcttgcctatctagaaccttccagtatcatattgaatagaagtagtgagagcatactttttttgttttgcccagtgttatgggaaagcatgcagtatttcaccatgaaatatgatatgagctaaaggttttccctagatgccccttatctggttggggaaggtccttaatttcagttcactgagttttatgaaaggtatcgatggtgagcatcttttcacaagcctgctggccatttattttatgtcatctttgatgaaatgtctcttcaagccctttgcccattttttcatcggcttgcttgttttgttttgtttgcaatagaattgtaggagtttcttgtgtattttgaaaattaaccccttatcacacacatgctttgcaagggttttttcttatgccataggctacctaccttttggttttgttgattacttcctttgctgcgcagaaacattttagtttaatgtagtcccacttgtttgtttttgcttcattgcctgtgctttgggtatcatatctaaataatcattgccaagaccaatatcaaggagtttttttcccccatgtttttttctaggagttttatgatttcacrtcttacatctaagtctttaggctattttgagttggattctgtatatgatataagaatagggcccaatttcattcttttgcatgtggatattcacttttcctaataccatttattgcagacactcttctttccctaatgtgtattcttggtacccttgtcaaagattagttgacaacatatgtgtgggtttatttctgagctctctattctatcagctatgtcataattgagctccttttctctaagatctaacrcgtgtgtaattcaaacatgggttcaaaagtgctcatcttgaagtagtctagaaatccaccagcagccactaaayccaacgtagatgagggaacacgggttgcatgyagctgtaaggcaagaagarggaatggagagaccgagagtgacatcagctggagaactaagggaggtgggaagtataaagaggagatttgaattggctgcatcttgtgaggcctgggctagactggctgtctagggtgaaaacatgttctaaaaattcaggatgtagaccaagaaagatgggacaattatcccagcatttaagggctctaaaaggggaaaatgggtctacttatttcccgttggraaacctgagaaagggcgtttttccaaggccccagatcaaacctactctggggttgaaatagatgggaggttccaggcacggtggctcacgcctgtaatcccagccctttgggataatctcagcactttaggaggccaaggtgggtggatcacttgaggccaggagtttgagaccagcctgggcaacatggtgaaaccccatctctactaaaaatacaaaaaaaaattagcctggtgtggtggcacrcgcctgtagtcccagctactccagaggctgaggcatgagaagactgaggcatgagaatcgcttgaacctgggcggtggaggttgcagtgagcctagatcgcgccactgaactccagcctgggccacagagtgagactctgtcaaaaaaaaaaaaaagacgggagttaaggagttaggtgttcaagctggactcgtacagacttgtctgtttgtaggagagttttatgcaaacacctacacttcaaattagagtagatctcaccctccaagtagtagcttagtgtatgatcatttgggctcccttgctaggtggggaggcagagrccgcttcatccttctggtgctagtaacaacaatggctcatttggggacccttccctgagtgttttttttgtttttgtttttgtttgttttattttgttttgtttgctatgttttgaccgcattgtttgcagacgacagacaaccaagtggaccctcagtcccatagatgtcccacaatctgtatgaccctgaggcaaagtccacagccgttctcactcctccctgtcgtcctctcccacaggaatccgagggtgtttcctgccactattggtcgctgtttgacgggcacgcggggtccggggccgcggtggtggcgtcacgcctgctgcagcaccacatcacggagcagctgcaggacatcgtggacatcctgaagaactccgccgtcctgccccctacctgcctgggggaggagcctgagaacacgcccgccaacagccggactctgacccgggcagcctccctgcgcggaggggtgggggccccgggctcccccagcacgccccccacacgcttctttaccgagaagaagattccccatgagtgcctggtcatcggagcgcttgaaagtgcattcaaggaaatggtaggtattcctgggagtctggggcagcagggccaggctggcgcctgcgccaggtctgtccgtccttcctggagggctcccagaaagcgcacggttttgctgcctggctccacctggacggccccctgtgataatggggcttccattcccaatagaaattggcagcagacagagttcctggcatcaagtgctggcaaaaatgtaaaagaaggctgagtgcggtggctcacgcttgaaatcccagcactttgggaggccgaggcaggaggtcaggagttcaagaccagcctggtcaacatagtgaaaccccgtctctacaaaaatacaaaaattagccgggcatgatggccgttgcctgtaatcccagctactcgggaggctgaggtgggagaattgtttgatcctgggagacagagattgcartgagccaagattgcgccactgtgctccagcctgagcaacagascgagactgcgtctcaaaaaaaaaaaagtaaaagaagatgaaagagggggacagtgcatgaggtcagaggcttattaaatacaggccttattgcttttatttcctatattcatattgatgccagctggtacgattgcacttagatgtgagcatgatcaccatctgttttacagatgtgtataaagtccggtgttgggggaaacagggtttaggaaagtgctcaaaagtccccatcctatacagatgtgatctaagaacggctgttttaccacaactgggaatgtggttcacactgcagacaaagtgctggaggagaacagagccaggggccaatatccaagaagtcttagtcttacccaggcatgtggatttgtstgttcgtttccatctgaatgggtctgatcgggagttcatcatccttcgctgttggcctcactcctgagcatgtcctcgggagagtgccacagctctcgctgtcccttgctgcccctctgcctggcaggagtgcacatagaagccgcctctgctttgttctatgccagctctttccctctgtgagcttactttatcctaagccaattattttggttttaaagattttatttcttgctcggcagcctgcatacagataaagaataagagatatttaaggatatttataagggcttgagttaggcaagtgggcagtcatggccttaaaacctggagattacaggccgggcacggtggttcatgcctgtaatcccagcactttgggaggtcgaggtgggtggatcgcaaggtcaggagttcgagaccagcctggtgaataaggtgcaaccccgtctctaccaaaaatacaaaaaaattagtcgggcgtggtggcacatgcctgtaatcccagctacttgggaggctgaggcaggagaattgcttgaatacaggaggcagaggttgcagtgagctgagatcatgccactgcactccagcctgggcaacaacagcgtgactccatctcaaaaaaacaaataaacaaaaaaaaaaaacctggagattacaaagtgatgagaagctgttaaatgaagtcaaarcagctagaagcgtcttgccagaaccggayaggcayatggtgcatgttccaggatctcacggcatcaggtagtgtgctaagaaggaaagtaaataatgactatacatatcgtcatctgatttgtttgtaaggcaaaaatagttcatatattcacccctcaaatttgcatyctctttttatttaaacgtgtcccttctttggtctcagctttttctctccttgttacagagataacatttaccmtttgactagcaggtggtttaaaatgcaccttgctgggcgtggtagtggtgcatgcctgtcattccagctactcaggaggctgaggccggaggattgtttgagcccaggagttctgagctgtcatgtgggttcagtgtcaatgtggtgacctccttggagcagagcaccaccgggatgcctgaggaggggtgacctagcccagatcaggttatatctccagtgcttttttgtcactgtattccagcttgtgcaacacagcaaaaccccatctcttaaaaaataaaattaagaataaaaatgtaaaaataaaatgcacttctatctcaagactgtctgatagcctgcaaccctgcaatcccaatraaaataccaggaggctggaaaagattatttaggaaaaagggaattaaggtaggaaaattkactcccactcagtcgtggtgtaaaatctcactctctgcctctgtagaggctctgatgtcaataaatgtttctagacactaatactcagaatgccaagtattgaatttatttttttaattatttaggcaaaaatttgacaatgggctctccttgtaatgtaatgtaatgtaattcagtttgcatggtagaagtgaaaaataaaggaaacgttgagattttcatttccttcagttgtgactagtgccacaggacatcttttacctggagctgctgcattctcaattttgtccactagaggccaatgtcacattgactcaggactccacaggggtctcaggctgttcctgcccattaatggctcagggttgctcttaacaactgtgctggcaaagaaaggttcwttcagaaaaatacttaagaggctcatttttaaaatatttctacttttaatgaaccaattcattacctcaaatttttcttggaaacttagtcaccagcaaaaacaacaattgtttgcttcattttcatgtgtaattcattcaatcartaatatttgttgagaaccaactagaagccaggcctgactgggaaaagaatattgagccgattaggcaaagaagggtgttaaacaagtaaaatataaatgggaggagccttgagaggggaaatacagggtgatgcaggagtctggtaaagagatgaagggaaaggttccctggggaggtgatgctggggtgtgggggctcaggagtagagcagacatgtgcagggcagggttgggagaatgaatgccctggggctcaggaaacctgggtaacaaaccgagcctgagaaaaaacccaggtaggccaaagccagtaagccaccattgctgtggtgggaagatagatcttaaatgtagcaatggcaggtgaatgaggaggaaggctggagygcccctgtggagacccaggcccagatgtgccatatcatgaacytttagctttaagctatgtctcttccctgtttgttcctttcaggtttacccccatgccctagcttcctcttcacactttttccccccagattgtctgtctaggtccccaacctgcctacagcttrccggggctttgcactgtgaaaggaaaataaaaactgggcccccaatccactatggaaattggaaatcactaggaaaaaaaattaagctgaaagctgagtcgtggaagaaactgtttccttttgttcctaagcagatactacagatgaatggttgaatatctccacaggtagctactctgtgttcaccttayctcacgcaaagtgttgatttattgatttccagagccycagactatcccctacytgctccttttctcttggaatatgtggatgaccataccctccctctttcccctccggcccacttttcccctttaaatactgaagccttcaaattcatctttggagaaaggtacagactacagactgtctctgtgatctgtgttttttttcttccaggcatgtccttacccttggcaaaataaactgaatggattgagacctgtctcagataccttttggtttacagcacctttctggttggccttattaagtgagaagctcaccattctttggttctcatggcacctggaagggtggccataccttgtgctttgctggggactgggycagtgggtgcctgctgtcttaattgttaatactctcccatttcactctcagatgtgaccttctttggaatgataagtcttctgtttaatcacagatgctcttgtttttctttgcgtcatcrgagatttcagaraaactacactcctgtttcatagaaacaatgcctgtcttaaccttatcaaattgcttaaggtgagcttcagaatccacagcacagaaattataccagcttcaaaataatagctggaaggccattgccaactcctttttctttcctccccctctcaatattaggtttttgagagtcrttgtcttaccgtgtaaacctttggttttttgaaatgcccacaagcsccayggtgtgccaggcaacccgaggacagttcacacagctgtctatagcaggacagctttgaattttccagatcattcctaaactttttttttcacckcagtagccacccactctctaattttcctgtttctagatgtcctttaggtattgygggttttgtgccattgattttctataataggaaattcaatattaagtaagagttgtcatataggcatttcagctttgtggctctcttgccttctcttccacttttaatccctaaaagtaaagttccccaagccttgcacctaagcctctaatttgcctcactgatgacatttatgcagctgtccctctggagattctgagtgtcacaatatccttaaaagcagagcttctccttcactgggagtttttgctttatttataagagctcaacaatgtggaatcagaattctttggactctctttgtttctgtctacctgcttgtctgtctccatctgtttgtcttgtccctcaatggaatgctgtgatattatgatattctgtcttcaactccatgtcctgacatacaactcctaaaatccttgaaatcttcaaagtgataagtatctttttgtatcctaatgagatgactggtggctggcagcccctgggtagcttctggatggggtctgttcatcaaaaagaccaaggcaggattagagggctgtgcaactaagtagaatcacacagtaaactgccgttgataatgtagatgtcaggtgtattaatgtgaataaaatgaaagaatagcctaatttagatttgccccaataatttgtgtgtgtgtgtgcgcgcacacgggtgcacgcatcctcaacctcatgagaggggagaagggctgaagggtgagttgatcaccaacagctgatgatttaaacactcgtgcctatgtaatgaggtctccataaaggcccaagagaatagggctcagtgagcttctgggtagctgaacatgtggaggtccctggagggtcacgtgccaagtgagggcatggaagctccacaccgtatgcatctcttcatccatatcctttgtaatatcctttataatgaactagcaaatgtaagtaaatttttcctgatttctgtgagccactctagcaaattaatcgaaccttaggagaggggggtcttgggaacccagatttatagctggtcagtcagaagcacaggtaaaccaacctggggcttgcgactggcatcagaagtgggagtcagttgggggactgagccctcaacctgtgaaatctgatgctatctccaagtacataattgtgtggaattgaactggaggacgcccagctggtgtcttctgcagaactgattgcttgctggttatgtgggggaaaactctcacacatttggtcacagaagtcttctgtattggttgttgtgggatgagaacagaggaaaaacagtttgtgttgttttcactaagaactgctcttctcagtcactagtatttattgagcttacatcttaaaatcagtattcttttagacaccactgaggaagtaaaasataagatcttatggtcaggcactttggtccacacctataatcccagcactttgggaggcccaggtgggcagatcacttgaggccaggagttcgagaccagcctaaccaacatggcgaaaccctgtctctactaaaattattaaaaatttagccaggcgtggtggtacatgcctgcaatcccagctacttgggaggctgaggcatgagaatcatttgaattccggaggcagaggtcgcagtgagccgagatcacaccactgcaccctagcctgggcaacggagcgagactctgtctcaaaaacaaaacaaggctgggcgtggtggctcacgcctgtaatcccagcactttgggaggcccaggcaggtggatcacgaggtcaggagattgagaccacggtgaaaccccgtctctactaaaaatacaaaaaaattagctgggcgtggtggtgggcggtagtcccagctactcgggagcctgaggcaggagaatggtgtgaacccgggaggcggagcttacagtgagcagagatcgcaccactgcactccaacctgagtgacagagcaagactctctgtctcaaaaatatatatatatatatattttatctgggggcatttgtagtcccacattatatgaatatagaaatatgcaatatcttatttattttgatattctaaataacaaaaggaggtagtgaaatgttgacacctttccaaaagggatacactgttaaaaatgttcagaaacactcaagtcaaaataaatagtacctatttctggggaaaaagtaggtactagtcacaaaatacagacgaacagaagagaaaaaaatgcttccaatgaggggagatggtaacagtttcatcaaatactataagcttctttgagagcagtgcttttcatctttggtcctcgggttgcctggcacagcttggggcttgtggtgaaggtgacctatgaccactggtttttaatacttactgtgtacactgtcagaggtaggtgtgcccctacaaccccctgattgtatctcagatcttccttcatagtgtgaaggctatgtagcgaatccctcctgtgtccactatgaaaagtgagccatggcttcctaaaggaccaaaatctcaggaattttccgactgacttcaattctgcttcccagcaaggcctggcttagctctgttttgtcacctattatatttatattgtcgcttggcccaggacaataggtataaataagacaagtgtcttctaagtcctgatttcaaacctcctccctacttctccaccctcccaaaaacatggttgaataatcaacatttcagactcatggaggaagtcgattccactgcagggttagttacaggaagcctttgccctcctagggatcagaaccaagttagcagtgattaccgttttaacctgttaactatgggatttgagctctggacatagccgggaggatctcagagttctatttccttttaagagtgggtctagattccccaccagagtcggttcttaggaagggaagaaaatggcaatattttaacttatggaactactatatgtaattccatcactgggtaaatgattggaaataccaagcagctagactttgttgataaaaaccttataaatacatggtgacattgtgacaaaaagggggcaaagtttatagtttagaaatctataaattagtgtttatagattaattataataaataaattagtgttttccaaaattagcatgttaatggtaaattgggaacccacatagctgtcttaaatttaagttggttttgttctctttgtttttgttagaacgggaagtttctctaggaaggaatgagcatgtgattccrccagcagccggcaggtggcaatagtaggcagtagagtgctggcttttcttccccattgcctggctggcagatggccttgttctcagaataaactgggatcagatttggatactaaaaccatgcagaatctgattatttgtgactgacactattagcaatgtgctcagagccgtgttttaactcagctagggggagctgccaggtcctattgaaactacccaacacttgctcctttytgstaccagatattgctttccttttgcaacctgaaattggtaggaaacaaagaatgaccttggagttgcatcatytatgagactttcaaaccaaattattaccatcccgggcaatatttttytyttgcacttctttcctgctgaattagtctcattgcacacacatctctgtttgccttttttttttttttttttttttgaaacggagtttctctcttgttgcccaggctggagtgcaatgacgcgatcttggcttggcgcgrtctgggctcaccgcaacctccacctcccgggttcaagcaattctcctgcctcaacctcccgagtagctggggttacaagcatgcgccatcacacccggctaattttgtatttttagtagagacggggtttctacgtgttggtcaagctggtctccactgcccgacctcaggtgatctgcctgcctcggcctcccaaagtgctgagattacaggcgtgagccaccgcgcccggccctctgtttgctttctcggctcccgtttctccttgcaacaaggagcaaaataaaatcccacatcttaaaaactggatccattgtttgatttaaagattaacctcgcttaaatgttgtgtttaagcagacacaacagaagataactcagtcctgctacctagaaagttgccctgcaaggtcttcaggactattgattaagcagataaatcaattatcttgttaattgaatcttaagagtcatttaatcgatccttttagaccatacttgaatgatagtataygcatgtgttttgctaatcagtttattctagacacagggctcggggttcattgacagcaaaaatagggagatattctaaatcagtccttgcttagcacaaagcagtaagcagtttttcccgtggtttcattgatttttgtaaaaataccaaaaacttgaggtttttaagaaaatacttccatgtttttatttattatgtagaatattaaaaacttaatctaatctgaaaggtgaggatttgaagaaaaaaggtagataatgcaatggtaaatgtatctttattgacttaatatatcatgtttgctctgatagtaaaagaaccacccagatggtcctttaatgttcctttcagtactaagattttgtgaaacatcttttaaagaggagtaggtggtgtatgtagggaaaaaataaatgtgctattttggcttctagggaggagggggagggaagcaattatttttagaatatgttctagttgcacacggttttagaagaaatagaagagtgtgttttaacgacagtgaatccttcagggggatgaagtctatggaaacacgtctttcaaatccttcccaccatgatcccagagaggacacttgtaattaaagtgtgtgtgtgcacatgtgcatgtatgcacacttatgttcccacacaaatgtgggggagggaagtggcaaacgcatgcacatgttagcaaagtttcttggattaaaaagtacttaagttcactctttatgagaaagtgctgccaaatttagcattccttattcagggggagctacagagggaatgtagctgaacgtagaaaaaggtgaaagaaataatgaaatcagttagaaaaaaaatattgagtcacactattaatataataccaaggggttaaatgggtaagctaactggaatgtttcccccaaagttaaagcagaaaagttttagtgctgagctctttaccttgattttttcccctaagcattacataattttctaagcagaatttcttgtgatagaaaccatgataaataatgtacctacctgtggtgtagcccgaacttgcttaactgagtcccaaaggaatttgttgccgtggacggccctgttacgtggactttttgcaccataacgtttctaccttttggatcatactagtggtttgatcaagtctatcaaacaaacatcattcacattctagtctatagacagtatacaagcagtaggtgttcagataattttttgagatgaagtctcgctctgttgcccaggctagagtgcagtggtgtggtgcgatcttggctcactgcaacctccggctcccgggttcaagcaattctcctatctcagcctcccaagtagcttggactataggtgcacaccaccatacccagctaactttttttgtatttttagtagagacagggtttcatcatgttgatcaggctggtctcaaaatcctgacctcaggtgatccacctgcctgagcctcccaaagggctgggattacaggcatgagccaccacgcccggcgttttcaaataatttttaataaatattgtctttcagccttttaggtattcaagcaaatattgattctgacagtgaaaaaatagtctctgtagctgagcagttccttttgatgtattggatgcagactctttatcaacttatataattcagtaaaatatgtatctatcatagtatcaactttatatgcgttctttaaatgcaaaaaaagtagcaattccatccacaaaccccttagtagggtttggggttctgtttttatgggttttcttggaggttaaacaggcatcttgatgttttccttctcctctcttctatttgcttgagataattcttcccacctgacacccgtgcccctcctcctcatcctccagccttctaccagtcttgtgtaggttctgataaccattcttgkcagtcaagcattttaattgaagcatgggtttctgcttaattattatctcagcgagcgttggcattgtaagcttttcatttgtgaattgtggaatccatttttcatattaaggcagaggtaaggggagaggcagataaaaaaaatttaaaatttatttcttcatttgtccattgaacagatatttattaaactaccatttacctggcctaacctaggtgttgagggtctaagatgagcaagaaaggccaccgctctcaatgttgaagcttctgggctgcgggaagggtccagatatcctactaagcccctcacacatgccagctaatttagccttacgacagtcctttaagaaagctaatttatacacagttgaagtaaatgttaaaaatcccacatagtcctttgaagtttgccccatgcttgatgcttctgcagcttttgctgctgctgttcactcccatattgaagtgtttcctcacttgtttataaaccactacatcccccaacacatattcctacctcctccccgtggctctccagttcccctcccgcaatctcttacccagctctctcccagtgtgttggtctctcccaagtcctggctttgtgttttttctctatttactggtttttgttgttattttgtttttgtttttgagacagggtctcgctctgtcaccccggctaaagcacagtggcatgatcatggcttactgcagcctcgaactcctgggctcaagagatcctctgtcctcagcctcccaagtagctaagactacaggcatgtgccaccacacccagctaattattttttatagagatgggggtatcactatgttgcccaggctggtcttgaactcctagcctcaagtgacctcctgtctctgcctcccaaagtattggaattacaggcgttagccaccgtgcctggcttccatttgctctttaaccartatgatatccctaagctcaagctcttctgtttccagtttcccattggtgatttaccctttttatgttaccatctctggcccctagagcaaagcagttgctggtaaatgctggggtcttgacttctctcccccttttccatgaggagtctggttgaagcagctgagctctaactctgtgggattctcaggattacaatagtggcctgaccctagatctgccaacaacagcatcaacgtcaccgtttcttcctcttcctgtaatttttagccagccctcattttccttccctctgcaccaaaagtagtagattaccactggaagatttggcattattttagccaggcattcaatgtatcttactaacacagatttttctgaggtaacagaacctttgcttctatcgctaacacagaatttcacaggtatctgtcttgatgatgccagtgttggtctatttttaatatcaattccttggggaggcctcattaggtggcaggtaacaacacaaactttggaagagaagcaggttggaatccagactctagccaggtaaatatgggcaggctaccccacttctctgcaactaaacaatgaggttcatagtgatggtcttgaggacgatatgagagtttgagtataaagtgctcagcacactacgtgacgtagagaaagttctcaatgaatgtttctaattattataaacgttttaccattgtaaattggtggctgtgggaagaggaaaagtcaggtcagagttcagaagccctataagtcatttgaagtcatttaagtcattataagtcatttataatttatttaagtcattttaagtcatttataagtcattgtaagtctttgccctataagtcatggcttgactcctgcctgtgttgaatagaagacatctttctgtaatttatctgtaaaagagactatttatccaagactttggagtttaaaacattgatcatatctgggctgggtatggtggcccagtgctttgggaggctgagacaggattgtttgaggccaagagtttgagaccagcctgggcaacatagtgagaccctgtccccacaaaaaatggaggagttagctgggtgtggtggctgcacagacctgtagtcccagctactcaggaggctaaggcaggaggcttgagcccaggaggtcaaggctgcagtgagctatgatcataccactgcactccagcctgggtgacagagcaaaccttctctaaaaagacaaggctgggcgcagtggctcatgcctgtaatcccagcactttgggaggccgaggcaggcagattgcttcagcacaggagttcgagaccagcctggacaatgtggcaagaccccatctctacaaaaaatacaaaaattagccgggcatggtggtgcgcacctgtggtcccaggtactcggaaggctgaggtgggaggattgcttgagcctgggaagcacaggttgcagtgagccaagattgggccactgcactctagcctgggtgacagagccagatcctgtcttcaaaaaacaaacaaaacattgatcaggtccaagtacttgtcatcctcagcctctctagtgtatgtttcacatggtagctcatgcaatccacaaagactaaattttccataagctgtgatatttactgaatacaacttacattttatttgcatttttgtctgattgtttctgtttgctgtctattgtttcctgtctctggttcacagatggtctaatatgtggcagttttatgccagtgtcctctccagaaatgctcatcaggtggtaggaaagcaagcactaaagatttttctagtcccttcttgaagcacattcagagtctggggactgtcaagagaatgaaagtgagaaagcttttgctacacatcctgcacaatccaacactaactctgttttattctccaggacctacagatagaacgagagaggagttcatataatatatctggtggctgcacggccctcattgtgatttgccttttggggaagctgtatgttgcaaatgctggggatagcaggtaagcagatgagctgtctgattcttgctaatttctaatgccttctgatstttttattttgtctcaaaaattaaatgattagaaataattaaagacaggccttctacatcagaatgaaaatgcatttaaggacaatcaggttgatattacaaggtaaaggcagtctcttacttatgcatatagcatttcatgtacacgtctgtgataaatctaaaccagtagtattcaaacgttttttgacttcagaatctgtttctcagtgaaaacttagcaggagcataatatgtgagagtgatgaggaggaaggaaagggattcgagtgccctgggtgtttggaagggggcctgggatgactccccagttgactccacttttacttagtgactttgcactgttctctcccagaagcttctccttttatgcacattcccttagaagctgcagttgcctcacgtccgggttcaactgaaggaaatttgagccaagagatcattgttaacccttcctttatccagcattgccagggaataagatacatttatgtttttatttcatttattttttaaaaattagacacagggtctcactatgttgcccaagctagacccaaattcctgggctcaaacaatcctcccacctcagcagcctgagtagctgggattacaggttgcaccaccacctggcagttgtgattttcttttaaataactgatgcttcttcacttttggtgtggggaatttttaaattacagattttgcaacaaatattytaacatgtattacacacttctccaccgctttcataacgaaatatgctggcctgagagtggggccttttccaaagaactgactctttattccgaaagtagtaaaagtacaggactcttccccccgaagggctgtgaggactctcattcttctgtccccttcctctaggtcacatggctcttgtgggctctcctgcttgctccaccctttttgaggtctgatcccaccccttccctttccccttccctgtctccagcttaagttgctgttgcctctgcagcccagaccaccaattcccttgaggcaatcaagaaattcaccttaattttacttccatttacaaagcagacttaggctgaggcagccttcgttcctcctagtaaagcgtcctttccaagggaagatcccagagaacaaggagcraaccgacctggcagtggttttgggggcttgaagattggtgtttgttgaaggtctgttgctttcaaaagtatatatgtggtgacataaacgtatatatatacattttacracaaatattctaacgtgtattacatgaaatgtaattacatgttctaacatgaaagaggtggagaagtgtgtaatacatgttgtaaaaatgtatatatttacgtttccttgtaaaattctgcccagtaaatggaagtatgtgtaagatgctatctatgtttaccccatggctgccattcccatgtctcaggtcagggttctgacaggagacagactccaactcagatgggtcaactgtgaatgaaggaggtagagagaaccggccaggagtgttgaggtccccaggaaggagttgaccaccctgaggaaccagggaaggaaacgctgtagcagagccaaggagagtgggagccactaatgagggaccactgggcaggagctgttagaaggaatgggagaagatatgctgacttctctctgcccgccctcmcatctcttgcctgaccttcccatcggctgaccccagcaggaagccagctgatgagtggcccagggaggtcagcctgccaggacacagacacaggccagggccgtacctccaggatggggacagatggaaaagaaccagcacatctgctacccctcctttcctctcccgcctcagggtttgagcagcttcaaagacaggaatctatggtcttcaggggcttttaaaacacactgagtggccagcccctggcctcttgttcagttcctgatcttgagctggtcggtagacagaggagagcagcaaaggaggcaattcattgctctttgtctgctccaattgagtaagaccgagtggatgattcagctgttgcactcacgttcaccttttaaagcctttatgtctggtttcctgtcctttaaaatgagtttgcttcctggcccactcagggactaaggaagtgactgagtgccttgctcctggaaacaggcccaccctacctcccagggaagtgcctttcaccagatgacctgagtcagaagttaactcaacttcccggctggaatacctttatgttagactgttcttcgagactcaactcctccccagtgcctttttctctcttttttttttttttttcctcatttttaaacgtagtttccttcaaagctccaggctccttaaaagagccacctacctagccagggcttctaagcctgcatcccagaagctccagtcctctgtcctggaatctgccagtcccaagagttcatcttctgggctcttgccttctgttgtacttaggtgccaatttccagaccagacttcaatttcatctataaaggcagtggtattggactagataatctctaaaaattatcccatgaggagtgacacttttagaaagtaaagttgtactataaagtatcttttggttattttatatttcttagaatttgttttggaaatgttaatgtaactgaagttcttgtatttctaagtgttcataaaagtatgatgttttggccgggmgtggtggttcacgcctataatcccagcactttgggaggccaaggcgggcggatcatgaggtcaggagatcgagaccatcctggacaatatggtgaaaccccatctccactaaaaatacaaaaaaaatgagcgggtgtggcggcacacgccggtagtcccggctacctgggaggctgaggcaggagaatcacttgaacatgggaggcagaggttgcagtgagccaagattgtgccactgcactccagcctgggcaacacagcaaggctccgtctccaaaaaaaaaaagtgttttgttttacatgttatatctaatcatttgaaaagcctaacagatacttttatccttaataaagctgtaaaacatttaaaaaaaaatcaaaaaagcagtatctctaaaacctaataagcttaatgataaaatactacctctaaaacctcataagcttaattatgcttacagtattctagycccagtatccagatataaatttggggttttgtagttgattatttgggttttctgttcacatatgggtcatacttcaggaaacctgagaacaatgtgagttggtatttttatgtgctatccaaaggatcgtttatgcgacacttactagagtgctatttgmagctcttttacaaacaatagatactgatatcatcttctaggattgttgtctagtttgccatactaataatataggtatttgagcttacagaaatattcagttattcccaagaaaccacagctaagtgagctttgatcatatctgtggaaatgtaggtccattatcactgattgacgagcagtcaggaatcccagggctcagtttaaaacaaatgcttagagccgcagaaggttctggcaacagagccctgattaatgaagggctaagttttctttattgctagatattagctgtcatgtgctttttttttacatcttgacagtttcgagagtaaaaaatatttgttatatgttcactgcccccataattattcacgctcaggaaaagagaagctttgccctggtttgatttggaagctgccaatggtcaggaactaagctgtgtatcatctgatttaccatcagacatctgcacacttaggggttgtattcaggaaatgttgcctgatgctgtttgtggctttatgggtttttgagtcaacgaccatcccattcagaggacataggaccattcatgtaggatggtccacagtgacgcgagtacctgatccatgtggtctggtccgtgccctgatagaacttgcccttctactctgccgagctaaccagccacagaggcacatgcagtaactgcttgatgcatgccagttgctttatttttccccggcagagtcagccaactcaacacctaggggatcataagggaccaggaaagaagcagatggtgggcggattttcacttcaagcaaaaaatgaaccagtagcatgcaaatgtcatgcaaagcaatatgcaaactatcacccattgtgtttgagtcatcagctccttagggctctgactgattcttcagtttaggaactccattttagagatcatttcatttcatctctagagaactaaggcactgaggaagcaaagccattaccacgtattttaaacaatgtctaaaggtttagcaactgagactgggtgaagtcactcagagttttaaaaagcatttaagatttattaaattcataattctactcttgccagacttatagtaatagcggcattaaaatagctaataagtgcaaggcacgtattaaatactataacaaaggatcacatttaattttctcaataatatagtgagaagtaggcactgttaatacgagttaaatacaatttaccaataaataaactgaggcccagtgaggggaactggtttccccaggcttcgacagctgtggaggagcagggacaccacccgcccaagactgggagttcgatcttgtccacaatctctgcactgtaccctgggatttcccatccatgctgaaactcacagaggttttgtttttctcattttagcatctctaaataaagaagttctaattaacatttttttcttcctgcttttatgtgaaatagtggcacaccttataatcaatggcatcttagttttcacctaaaatggattatggagggagtggaaggctgccttagaggctattttaaacgcactgcagttgttgacaagataagctttggatggtccaattcattcatttataatatagaaaaggagtgttttctcaacatgagagctcccatctccttccaagcgtcccaaagttctaagactattttaaatgttgtgtttttggccgagtgcagtggctcatgcctgcaatcccagcactttgggaggccgaggtgggaggattacttgagcctaagagttgcagaccagcctgggcaacatggcaaaaccccatctttacaaaaatatatatatacattagctgggtgtagtggctcacacctataatcccagctactcaggaggctgaggtgggcagatcacctgagcccagagatgtcaaggctgcagtgagccgtgatcacaccactgcactccagcctgggtgtcagagtaagaccctgtctcaaaaaattaaaattaaaaataaatgttgtgttttcattttgatcataatctattgaaaataatataagcattttctgattctataaatgattactaccacaaattcagacttccattttgttgtgcttataacttctttggaagcaagtgtctcactaagtttttgaattgagcccacagactcctgggaatagagggtcatcttctcatgcttgagagtctcctaggaaagggtagggaaagtcgaatgtgtcattcattagctctttaggaccggagtgaatagcattccatgaattgtcactgaacgaagccagtgatggtttcctttcatttatctttcactcctttttagttttccacaattacccccctttacagttaaagctttctctattagttcaaaggtgagttcctttgacaagtctgactgttcctgaggacaggagttaggtattaaacaggacttacgttcctaaattcaaaatcaattacacatctgtggcatcttctctccaggtttcttccctttgctggtggtaaaataatgaaatattatgtaactgcctccaagccaagggaatgcaaagaactattcatttcttcttatgttcatggatttcaccaacggccagtacaaatcctttctgaaactcctttttgctaataagtggttcatctatccacacgtgccagtgagctcctgctctgttagtagccttcctctgagttcagaaatatatttgatcttaagccattaactatattaaatacactattcctctcactttctttggcatgtatttgaaaaataacagaaaaaaaacaaaatcaacaactcttctccactgtgaaagttgaattgctgtttctcccttttttctgcagagccccctccccatctttttagtgtgtatttcatgtaatcccttagctatacccataacctctagaagggattagcagaaagaaaataatgctaccaaatgatcacaaatacaggcagagacacagaaaccaagtgatggctcaaaacagtctgtacttttcccatcaggccacttgccatccacacagagggcacccgagaggcccttctctctctgaccttcctctctcaggtacttcttgctctgaatcagtgatcttcaaagtgtgatccccaaactggcagcagcatcacctgggaacttgttaggagagcagatcactgctcgctgaaactcagtgggtggacccagcagtctgtgtttagcaagtcctacaggtgactccaatgcatgctcaagtttaagaatcaccactctaaagtctacccctgggcatctgaaagagctaggaaggattgaaacattttagctgttcctggcctgagggccaaagcgttagactgcaggcacactataaggcagtctcagcagtcctgcagcagccggacaccacacgcagggcaagctcctggaacccgtgtctccccttccactctgcagcctgctacctgcagtggggcgggggcgacctgcctgtacctgggccggctgactgcagattcctttctgccagcctgacatcctagaacttaggccctgttcctctgaagagtagagttgggtgagaatttctaacatgatccagctccacatgtcagcctcctcttcctgctgggtagttctgaggcctgagtagctgtgaagcatcctatcctatcccggcctccattcccttgtctggaatgggtcagacatgcccccgtgcggacttttcgtctgtcattgttgggcccctgggaaagtgtagttgtagttccccattccaaccaagctgtgccttgaaacacgtcccgtgtctcttacacactgaaaggctaagctgggaagtctcatgaagttcrtagaagtagaatatttgcacttagaaatgctggcgtgagattattgtgatcgagatagtcaccttttctatgcctggctgctgagctagggtagaacagtggatcagtgccaggaggaaactttgtagtagagaacccaaggccctgtgtttgcccactcgagcccacaccaggatagatttccagggcctgatcatctaatgtgtaggtgatatgaaaccgagtaagacaaactagcaagattcaaaaagtcctttagtgcctgggaaagtgggtaaataccaggtgaagcttaaccacagtaaaggtaaagtatcacacctgttgaaaagagaaaaaccagcctggcagtcagttacggtggctcatgtctgtaatcccagcactttaggaggccaaggcaggaagatcatttgagcccaggacttaaagaccaacctgggcaacaaagtgagaccttgtctctattaacaaatttttgtttcaattagttgggcatggtggcacatgcctgtggtcccagctactcaggaggctgaggcaggaggaccacttgagcttgggaggttgggctgcagtgtgccatgattgcaccaatgcattctagcctgggtgacagagtgagaccctgtcaccaaaaaaaagaaagaaaactagcaggataggggagacagcttatcaatggttcacatttttttaaatgtatttaagtagacagtaaatttaatctggtcagtagtgtgatatagacaccagaacctaatctgatcataggctgcagtatttaagctataaggcaaataatagctaatgtttctgactggctggcttactttgtccatagtaagtactgttgctagtgtctagggctttacatgaattttacataaataacctcattaatcctaacatcaacccatttggggaagtactattaatgtcattttacccatgaagtccctttctaggtgacataattcaacatgtgtatagatgatcaggaaccttcaaaagagagactggagtgctgaagagattggaattatgtttgaaaagatgaggaaaattcaaaagagctaaagtttctcagccacatgaaaagataacttttgttgatgtaaaagatcaaatatttgtcagttatggggtaaggtggtaaggctagctgtccatgagmctgggatagaagtgatagccacaggcaggcaggatggtggttaagagcagggactctggactcagatggcctgagctgaatcctggctctgccactattgtgtgtgaccttgagccaatctcatgttttctgtactgagtgttgtcaactgtaaatggagataatgatagtactcactcctcaggtgaggattagatgagcagatgcctggaaggccttcagcacagagccaggtgtatggcaactgctcagtaatagttagctgctattattgttatcatactgatcaggagaactgtttatagatgcaacaagccgctgaagaatgtagtgggttcttcttaatggaaatagttgtgcatcaactgcattctacctagcaaggatgttgtgctaagtttttcaaggtgtccatgaaatattatgtttgaggccctgtgcagtggctcacgcctgtaatcccagcactttgggaggccgaggcaggcagatcacaaggtcaggagttcgagaccagctgggccaacatggtgaaaccccgtctctactaaaaaaatatatatattacaaaaattagccaggcatggtggcgtgggcctgtaatcccagctacttggaaggctgaggcaggagaattgcttgaactcgggaggtggaagttgcagtgagcagagatcacgccactgcactccagcctgggtgacagagcaagacctcatctcaaaaaaaaagcaaaaaacaacaaacaaaaagaaatattatgtctttctttctttttctttcttccttccttcctttccttccctttcttcctttcttttcttttctttcctttttcctttcctttcgagacagagtcttactctgtcacaaggctggagtgcagtagcatggtcatagctcactgcagcctcaaactccttggcycaagccatcttcccatgtcagcctcctgagtagctaggattacaggtgcgtgccaccatgccaagctaatttttattttttgtagagatggggtctcactatactggacctgtgctcaagccatcctcttgcctcgcctcccaaagtgttaggattataggcatgaaccatcacacccagcaaagcattatgtttctgtgactttgaggatcttaagtaacrtgactattttcatttttgtctctttcctttaagagtttaatgaagcagtgcctttgtccctttcaggcactcgaggacctaggcygaaggaggctctgtcatttttaactcttggcttccaagagctcttgaggcatctccatccagtgagacagaaggggacaagagtgtggaggagcactcaagaaagggtgttaggggcaaggcctggtagagacacacaacatttctgggtgcattccattggctagaacccagttatgtgactttactgagaagcaaagaaggctgctgggaaatgtagtctaagtcgtgtacccaggcccaagggaattgattttggtggacagttagcagttttggccagcagtggcattgaaaagggaattcatattaggttcaattagtaatagtgtcttcattcagtttttgatacattttcccttttgttctgatgaagttacaacttggatatcactrtcatttttaaagtccaaagaccaattacctcttttgttacctgaattttgtcactgttagttttaggagagatgcagtaagttcagctttagctgtcaaacatagtgaagaaagaggtttctgagtagctaggattacaggtgcgtgccaccatgccaagctaatttttatttttcttctccaagatccactttcatcttggagaagaacacatttgaataatgaaaaagcctacaagtaaacagcataccaaatatttgtctttggaaagttcatcatagaaagcaaagattatttcattgctaaaggagaaagattacattaatcaggcagggtgtgactatactgatgttttaacaacttctgttctttggtggttatttttaaattgtcatagttatgttgtaaagatttttaaatgatataccagttcagtttaatagtttcgtttcttatctgctctcaaactgcagttctttggtatgttttttgagttcatttcctcccattgctgtcatccttaatataagatttgaaataactgttaggaatggattacttatatatacacctcaatccatcctcggtttgcatatgataaacttttacagttcatcgtgcatatattacatagttagaagataaagtataagcagagtaaaatgtcatggtaggagcaggattcaatgaatatttttatgccttccatgagccaggcatctgctgggcactgtgctggggaagctaccgtgaagtaggcagatgaggtctctgtcctcttctacttgtagtcagcccaggtaggcaggcagtcaggcmkccatttacaatgcagtgtaacaggcaaggcaggtgtttcaggagacacatgaagctctgggctktactgagtgaaggctgccttgggttaaaggcacacatttgtaatcatgttctttggccgcagaaatagcaatgctggtacactgcatcaacagaattgcctcacaggtcagaatccattgcagcagagttctacaggctaagccctgtgctttattatttcacagtgtcattgtggttgtgaatagtgcttcaatgtttggcacttggggtcattttgtgatataaatgttggatgggatcatactcgtttttgtgaaatataaccctcattgagccaccatcaacagacaatggtttatgaaggtcttgtttcctgaagggatgttgatgttcactgagcagtccttactggtgtgtggtgtacagttatcaaatgatttgtttgcttcaaggagttaactgaacaatatgggcatttcaccttcaactctatcctgtcttgtttaagcaaggtaataaactctccaggcccaaatatggtttagctgttagtacaggaagggagggagaaacatgtcagcccttggaagtgagccagggttgtgggaggtagagtgttgaaatgggatgatcacaggtgctagggtctggaaatgctggccctcacccctccagaaaataccttgctttcccatttgtggaaggggctggttcctgctcttctagattgccatgcagattacagatgatgtgcttaaagcacaagtatggttcagcccttcattctttcaccaaatatgcctcatgccagacactgtcaaagtcactaggaacgtagctatgatcaaaaaaaccctgccttcatggagcttgcaaaccagtatggaaagacagataatgagcaaggcacataagtaaaatgttgagtatgctattggtaataatttctaaagagaaacatagggcaagggaagggacttagtagtcaggggtgggttgcagtttcaaatgcgacagcaagggaaagagtcatgggggatagagtcttagagtaaggtctgaaggaggtgaggcaaaatgttctggcagatgaaacagccaaggcctttgatatgatttggctgtgtccccacccaaatctcatcttgaattgtagttcctataacatactcccacgtatcatgggaggggaccaggtgggaggtaactgagtcgtgggggagtatttttcccatgctgttctcatgatagagagtaagtctcgtgtggtctgatagtttcataaagggcagtttccttcacatgctctcttgcctgccatcaagtaagacrtgcctttgtacctccttcaccctctgccatgattgtgaggcctccccagccatgtggaactgtgagtcgattaaacctctttttctttataaattacccagtcttgggtatgtctttttagcagcatgagaacagactaatacagccttgaaccaggaatgtaccttttatagttgaggaccagatagaaatggaccaaagaaagagggggtagtaggtgaggcagaggaggtgcaaacagggcccaggcatgctcagtggcagctagtgctgcagtgaccatggcaatggccatgaggtctgagcttgaactctcctctcttgcttgactcttataataaccaagagggtgtgtgtgtatgtgtgtgtgtgtacacactcatttatatataatattcatttttaaagccttcgttccatcttgcctaccaaggcgtaagtaattttgtaaattcataaacagttggatctatgtaaggccttaaaaaccatcttgtaaagtggtttgtatacattaagcagtgggtccattgttggtacgctttctggtagaatyttacacaaattctcctgtgtataaacaaacaaggtagagctgcccagactaaactctagaacaaggctgaggttcacaccagctcccttttcccaaggtggcacctggggctgctctgagggactgtgaagcccmctgaactcggtctgaggctgacttctggtccagaggctgccggacttgcctgtacatcagaatcacctgggggactttgccaacatatataataattgagtcactcttgtacacctactacctagatcctgcaattagcaattttcatcaaatgtatctatccatcctcccgtccctctatcaatccagcgcagacattcatgtattcacctgtgggatttaaaaaataacagtaatgaaagttgcagggcccctattctcaggcttactgaatcagaatccttgagcttggggccactgtgggaaccactcatctagtccagtttcccttttttactgataagggaagtgaagctcacagaattgtctttctcaagttcccacagatagccggcggcagaactcgtaccagaacctggatcgccacctgtttttggaggacctacctcctccgtttctgagattttgcttgtkatccgcttagcaacatcagttctttctaagatcagataatactctggacctactctttatccatgaacagtttgctgagcctctgctattttaggggattgctaagaatgtattttctccttggtcaaaactttcaatcattattggggaaaaaaggagtataactacagagacagatgtttcctggctggacatggtggctcatacccataatcccaccactttgggaggctgaagcaggagaataatttgagtccaggagtttgaaatcagyctgggcaacatgatgagatcccatctctaccaaaaatttaaaaattagccagatgtggtggcacacacctgtagtcccagctactgagggggctgaggtgggaggatcgcttgagcccaggaggctgaggctgcaatgaaccttgatcacgccactgcactccagcctgacaaaaatatctcaaaaaaggaaagaaagaaaggtttccagagtacaggtgtgtgtctttgctcttagctgcctcattgagacagcaatggaaaaaacactgggctgggagtccagagattaatcacaatcttgtcccgtagcaaactgcataacagttggaaatccacttcactctctgagccggtttcctgctttaaagaacaagtggagttaacaggatcttactaattgatttcaagggtgttttccagctctgaaatttgggaaccattaacttagtatccagccagagactgacctgcctctattatttactctatcaaagtaactcttttgtcagacatatcacttaggtttgggggggaatgctggtcagctcagcttcctggactcctgcaggctatgatccattttcttcccttcaatcttgttaggttaggcatagatggcagaagacaggtaagatgctccaaacctagagcataaagaaaattttcagttgccagctccagtgggacttggttccccctgagagctgtgcttcagcagtttcccraaatctaagcttcccaggaagcccccaccctgctcctgatgttcctctctgtagcttcagaagaactgtacggcactgacctttgagttccttctggctctcagaggtcccagtcagcaggctgcagacacagtgtctgccacttggatgttaaggttgcctctctcactcttcaaagcccaacccttcaagaaatgagttgaactagcagctcatggtttagtggctgcatgtgggcctaagtggtgactaccacctttcccttgatattacatcctgcccttcaatgtgagaagtggattctttcatccctttatttttcaaaaaaatttttattaaaaaaaatttttagagacagggtttgagtctgtcacccaggctggagtgtactggtgtaatcatggctcactgcagccttgacctcccaagttcaagtgatccttccacctcagcctcccaagtagttgggatcacaggcatgtgccaccacacctggctaatttatttttatttttacagagatggttctccctacatcacttaggctgctcttgaactgctggattcaagcaatcctcccacctcagccttccaaagtgctggaattacaggcctaagccacggcacccaggcttcatgcctttgtgttttgttttgttttgttttgttttgtttttttgagacggagtctcrctctgtcaccagcccagggtgcagtggcaccatctcggctcactaccacctccaactccctggttcaagcgatyytcctgcctcagcctcccgagtagctggaacyacaagcgcgcgccaccatgcccagctaatttttgtatttttwgtagagacagggtttcaccatgttggccaggatggtcccgatctcttgacctcgtgatccacctgcctcagcctcccaaagtgctaggattacaggcatgagccaccacacccagcctatgactttgttttaaatacttcccactcttggcgcctcccgctactactgcctgcctgtcagctgacagagccaaccaacctgactgggatcagtttcctgtctctaatcctccccagccctgcagattccctttgactcatccctctgatactttcccaaaggaaagtggttttccagaatcccttcataagggttttagcacatcacagatctagagttgcagctggcaccacttcctcctgttatggcctgatatggttttgatggccctggttcagttcaccttcacccctcagactaggggtgctgctctttcacttaatgttagtcccttttagtaacccaaactttatatgggttatgaaaaaagatagtatgaacattttaaaattagatacaaatctaaaataaaatttttaaagagtaaagaagggagacccatagctaaagtgcacagtagctctctatgtgaaggatggctcaggacacagaatggggcaatggttatgagcatgcacttggaactcacgtgggcctgagtttgaattctagccacacaacttagcagaatgactttggtcaaggtagaggatccttctaaagtgtgtgaataaaataataatagcctcctttgcagaactgttatattaatgagagggtgcacagaaggcgttcagtgtggtacctggcacatagtaagcacttgctacatgttagctattgtcattattaaaatagaaatgctaggggttcaccaaaagtatagggtttggagtcaaatggcccaggattgaatcctaattctatcacttactgtgcaacctccagccagttacttaaccattctgtgccccagttacctcgtctgtaaattaggaattctaacaatccctatccctttcagtyattgtgaggattaaatgaattaattcaactcagaaaatatttgcattcctactgtgttctgagaactgaaggcttagttaataatgaagacaaaaacccctgagcctctgccattatggaactcacattgtaacggggtgtggggaggaatggtggcaaaataagtaaaacataattcatgcaaaagcattaaacattatgtgtgaatcgagtgcatttgaaatgtttatacaagtgcttgcctgccttatggaaagcacctaataaatgctagttatcaacagtgattatcaatatattatttctgccactgctactactgcagatagtaaatatatttaagtttataataaatacatgatgcaaggtgaaatataatttgcattacagtgtagatggcttgcatatgaaagggctacatgaacttttgggctgatgtaaaagcatgtggtgaacttttctgatagcgttcctgagctgctttaggactccactgtgtcatataattcatcttagccaatattgctgccagatattagctctggaccctagaactgtattcttaccaggttagatgtggacaagatgctgaattcaagtcagcacactccaaaggcccgtgtgtgtgtgtgtgtgtgtgtgtgtgtgtgtgtgtgtgtgtgtcttcacaaagtttataatgataatttagttgctttgggacacactgggcagcctgtaatattctttccagctctcgaattttgtgattttttttttttacctagtattttggcaagcaatggttgtctctaagtaacacagaagaagtcctttttcaacaaagcctttaaaaagcctcccagctctcaggcattcgaaaaacacagttgtgtgtgtgtgtgtgtgtgtgtgtgtgtgtgtgtgtgtgtgtctttttctttttcctgcaagacttagctgtgaagtcaaggtcactattcctagggagctcagctgcacaagaagcctagagctgcattgctgggcctggagcctgccctgaccctctgtgctggactgtgctttcccacccggctcctggacccttgcttttcttttccagtggtatcccaggcaataataaaatggcttttgaaatcgcagagtgggaacgctttccctactgtgggccaccaggcctgcctgcaaaaattggattcgtgcaatccattttcacactgattcatctctctgctcgcttttcactcctgttttgctgcttttctgtgtcaaagtttttgtataattgttcccccaccacacccttgtcatgttctttgtgattctgagctggcaggtcatcattgccaccagcatttcaaagacacatggtccttccaaatggactgcaccaatttctcaatgttaatagatcatctaaaaaaaaaagctgtattatatactttccagaccctttgtttaaatgagaccttacaacagaggcccagtatgtaaaacagataggaacacttgtgatgtagagcaggttatatactgattaatagcacagattctggagaaacaaaagctggattcaggtcctggcttctgtgacttatcatagcgctgtgggaccttgaacaaaatgcctaacctctctgtgccttccttatcagggaaatgggggaaatggggataataagaggccttatctgtgataaggttagtagaaggattaaatgattcaaagtgtgtaaaatgttaagcacagttcctggcatataataaatgctcaataagtgttttattactataccaataaccataataattatcattagtaatattatcccccaggtggaaaaaaaataaaaactagggaccccaatttattaagccaaaaaggaaaaaaaaaaaaagctgaaagttgagtcatgcaagaaactgcctttccttttgttcctaagcaaatagctgcagataaaaggttaaatatctccactggtagctactctgggttcatcttatcttatggaaagtactaatttactgagccccagatgaatagataatcgactattccccaacctgttgcttttctyttgcaacatgtgggttaccataccctccctctttcccctccagcccacttttcgcctttaaatgttgaagccctcaaattcatctttggagaaaggcaccgatcacagactgtttctgtgattccatgtttttttctcccaggcattccttaacttaagttggcaaaatgaacttttaaatcaattgagacatgtcttggatactttttggtttacacccatcaacagtccctcagggtttcccatggcgctgttaaaaacagctgttcagtatggtattttcaatgccatgcttttcacaaattgcctttgcccatagaagacattgaatgaatgtcagaagaccaacaaacccatcttcatattgttttctggaatggatacttaattctttagcttatgagcaggctctcaaacaggctaattttgttcaggccacgaggctggttttgtcagtgattgggcaactgtgccctttctccctctgtgtgaggaccagttgctcacacgcaggccacctctgcatgtcacagccatcaggattctgccacttaaaagggtaaagcggtattctggttagggacaccaccttttctgaatgtggaytctgcagacaacttccttaccccaagtggtgcaggtttgtggatcagagcntcttagggctagtggtgccacagcaggaagagctagactagcccactgttctttctgcagcagatacacaattacatgatgctaaagtattcattactgttttagtgcattgccagcaagcagtcttctggttgacccarcatttctgcaagaactctcaggattagcacattgggaatgtacttggaagagagatgwtcctaacatatctgtgtataatgtgtgtagtataggtatctgaatatatacaataagctgtgcaaaacaaacatgtctcaggttaggcctaaaagaaatcaggtaacaggcttaaaaagccaggcaaaccccagctgtcttgtcttttatcatttggtatttcacaggatttgtgcctctccgtacttagattcagggatgtgcwgatttcttccaccagtgttctttgttccacctcctccaaaaagtctccacccatcctctctgcccctacatatctgtatttgctcccttccccttggcttcttacctgcctgcaaacatactcaaagttctctcatttcgcacaaccttccccttatccctgtgtcttcctctttttttttgagacagagtctcactctgttgcccagtctggagtgcaatggcgggatctcggctcactgcaacctccacctcctgggttcaagccgttctcctgcctcagcttcccaagtagctgggattacaggcgcccgccaccatgcctggctaattttttgtatttttagtagagacagggtttcactatgttggccaggttggtctcgaagtcctgacctcatgatccgcccaccttggcctcccaaaaagctgggattacaggcatgtcttccccttaacttggttctcttcacatcccggattgtccctcagagcatgcattccctggctgcatttccccctcatgatagcctcaattctgtcccaatgtgctcccccatctccctgccctgtggtatggtggagctgactagctgccctcctgctgccttttcctttctcctgagcacagggaacaaccttcctcggcctttggtgtactgcaggtatagctacatgactcagtttcaaccacgggggtgtgggcgagtgatgtatgacccacgaaaacctcacacatactgttgtcttgaactgttatgttccctcaaaaagttatgttcaagtcctaacccccagcacctgtgaaagggaccttacttggaaatgggatcttggtagatataattaagatgaggccaaactggagtagggcagaccctaaatccagtgactggacttaagaagggcatgtgtagacagacacagggaagatgacccagttaaaatggaggaaatggaggtagagacgggttaagaagacacaagtcaaggaacaccaaggatttcctggaatcaccagaagctgggaagaggccaggaaggattctgcagagccttcagaaggagcgtggccctacgattttgatttcaggcttccagactccagaactgtgagagaagtcattttctattgtgttaagctgccaaatttgttgtgactcatattacacgaatcctaggagactgccacacataccatcctcactcttctccagactggaagttgacaaaccaggatggctttggaagtgcatgctgaagctggcagaatacccctgcgactatgcccaagccaatcagaccttgtatttcatgtgtgaaatgaacacacactgtatgaagccattgagatatttaggattatctgctatagcagctaatattaccttatcaaaaacacccacttacagagaggttaaaggcagctaccataagtacgcaccaactcctcttgaaacaatctctctgctcrgcctctaggawttcccttccccctccctccccttcactggtggaacctcttcacacctgccactgaaatgcaggctgccccagggtttgtcttcagccagcttctccacatcccaccctgagccatcttatgcacctwcagcatccactcacatcccgatgttgcccaagtatagaagcccaagccgcacttccctcccacactccaggccccatgacaaccttcctccagtcayctctcccctcttgtcagcctcccacctctctgcagagcgtcaggagcttaccatgaggcatgtggcagggttcgacttgaacttccctcacacttgatcattctgcttcccccacagccctaaccaactgagcaagcctatttgttgcttggctggtggtgtaactgcttttcaggtatttattgggcagggtggccatgaacttgctgccttttggtatttctgaaagagtctgttgagagaaacagtatataggaaggatttctattcctcgcacccttctagaaattctcaaatctayccctrgtaaagcctgaagctcacacttgtggccctgcacaatggtttcctgaatggcttgcttatgccatgtgcctccactggagaagattgcaagaaacagctgtgtgaaatgtgctgtggcattcactgaaggaccctgctgaagagcttgctcattctatcacacagcctcctcttttttcagraccacagaggacttttctctcatatgcaatttaggaaaagcctggggactgagagcagggtaattttttttttgtttctgtggctttttttaattcattttgggccctgagttgtgtaaactgatcctggtttgtatctgtgttgcctgttaggaagcrtttgtgacccacttctaataagcgcaagggccttacagtacatgttttttgtattaacttaattcctaccttcctgtgatctttctagttttattttccacatatatttttattttattttgtgtgtgtttatgtaatcaccctttcaatcaagggtaaaggttaagtatggataaataagatgtcctgcaaatctcacacttaagatgcccagaactagcatagttttcttttccccaatagagccctctctcctgttttcttaggccactaagtgcctaaacttaaaccaaaaacctaggataatttaccctgacctgcattccccctccccaccccttctgtcatcaatccctgttaatcaccagctgcatattttgtagactccatataggagcctcacctgggccccttacacggctggccactgcattggcacccatctggcagtccccaagattactacaatgtggggtggccacaccacttccttgttgaaagcccttcagtgatgtatcttcagactgaagtccagattctagcctctttctaccttcacctgtcacttctcatcctcataccctgagctctggcaatgccagaccaggtactcatatctcccttgtcttgataacatgctgccctcctcctctgtcaagaacagccctgggatgtcttctagaagattcagcttcagcatcacttcttccttgaggtcttccctgactcctccatcccatcccaggcagacacctgttcactgatccctctctgtgtgccgggggcccaagggtctcccctctatttcttttgcttcacttttcacactgcactgtaactgggtgtctctctctcttccctaataggccagagcttgtttgtggcaggaatcaaatcttatctttgtattctctcaaaactcttctagaagcaggctcaactctgcttaggtgttgaaaaattgattatgtatagtattgctgtttgaaaagaccatgacagcgttgataccattgcaggcttttccacattctttaaagacaagtaggtgcagtcagtccagggaggacatcattaacagtgggtgcacagggacctggcatatgaatgacagagatggcttcttttagggaaacacactctccttatgcccagcacatagaggcatttagcaaacatggcctccaccccactgtgcccagctcccagtccatcctcacacatcagttctgattccagatgacatctcgtggacatcagttctctttttcaccattgcactgctgttggtcatgtactgtcacacacctcactgaacttcagcaacagaccctggttccctctctcagctctgtcctataccagtccagtttccacacacaacagggataacctttgtaaaagataaaccctcctctcaaagcccttcagagatgactactgagctcatctgaacttttttgatgacctgcaaggtccttctgactggccccagcccatccctcgagcctcccctgagcctgtcctcttcctaactaagcggcacgcrtggctttgtccagctcctcacacaggccgagcatccgccaccatgcggccttcacacatgcagttgcttctacctgaacwtctctccctccatccttctccatggccccccgtgccagtcctttcagcctcagcctcactgtmccctcctggacctccctgactgaggcatctcccaccttcacagatggatcacggctcctccctatattgtgagctctgtgcagcagaaactgccctctctgcttccccatctgagcccagtgcctagtacagtgcctggcacgaagtaggaggtgctcgaggagtaaacgctgaaagaaaaaaaaaacaaaatgggagaggaagaaaggtcttggaagttctcatttgattggtaaaagtgtkgtgttcctggggttcctgttacactcaaggtcacatggatttaatttgagacctttttatagttaaaaatgtcaagatcctttggaagctgagccttccatatgcacagaatgtttttattcagaatagctgttactcaacatttgagacagatttgcttcagratggtggtttggctctgtctagcatttgcagccatgatctccactcactaatttagggcatacctagatttccagcacaaatatccccctcctggcaatataggacataagccaggggacattggtgtccctagacrgtgcctccacatcctgactccagagtctgtggtctctctgggtgcatctcttctgggtcactcccatttgttctcatttcactatttttgtccctggcaattgtctggacggaaattcaccagagttcaacattttcagtattattggatcttacaaaggagaggagagacaggatggtccccacggcatggagcagaaaccagtgcagacaaagaaaaggcagcagctggatcgaggcaggaatccaggactgagaagcaccctgaccttcgctggaggagacaaaatgcatcaggagtgttcctctatcttaggacgtcggctctctcaaagctcaccccacatgttcaaaagcaaccaggagtggaggtgagaattaatagtccaccatgagtggtagcaagcwcagcaaatggaataatgaacccctcargtttaggtctggccaaaccactagcctctcaagattttggttgcttcacccctaaaatgaaacgattgaagatttctaagctcaacaatttctgtgaagaaatgtcatttaccacatctctgcattatgcacctctagtaaatgtttaatgatctgcaataagttttagagtcacattagtgatttcaactttctgtatttgacaagtgttctaattacccatcaagtaaggaagagctgaggaagaaatgagccgaggactggcaagaggttgtagcaatttgtgttgtactttgacctgctttgtcaagttgtgaacaattagtctcacarmtgaaaagcaactgctgcatgcaaagcaggtgatctgaaatcaggaccwctgctcctgatgcccgctcccactcrtgcacatttaccctatctggatttggtgctcagccctgactgatgatcttcatagcatggtgtgcggttgatggccayggtttatagaggggagggagccgaggcttggaggggctcarcagccagtccagggttacaggggacaagtggaaaggccagyactcaaccccggtccgcctgattccacccaaacagcccagtgtgggcaggcaagagatgaccttggatggattcacagacctgaaaagaccatttgcttgatctgggaggtagcacatattgggagccaggtaaatctgcttctcrgtccctgcttggggacttcgggaccatcacttaaaaactcttcytgcctccttgggttgttgaagagaaattagacacagtacctgcttcttggcaggtgctttggaaaaaaaaatagtttctttcctttcaataagaggaaggattgaatcatgcacagttcttcaggtccaaaggcatttcagcctcctccaggtttccctgccagcctctcccttctcggtcatcaatgaggtgttctttatttcttaaccggtattgcccctatttttagcttatttcatcacatgttcctctgtcatgctagatccctattgatttcagtagggatgacaccacgttcaagaacctgaagaagagacccaaagccaacaaacaaggcacaaggttttattatrgggaacttacacacrgaaatggcccagtggtggcaggctggacagagctgcaactgcttgtaaaaaggatgcagattgtatagcatcttcacttagcatcctccccctagcaccctccacatggcaaccctcatttcttgagttactgctgtcaggtgtgtctgctataaggatcattttcggggtatgcataagttactgctgtcaggcgcatctaccatgcctcttctgagcctccaacagagtctacaattgaatgaaaagccaagcttggaggaaggcgagcttctgaagtttcctgtcctgctctgtggctttctgagcatggggctgctccttggctatctggagttcccagaggaagatcaggaaggcctttgctgaggcctctgacgctcatggccaggcactgctacagactccatggcagtgagccccctctggacaagcacacatcaggtgtggtcaccacagggtctaatcacagagctttgtgcacactcacctgaccacctgtgcaagacagaaacctctctaaggaactcctaaaatgggccatacgtagttaggggttaacccaaaggcaaacttggggcttggcagattctctaaaacagggactcccaagttgttggcacacagcaaggcagtgctaccaagacaggagctgcagacggagcactgactgggcctgtgctgggagaccctctgcctggctgtgggtctctggtcttaggccacagatggcaggtcctgagagtgggaagagccgcttctgggagccacgtccatttccctcacaccagtctgcagaggtcagtcttcatgtctaagccttccagctccttgctgtgtcattccccatgggtaaaattaaggcagatcatgcccccatgagtgctgtggcctagaatgactcttaccgcagcctatttattacactaagccagccagctccactgtgtggactccctaaactcttgcaaaacgctcctataagtggctaccttttatagagattctcagtacccttctccatccctttttttatggggaaatgagggcctataaggctggggcaatgagaagcactaaacaggcctatctccacctggtgttttgtggtagagatctctaccttagtacaaaacatagaccaattttagcaggaaaattcaaggattttttacacagtttttgctgtagatatatgtcatgtttcttgtagaaaatataaacaggcaaaaaagaaaaattgcctataatctcctcccctccccaaccactgttaccaattaggggtatatctttccagccttttttcatacataatcccatttkccccccagggaaattacactctgcatacaggtttgaaacagcttttccccttcctcctcaaatacagagtaatggaaaataatctaaacatttcttaatgcttccaaataatggatatgaacttctgatcccttattcctccgtaactgtggagtccttaggaccttactttatagtattaatatttattgttggctgtagtcttctttgagattacggctttttatttagtttttttctaaagcctcctgtgttgtggttttgttatctcttgctgctgtcaaggagcctgcatgaaacagaattccttctcctttctggattagtccttatcttttttgacttgaaaatcatgtacaccctggtgtttgcactgtatgtaaactgaaagtaaacaacatctaagttagggacagaaggtcacaagtacttaaggtttttcccggagcagagtatgactggtgtgtggttagaatgtaatctttaacctgggactcagtgcttacccttcagagctagtctaggtcatttggccatttactcaccttttataggaaaagttatttttctttagtcattctgggaattggcctaactattaggatgacatttaagtcgctccaggttaaattgtaggacagagttagatattggaattcctgtatatatttagtggggtctgrtgagaaagagcctaaacactggctgatttgggaaaggtctgatagagaaaaaggcacatgtaccctgactatgccttcagctccagccacctctctaagcggaaattgttgagcaggtgggggagagctagttgcagaatgaaactgtaaaccagactgggtgtgaggggaggtaatagaagggttatagggtgggggagcaraggctgaagaagagttggagcctgattcaacctggcagggagcgaccggaggaggagcagcctggggaggaggtgagaggtcagatgggttagtagaaagggaagattcacaagactcagtgacacttggggttgggactgaagggacaggtgggagggaaagaagaaagatttgggacgagtctcactgggagcagagactagggaggaaccaatgtgtaaaagaatgcctggacgtcaggcacctcagaccatttgcccatttttcgacaaaaattatctagatcttgtaaaacagagaaatcaaaagtgccattttctggctatttagaaccattgtcgagtttgtactggggccaaacagtattgcagaagaaaataagatgcttagattttaggtcaggctagagttgaagaggttttaagttcttgagaacacaggctaagggagaagaaggaagaatggagggtggaaggttgcccatagtgaaggaggcaagtttaaagagaagggtagagacatggagagaagggatggggggtgcttgccccccaggaaagtgaagaaggggtgagaggtgcttgccccccaggaaagtggaaacagggtgggagatgcttgccccccaggaaagtggaaacagggtgggaggtgcttgccccccaggaaagtggaaatggggtgggaggtgcttaccccccaggaaagtggaaaaggagtgggaggtgcttgccccccaggaaagtggagaaggggtagagacacggagagaaggagtcaggggtgcttgccccccagaaaagcggtgcttgctgctaagggtgaaagaccaaggcaggcatccccgagtggtcagacacctctgaaacgtgggtgaataatcaggcaggcgtccccgcaatgattaatcaccaagggaaggctgtcttcccgagtccgtgaccagtgccagaattttgggtccacggataaaatgtgtctcctttgtctctaccagataatgaaaggaattgaacttaagagaagggagagattgaagggtggtgccaagattgaaaggagaaagaggttgagggatagtgagagaggttggagaagagagtaaaaatagaccgcttacccgatttaaaatcagtgagatgttcattgggctggttggtctgaggacctgatgtcataggtggatctcttcatggagtgagagtgaggtgaggacaggggactggtctcccgaaggagtcccacttacccgagtcttcggcaccaaatgtctcacgtgttcgtgtgaagagaccaccaaacaggctttgtgtgagcaacatggctgtttatttcacctgggtgcaggcgggctgagtccgaaaagagagtcagcaaagggtggtggattatcgttagttcttaaaggttttgggataggcagtggagttaggagcaatgttttgcgggcagtgggtggatctcacaaagtatattctcaagggtagggagaattacaaagaaccttcttaagggtgggggagattacaaagtacattgatcggttagggtggggcagaaacaaatcacaatggtggaatgtcatcagttaaggctattttcacttcttttgtggatcttcagttgcttcaggccatctggatgtaaaagtgcaggtcacagggaatatgatggcttagcttgggctcagaggcctgacactaaccaccacagcatttcatggagaaaagaaattctcttagctctcagatagttcctgtctaggtgacacctgtcttgggytagatgctccttttttttcctccacagttggaaggtttaaataaaatgtasccagtgtggagagtgagatgattgcaattatggaggcagaaggataagaagtttgaagtttaggcaaagcacatgtcccaccaccaagataaaacaaacagtgattcagtcaagaatctgagttttggcttaatttctcatgcatgtgcattgtaggtcatctttaaatttatttgacttgtgaaaacaattttaactacaaataaacacacaaagcagtataaatatggaaaccccacacaggcagggacctccctttggtgagaacgctataggcatagatgaatcatgctgagatagtttgcatctgtgaggttcatgtgaactttgaggccaccagacctcaaggcaaaaataaatacccttcaaagactttgtagcttccaagaattattcatgtggaaaccaaatgaagatgttgatttccaagaaagagatctcacaactacaatggatgactgagtgattccagccaaacacaagaaagtattaactttttaaatctattattgaaggaaagtaattgtaattatggtacattactttagggttctggggtagttttaagcacttagctttaagcactccagtttagccttttgaacagcaaattcatgtttcaaattacaatgactgtctctattactgcgctttctaattccttctaaacctcactcctaaattgcaccaggctggagccataaagggttgcatgtgggaagcctccatctgcttttcttctttgagaggtggttgtgaatgagaccagccaatgggaataagataataattgtgttctaagagcctcttgttctgtggagtgtgtgacttactgactgatgctaaacatttgaaattgtaaatttggataagtccatagaaattgggacacagaaacatgggtcttaaatgatagagctgcttccgagtgttttctggagtggtgttatggtaggaagtgcctttcaataattctaytgtaaagacaaccttacaacttgaaacttgccccaagaaagacacttgaaaatagtagatctatgatggtacatttctggtgaatttactagagtgtgttttcttctagtgaatttatctcttcattgattttattcattcctgtgatctaagggtgaactggtctattttcattttacagtttgagaaagaagttaaaccctaagcaactataatagtttctctagaacttaaaatattttttacacacctgaagattttttcagccttactaggccatggtataaatatttctcctatttcttgtgttgaaatgggaggtgtctcaggaagctgagtttccacttttggcataactaatcccagcaaaaacaggaaacagtttatctatcaaaaatcacactcctgattttatccatgatgttcttcctcctttcctgttccctactgtctacactcagataattcagattcataacccagccctacgagagcatgagggagtatggggataaaagccaacccactgaggcttctcacgaggaccaaacagtgcctctcagtgcctctttggccatgggtttctgtctgcagagtctcatcattgggggtgccattttctggtcatccaccctttccccaacctcattttccagctggaccagtcatagcattgagtgtcccttgtgaactctggaaggagagttttcccctttgagcccttggagatgctgtctttggctttggttaaatctttgctgacatcacaggtgcctctcaagtcagctttcctaggtccaactggttcctggttagatatcctgctttctctttccctctcatctctgcagcttactatagaggctgctcccacagttctttaggctttcacgtgccgtcatcttcggccgttcaattggctcctccgagattcagtgccctccttcttttcccctcccctactttttccttgtatttctcagtaagtactcttcaccttttcaggaccacattcccaaatgtcaccagctcacctgagtcttagtattccctggcctggaccacctctttgtagatgatgactctcctccctcaggaatttattttgtrtatttataaatatacaaaatacgttcatgtacatgtttccttcatgaaacatttgtttaaaaaaactgtgattacatatgcagtatatgttacttatgtacaatttttttttttttggctgagtgcaggggactttattaatggcacacgacaaggtggggctctctaggcccctcccttttcagggggtctacatggaaacttgagaaagggagattctcagtgttgtgggggactgagtatggcagggacttcccagcagtgagggcctctctcttcctctctcgctctcgctggggttggtagtccaggggtcttactccttggaagtcatgtgggccatgaggtccaccaccctgttgctgtagccaaattcattgtcataccaggaaatgagcttgacaaagtggtcgttgaggtcaatgccatccccagcatcaaaggttgaagagtggatgtcgctgttaaaatcagaggagacaacctggtgctcagtgtagcccaggatgcccttgagggggtctcggacgcctgcttcaccaccttcttgatgtcatcatatttggcagtttttccagacagcagttcaggcccacaactgacacattggcagtagggacacagaaggccatgccagtgaacttcccatttagctcagggatgaccttgcccacaaccttagcagcaccagtagaggcagggatgatgttctggagagcgccgtggctgtcacaccacagtttcccagaggggccatccacagtcttctgggtggcagtgatggcatggactgtggtcattcatgagtccttccacgataccggagttgtcatggataaccttggccagaggcactaagcagttggtgatacaggaggcatgctgatgatcttgaggctgttgtcattacttctcatgcttcatgcccatcacagacatgggggtgtcagcagaaggggcagagatgatgacccttttggctcccygctgcaagtgagtcccagccttctccatggtggtgaagacaccggtggattccatgatatactcagcaccagcattgccccatctgattttggagggatctcgctcctggaagatggtgataggattttcrttgatgacaagcttcccattctcagccttggcagtgccatggaatttgycacagacaaaatcatactggaacacacagaccatgtagttgaggtcaatgaaggggtcattgatggcaacaatatccactttaccagagttaaaaaccgccctggtgactaggcacccaatacaaccaaatccattgactttgatcttcaccttcaccgtagtgtctcagggatgcagctgtcaatgagagagaagaggcggctgtctgtcaaatgggaggagcagagagctacttatgtacaatttaaatatacaaataagattaagaaaagaaagacatgatattctyaccatccaaagacgatcactggcttgagcctctcatcatccaggtcgctccttggcctgttcttgtgtgatttccctgttcacatgtggcatctctcagaactgaattgacctgcgtggtagagagctgaaggccacccatcttgtaaagataacatccttaaaacctaccctcactctcccgacagccatgccacagagctgaatcacaacaagtgtctcatggatggaaacccttccattttgttacatttcgactgtttttaatttgtttatttttacttgtgctaacccttcctcttcactgtcaaccaaaagatcatgaaagactgttgatttctaaagtccaagtaaagactatggcttaacatttcttttagctggacaaggaaggggtttgggagagaagcattgggaatgaggtgacttactctcttaaggaacccaggtagaccaccagtgactgctgctttctttcactagccctcataargcttcctttcatgatctactctagtatctgtttttggacagtgtctgtctctcacctgggctagagtacagtggtggcttgatcttggctcactgcaacctctacctcctgggctcaaaccattctctcacctcagcctcctgagtaattgggactgcaggcatgtgtcaccaagcctggctaatattttgtgtttttgctagagacggggtctcatcatgttgtccaggttggtcatgaactcctgcactcaagtgatcctcccgtctcagcctcctaaagtgctgggattacactgtcctcagcctactctagaatcttatcaagactggataccaactctctccttctcacagtgcagaatccatagtcttctatgttaaaaaaaattatacctgatttgcctatctctaatctttggccacagccacatctcttcttcaatgcccttccttccagatccctaacagtactgtgacagcctcatttttgaggacttttggggccctaaaatataatccattgaagtcagaggatttgatcccttttattgcagcaagattctcttctgtaatatttttatctgttttggagacttagtttttcctgtggtttttctccaccttctcaatgtgagagggaaaataatacttctaatcctggtgatgagggaaggttattccagagaagcagcaaaaacaaaaatcaagtaagaatcagaacaagaaagcccaagctccaaggcagaactagtggaaatgaggttagtgggagcccgccctgatcccccttatctggaaaactatttaagrgaataaccagaatggagaaagccagagagagggggagagaacctggcattctcccaggcaagcccccaccagtctcagcctctttatctctgcctgtgcatctcaaaaaagaaaatggaagcagagagagatggtctgtcatggcctttttccaagagggaacagaacagttccgattttacatccaacaaggcttcaagagtagggggtgaggatgcaagagtgaagcccactgtatccctaagctatagctcagtcaaatgcttccgtccctgaatctgacccacacatggtagaaaggtggaaagatgttagatgttcatcccttagttagatttgggcattgttacaaaggaacctggttttggagaacaacaatccacgtgagtatattaaagattcagaaaagtcctgtgacaaagaagagtgtttcctgaactctttcgagcatgaggaatcttcatttggtcgtcccctgttttcattcagaagtgggttccataggaaatgttgtagaggccaacctaaattaactgatttattcagtgaagaggagtttgccaggcagctgaggttagaaggtagatgagagaacagacctatttttctgtgttttcacttaatatgttagttcagttctcggctttgtttttctcccctttttctgtatgcattccctagaacacttgtttcaattttataatttaactagcatatagacatgactattcacaaatcttttttagccctgacctcattcctgagcaccactcccacatttccaactgtgtcttcaccagcccctccacctgacatcacacatatgccccaaattcaaatgcccaaaatgcagtgtcttctccagaccaactcttctgctcgtctctcctgtgttaatagcatcatcgtccttcgttgtccaagctgggaacctcagcagatttgcaggcattttcttctcctttaattcccacataatttttttaaattatgtatgttatctctaagaattttctgtttccacagacatagttcagactcattttttacttggacagttgtaagagccttggataaattatgggttgagtagaatttttgcaggaaaaggggatttggcatgggactcctttatatgtatctctttgtcacaataaaattaaaaattatggatatgcttggaaaaatgttaaggagactctaatattaatgaacagagtgaggtttcaaagctattgagcaagagaagcaagaatgcccccaatccccctgtcaatcttccttcttttctgtggaatgttggggggatctgaacacatgaatggaaatgacaatgagaaatcttcaaaatgttaaatttttatttaatgataaaatgtgagataaccactttattcttaaagcctaagtgaggtcacaaaatttttttttctttcatacagttccttaagatcccatttgtagacatttatcattacacaaaaataacgaagttccaagtaaattactattctactgactcttatatgtgagtttaatttattcattcagcatcactaataatctataaagtcccttcatacatatactcatttagtctgaagaaagtggtatttatcaagtggggaaaattgattctcagagtggctaactcactttcccagtatacttaattcatagcttgaaattgactttggactgcaaactttgattacttttcatttcaccacagccagctcccaaacccaacttaatgggttatgttcaacgaatgagagatgggcttcccaggcctttgcttgtaaggaactgacaccgggtaactgttaccaggcagagccagagaggccttacaggtagggctggtgtgcagcatctagcccatataacctaaccatgaaccacagatgagcctccctgccctgccacatgaagtaatataacttattttgaacaggagcatgtagcaaagaagaggtcctgtttacttccacagtgcacactgcaagacattctcagtacattatacagtctagatctcattgtttatgggtctggttttgccctcatgtagcagacgtagttcctgatttatagcaccataaagaaattacagtgaaggacgcctcaagattcttggcaggcaaatatagacaaagctcctttacatctttttaaagaattccagggatggagatccatgagctttcgtcagatgtataatgtgaagatcaagaaattattttcccttttccaaccatagaattttactgatttgatgtgatttcctcctgtctgtttcactctgagcatgaagaactggtcacccactgttctctgaataaacccattttaaatgcgtgaargcgagtgtgatgagattgttcctcattctttccctcaggctaaaataccacttttcctttagcctcttcaaagcttctattttccaccccttgaattgtgtttactcctcttcttgggaccctgctcagttgttccgtcacattgctgttttttaagtaaagaggtccgaatcagacacaaatcaaacaagggtgtgaccaatgcagggtattagtgaagaaattgcttcctgggctctgcaagtcctacctgtcttggcacacaaatagtgagccattgtagtcaacagtcatctttaaaaagaagagaaaagttcgtcctactcataaatagacygcagtagagagaaaaataaatgcctttggtggcttcacccagtctggctacttgccatgaggaagaaaatgcttgatttggcacttaacaaatggttgtatacatttgtgctggggaaccgtacggtattgtgaattttagatattgaccctgcactagagagaagcagaatacatatcctctgatgcagatgaaaaataaagcattgtgtgatgtacacattgaaatctaaacatgcaggcaaaactttttcagcaaggtgcctttaaaagggtgctgaataagaaatcactgagattttcagatctgaatctagtttgaactctagagtcctttaagagaaagttctaaaacctaccaattgggaatataaaattgtacagtcactttggaaagctaactggtagttcttcagaaagttaaggttaccatatggctcaataatttcactcctgggtatatgcccaagagaactgaaaacatatatttacacaaaaacttgtacacaaatgttcatagcagcattattcactgtttcaaaaaaaatggaaacacaaatgtctgccaactaatgaatggataaacaaaatgtgttcatgtgatggaatattatttagccacaagaaggaatgaagtattgatgcatgctgtaacatggatgaaccttgaaaacatctgtttagcaaatgaaaccagtcataaagaccatgtattgtatgatgccattcatattaaatgtccagaatagattaatccatagagacaaagtagattagtatttgcaagggcttagaacgaaggagagatggggagtggctactaaaaagtacagggtatagggagtcctttttcagattttgaaaatgtcctggaattggataatggtgatggttgcacaaccctgagaatgtaccaaaaaacactgaattgtatcactttaagagggtatattttatggtatgcagactataattcaaaaacagaaaacaaacacatagacctctttttttttttttttgagaaatgatatgcaccttgaaaacctttcattaatgactgaggcatttagctgatctggaaaattttgcgctggcgcactgggtttcatgagtgttgctggtatagcaaaatggtagactaagatgtttctacagaaagtggctgaatatgacactgagaaattattctgggtggtatgagtacagactgggctggttgtgaagaaagcaaggaacatgggactcagctatggctctatgagtggtcacttatttttgctgctacttaaagatctgaaatatttttcccttgaccatcatttgtgaatatttttgcttaggagcttaattgcatagttggggtcttgttaaatgaatcatcgtatttgcagacttatttagtagtttccattctgaaaattgaatgacaagaaatacacccaaactgattccaggctgttaagcttacttttttcctttcagctattttttgataccattaattagcatctacagagtagccatcctctgacgatggtaaggtaaccctggcttgtccctcagctgccctgctttctttcccaacaatgcgtttctaatacttttgaaagagaagaacacttctgctgcatccaaacagaatccacaaagtctgatgcttttgaacaaaatggatgtttcctccctgtgccttgaaattgatatacactgtcaaaaagggttttccgaatggtttctctttgtcaccttgtaccagattttctcctccattctggaaatgtgcagtttaatgttgcgtttcgaatcactttcagctgaaagagtgtgtaatggaatcagggcatcccatgaatactcttaacagtgtcagagatgcctttttgtttgtagctctgcgttccaaggggactgatgacaacagtgaaattacattgggggccttgctcaatagtaggttccttgtctgtgatgttttaagagaagtagtaagggtggcttctcccatcctggtgcttctgtgtttggtttatattacttaraatctaaattgtagtggttattacctcctgagaagaaaagtagtaactggagtccttgtcagtattttcctaccccagtgtgtatcagactgttttcagaagcatttcactctaaccttgaaagttgcctgtaaaatcacctgattctgaccctttttgttatcagcaaggatgccagggcccagagttaaagacaattaacagcccactgtggagttggcacctataatcacagrttcccaggctggtgctggtgctgtttctgccacaacacacaggctcctaccaccaattactcacatatatgtgaatttcctccaaagccatgaaccttctgagctggaggagggcttgacaattagtctttgccccacagtctttatcatttcatgctttggctgtcacagtatagcctttcaggttaactgtcagaacctaacaacccagaaagggtagatgatggcaggcccttcctcacacgtgtgtgtgtgtgtgtgtgtgtgtgtgtgtgtgtgtgttctacactgaaacacatttaactacatgagtgggtggattccatgctacagggctggctgattgcttaggaattaaagatgggaatgaatttctgcactcccaggacttttttaaactagagcctcaaagcactttgctttgccattcagcaagttcccttgctgcggagagaagaaaccaaggtataacaaagtgaagtgacttggtttggaattggacttcagatgtgagcttgatcgctgccctttgtcttacttggaggactttttttttcttttttttttttgagacggagtctcgctctgtcgcccaggctggagtacagtggcgcaatctcggctccctgcaagctccgcctcccgggttcacgccattctcctgcctcgacttcccaaagtgctgggattacaggcgtgagctactgcgcccggccacttggaggacttttaataccttttactccatagaaattggactcctggacaccattacctgcttctcaagtccagcagctaggggattttggatttcttttccatttctactctacagagagatgctacctttattttttagcttggctatatatttgtgtgtgtgtgcatgtataatttttttctctttctctttcccacctcatgttataggtcattgttgtgtatctagagcagasggagwacttggtgggttctgccacatgggcaaagctttctactgaggctgaaaagctctatgcctattgtctccatgccatgtttacatagcacctgtttattacttgactgtgaattttgggattttgtctggttttaagacaaaaggtttttaccttgagagggcagaagggctgaagtgtgctctggaatgtaccctggcagaacatgggcttttaggctttctgagggttacatgaagaaggtgctaacagagtgttcctacatttgccctacttgattctccaaactttgtcttccccttaaaacttaatttacactgggcatggtgattcatgcctgccatcccaacactttcggaggcttaggtgtgaggatcacttaaacccggtacccatctctaaaaaatttttaaaaattgccaggcacagtggctcacgcctataatcccagcactttgggaggccgaggcgggtggatcacctgaggtcaggagtttgagatcagcctgaccaacatggagaaatcccatctctactaaaaatacaaaattagccaggcctggtgacacatgcctgtaatcccagctacttgggaggctgaggcaggagaatcacttgaacctgggaggcggaggttgcagtgagccgagatcgcgccattgcactcgagcctgggagacaagagcaaaactccgtctcaaaaaaaaaaaagaaaaaaaaccttttttaaaaaattaaccaggcatggtggcacatgcctgtggtcccatctactcaggaggctgaggtgggaggatcacctgagcccaggaggccagagctgcagtgagccacgatcgtgccactgcactccagcctgggcaacagaacgagatcctgtctcaaaaaaagaaaaaaggaaagaaagaatttgttactcgtttgcatgaatctgaagatttctctatagctgtagccagtgacacagtagctctgcagtgtactgaggcaatgtgatttcatattaggaaatttagaagtgggggggtgtgaatgagcttctactgttcaaacccagtagcaccctgtgtgttggggctccgtgaagggagaacatttctgagaccatctagaaggaaagttccttattctgcagggtgaaaccacaccacacaacagtgtaagttgagttttgcttgccccggaacaagggagatatctcccaggcaatagaaagcgtaattggctgttggctgcctcgcaacaaggacatcccctagtccatttactcctagtagtgatgtatgaaggggaggtggctttcccatcctgctgctacctccatactcctgggtggctgtctgggcctggaactctggcagtccgtggtggtaggtagcccataggcaatgcatatggtaattgagttgtcagtggtggtttggtttggtttggtttggttttgctttatcagtgttactgatggaacacattgaaaatttccctatggccactgaataaatcacacctggatatatactgtcagagcctgtgggcatagtttcaagtcagttcttgggtgcctagtgaaatatatgtatcagactgttacagaatgctcaggctgcaggggaagatcacacctgttcacactttgtttttgtttttgtttttkttttgagacaggatcttgctctgttgcccaggctggagtgcagtggcatgatcatagctcatcatagccttgactttctgggctcaagtgatcctcccatctaagctttctgagtagctgggactatgggcatgtaccacaacgcctggctaattttttctattwttttgtagagacgagggtctcagtatgttgcctaggctggtcccaactcctgggttcaagtgatcttcctgccttgacttccccaagtgctgggattataggtgtgagccgtcatgcctggtctagacttctttatatggctaagattaacaagatctaaccttcaatcaaagagctgatgaattctttagtcatgcatgcatttaatccctcacttggaacctcttcttatacttttattttgaatgtgattggcagttctaaacctatttttctgggtcctttccataaagcacaagtgatgtagaaaagtacagacagttttaggcttaaccagttcttatttttctaagaagattcagtcactggcttcttagttagtggctcctgaaacagatgcaggatagttgtgctgctgtgmctgagctccaaataatggcctctgagatgtggttgggccacctagtagaagaacttcatggagaggtgcttgaggcacatggggtcatgaagggtggtaacattacaaagatgaatcagcattcaggaagactctaggtcttctgtgactgcatagccaaatctggacaaatcagttcctcttcaaacttacaaaaggagcatacgtttcctgtaacagtcaaataatacaaaaatatataaagaaaagttaaccaggtgcggtggctcatgcctgtaatcccagcactttgggagactgaggtgggaggattgcttgagcccaggcattcgcgacgagcctaggcaacatagtgaggcctcgtctctataaagaaaataataataatttaaaaaattaaaaataataaaattttttaaaaagwaaaattaactttctctcccacttccataacttccttgccactcattgaaacataattatatgttatcaagctgctaggtgtcgaggtggtcagttaggwcaatgaaccaaacagaaagtaacaaccaaacctttcttctcttactgcagtagtcctggcaagaggcaaagaggaaagtgctcttccatttttccccataggacggcaccaggtgaaggtctggcagatgacatgcagcgctggcaggagggagtctcactgcccagagctctgaactaaaggctttgccattttgtggaccgagggttgtagggccagggagagaaggggaaggactataagaagactgagtcagagcagagaagtgtctcagtggagwctcctaggctagtggggtatgagtcctgggctgcagctgtcctggcggctgcagtgcagggactgtgcaccacatccggtgtggagagggcagcttcccccgtgaggcctgctgggcagagcctttgtaatggcctgtggtcaggcctgaaacattgcacacaggattcgggcatggaatcagactcctcacatagatggaatatctatatatagtttttgtttttacaaaaatgggattgtaccacccattactctgcagtttacttttctcacttactatatcatggataactccaggtcacaaaatagaatttcactcctttttttttttttttttgagacagagtctcactctgttgcccaggctggagtgcagtggtgcaacctcggctcactgcaacctgtgcctcctgggttcaagcaattctcctgcctcatcctcccaagtagctgggattataggcacccaccaccacgcccagctaatttttatactttgaatagagacaggttttcaccatgttggccaggctggtcttgaactcctgacctcaagtgatccactcacctcggcctcccaaagtgctgggattacaggtgtgagccacagcgcctggcctcttttttttttttttttttttatgactgtataatggcttatagaatacaaaccaatccattcaacagttccccttttgacagacattcaggctgtttccagtctttgccccaatgaataacgtcaaaagtctgaattgtatgtatatcctatgtactgagtcttttatttctttagcatgtattcccaaaagtggaatgactgaaccattggatatgtaattataattgtaatcaatgtaaaaggtgtaacaatttccattcccattatgaaagtgacttttactctatgaaaactatatattgttgtttttttaatgtttcccaacctaatgagcagaattatatattgcttttactttagtgtgcattttcatggactagtgagattgagcatcttttcatatctttattaatcgttgcatttttccttctgtcagttgcctaatcatattttttatcagctttttttcttctgcttgtttgttaaatacctgttggcacatgtcagtcctgctctgagaacatcacactgagttgagatttaacaagagttaatatgatccctttaagaaaaattgtaaaatcaagttaatattcgaagtgaccatcctgttttaccctccctgtttctcttaaccacttaatatttagactaggggaataaagatatgtgtttttaactccaaaatataacattagaggagagaagtagcgggattttctaggaattagtctgtaactcaaaattctcattggttaggaataaattacctttatcctctcatgtagctaatatttggggcagggaccagggggagttttgtttttgtttttgagacagggtctcaatctgttgcctaggctggmgtgcagtggtgcagtttcggctcactgcaacctccccttcccaggttcaagcaattcycctgcctcagcctcccaagtagctgtgactacaggcgccygccaccacacccagctaatttttgtatttttttrgtagagatggggtttcaccatgttggccaggcttgtctcaaactcctgatctcaagtgatccatcccccttggcctcccaaagtgctggaattacagacatgagccactgcrcccggcctgagttttttaaactattaatgtccttgctttacctccttttctcccattcttgcggttgactcataagaacaccctaaaccttactgttcattgtatcgcaaataacgccccatcgattttactggaattaatgtcatataaatttcagctgtagtctttaaaggaaaggctaaccttaatattggataatatgctgaaaacccatcccctctgtatgggaatggttattgggtgggaggtgattgccaatggattaaatcacctcaaccccggcaactttctcgtttaacctctggaatgttactcagattctggtcatggtggtatccacaagtccaggcctgaggccccagaaggaaggtcagagtgtatacgtagctctcctgcaccctcgcagccacggcatttggtttttgtttttttcttaattttccttaggaaaagcatctcataaaataatgaaatagaagctaggaagtacaggggtcctgtgatgacagactgtagctttaaaggcatttctctactttattgattgtttagtatgaggtttgtcagctttcacatgcatttcgttccgtttgaaacccctttcgtctcattgccctactccagattggagaccagcactctgacaaattgatcccaagatcagagtgatgaaagagagaaagatcaaaaggaagccaaggatcacataggaagaggcatcgtgatgtaggcactgggaaggttggcagtcgaacatgctgtcatctttaatccatggatgcctcttaaaggaagagcttggtagttcaaacggaagtgaaaaaatgttctgtacatagatggatttggatataattatctatttaagaaagtaataaactaggcttgccctggcagtcatattgtaatggaacgcagatacctcattgtgtgtgaatttgaaattaaaaaacaaagtaaacatggtgagctgctaccattgctgccccctccctgccttgcccactaaggagagaggcactgccttgtttccctttgtatttcaaggagcttctcggtggcaactcagccagaacactgtcctcttaggcctgccgtctttttgcaaaaccaacaaaaaggcgtatggatttttaagggctcagactataagttatataatattgctactaagaaaagtcttatgtagggccctcatttctggattcttctgttcctccactcaagtccagctcccccttcatctatttagccacttatccatcagcaagcaattgttgcacgtctggcacgtgccaggcactgagcactggagattcagagacaacaacatagactctgcctggaaaatatccgcggggtagttcaagacagccatggaagccagcagtcatagcaaggactggtaagggtacagctaggcatagacaccacggggtcacagagaaggggcatggagggtaggccaggaggacaacagaaggcgttctgagctgactcagagaaatgggctaaccatgagaaggaagaagccatgtgaagggagtagcaagagtgaggctaaagcaagaaatacaggcaagaaccagataataaaggaaactggaaaagctgggaagccatcacagggctttcggtaagacatgtggcatgatgagagcggtgctttaacatcacctttgtgaccctatgaagcacggggcagaggagggcagaacaggggctgaggaagcagtggagagctcytgagtcatgcaggtaagctctgatggaaaccagaaccaaggcactagcaggaatcaaggaaagagagggattcctgtgctgctgaggaggtgaaatctacacgcctgggtgcctatttggacatatggggtgagaaaagggaggagtctagaatggctgcctgtcttctgggacgagcaactaggtggaaaattgtttggttcccggagatagagaatgctagaagacagatttgggagggggctggggacaggatcattaattttgaaccttattaagtatgaaatgccagtgaatatatcgaagtggatatatccgttggcagttggctgttccaggccgagcacaacagagatatgtgggctagaaaggttgtctggactcaccagcatatgtcgttgttggagctatttatccatgcagcagatattaagagtatacactcagggctatctttgtgagcatgcaacctgtgcaccacacagggccctgctctccgaaggacttcacatttggtgtaatgctctgctgtggctgtcttgaaattctgcattttttaatcaggggcctgtgttttcattttgcgctggaccctgaagttacatagccctgcctacaatggcctggcaccgtgtgcagtagtagggctgcagtgtcgatcaagacaggcatggttcttgtccagcttacaggctagcgtggaaagcagacagttaagtaatcaattataaaatgtgatgagttctgtattaagagagggaccaggctaagggaacacgtatggagggataggggtctaacctaacctaaccttggtggctgagaatttagggaatgagagcacccagggagaatactgagacagaatcctagtccacaacagcaaagaagggacggagaagttggagagagaatgtcccggaagttaggagggaaaccaggagaagaagttgtatccctggtgccagggttaggagacagtcagatgctgcctgggagatcagaatgatggcatgcccaagggatgtagcaacaaaagggccatttgttgactcaggtgacagtagctgggtgtagagggaggcaagaagttaatttacctctgtttgagggatccatgggaggcgagggagtagatagacsctgaatgtagattattatcaatttctgaggcttaggttcttaggaaagaaaaaaggacatttcaaaggtggagttcggattaggagagtatcatctgtttggttttggttttactttgattttaaacagaatgctttagcatggttttgttctatgggcagagatccagtggaaagagaggtcagaaatacaggagtgggagtaactgacattgggagaaccccgaggtgtgggaagtgacagagaggagctccggtcaggaagagaagaggaaaagatagctgaggagcagtgagtgtctagctgaaggcccctctttcctctgtaaaatctaccccgtgtgacttggttaagtgaayatctgctgccttttagttcttttctcttcgggcctcaaattcaaggaacagtttcttctaagttctttcatctgctcctttaatcagcaaacattcactgggcccctgctttgtgacaggcatgacctaagcctttggcgttaccaggcccctgagctcctggcactcaggtcctagaggagatgcttccatggcctgattgggcatcgctggctcttcctagtccatgcctgggaattcaactgcaattcaggggccgtgcagaaaaagaggaaaaagttaagagtagctttaggcaaaatcttgaaagaggagattatctttggaatttatcacataataactttcactccagctccccgaattctcaggggccctctagatcctgtaagattaggcccaaacctagaatttcctgaccccgccccctttcaaattctcctgtgtttctccatcctgtcaaaactcctactcccttgttatagtcatactcacctggtaattagaacaaagaccattggaattaattcacactgatttgtgaatggtggataacaccttagtgggggtggggtaatagtgattgcatttgacaagtggctcctgtttataagaaggaatctttaacttgtcatatttcagacagcataataaaagtgataaggagtattataagaggcctcatcttctcacagtcagttcccctaaacttttccattttctcacagcttccactgtttttttttttcctagagtcataagttctctaaaacccctaagatttttgtcatcactccttcccttcctggatgcgctgcccgcccctccgccgcccccgccccgaccccccactttcccgtttctatgacagcagcaactagggcacaggtggtgaggggttgggggtggggtcatgacagctgcagccatttatagggattgtttccaagtcaggaactgcctctgcactgggagagagggatgcccagaggcttcttggcacaaagaatgcagcctccctagaatgaaggaggcatccactcagatctgagctgatcgaaggcatttcccatgttggtggctcctcactgagaagcatgtcaggtctcaggtctctagctccctgatgcctgggagctgttgggttcatatagaatgcaattccccaagccacttccatttgttgtagaaatggcaacattctgccacaaccgatcgatagctgaaaagtggctgtcaggaaccactttggaatcagaaggtctgggaacaggaggcaccgctgggaatagacccaggaaaggttgctcatggttatcgatcctgcagcctctcctatagacatctgctttggggaacgccgytccctcaaaagtccttgactgggcaatagctcttagatacactttttggagtgtrtgagtttcctgagccttgagatgagtggttttggttttttttttccccctggacccaggatatcaccctagaaattcaacagtgtaggccacacattctcagacatccctgtgcttatgaatcaccaggggatcttattacaatgcagattttgatgcagtaatctcagggtggaacctgagattctgcatttctaacaagctcccaggtgaagccaatgctgctggcccacagcatcattggagtaacagggatctagagctgcactgtcaaatacattcaacactagccatatgtgaccgcttaaatttaaagctaagttcattaaacttcaataaaacgaaaaattcagttccttgcctgcactaaccacaatttaagtgcctagtacccgcatgtggttagtgcctgccatattggactgcacaaacaaaaacattaccatgatcacaaaaggtgctattcgataaccctgggctagagcaagactctgttgcatcactcattcattcatccatccgtccatttattcacygagcatttgttatgtgccaagaagtatggttggggctggagcattaaggcacacttccagctagcagaaaacataaacataagctaactagaatgcaatgcacttaaaagagagatgcctctcatgtggtgagggattcagagctgggaacagtgaactctgccatgcaagtgggaaaacaaaaacatctcttggcatttcatgtgtgacctgaaccaagcaatggttgtaacagaatcagagcatttatgagattggctactgacaatgcattttcaccatttcagggccataatcatcagaaatggagaaattatccccatgtcttcagaatttacccccgagacggagcgccagcgacttcagtacctggtaagagtcatctaggcttggcagagggcagtggcatcagggatggcatcggagctgttctggaggaacacgttgctactgacatgggagcaggctcaccgcattcaaatgacatatggtattaactcccccacacacaccttytggatcacacatcctggctccgtgtgtgacgacacactccacctccgtgaatttattattgcggctgattttctcccatctgtgaccaattgaagacatggtgtgctctggttttgttttttttgtttttttttttttttaatggcttcttatgtacaatgtgaaatgcagttttgaaaaacacagataccttcttccatggcccgctactcactttaactcaaacagggaacttggtctgattcccgttgtgaggaagaatctgcccacgtggcagctctgaggtctctgctgacatgccactacttcatgctcagatatgaagtcttacaggccctttggaaaaggtgcaggtgtcagaaaatctgtttctatcctgaaaataagttctctatgtagattattctctttggaatgaaattatgagcgggctcagttttctgggaaacagaatagactcacttccttgtcttcaaattccaggggcaagggtattaggcttagaatcttggtttaaagtgactctggtaatcatcccaggtggccttggggcagatacctctaggaactaaccctgtgaatcatagttctgtggatgaaatattttctcgccaactggatttctttgtagacaacacagctaaagtagtgcccatctgctcttaggaaacaattgatccaggctactcaaaaaggactttgcatctctgcatttcagtatttgtggtcaggatttaattaatttggttgatttagaaagcagctctgcactttccttccatttccatgtctgtgttttcattcattttattctatgaactgtgtcactttaactacttatttggtgtataagacagcaggaatccaaaatgactgtaaaaacagtacttcaatctttcacctactgttgctttctaacctttgtggtggtgtcttaagctgataaacttgaaaccactactagggaatccaggcttcagacctcgtcattttctttggtagtctaggccggtggaaaggaccccactgcagccttcagatcttcattctggccccagctgtgttaccagctggacagttttgtgcaagtttcttaacctttcctgacctcggtttatcacttgtgaaatggagagctggacgatagggccaccaagggcctctgagctgcaaggatccctccaagtagaattcgttatagctagcctctctgccacctgtctggctttctccactctattccacaaggctatccaagtgacctcattacccaccttgtcactcccctatctaaaagcctttggctccctgcaatttacagaatgcagaccgcccttcttggccttgctggaatcctggcccctgcccacatctccagtcctatctcaatgttgccaccaccaccactgccaccaggcatcccatgctccagccacagagaactaccttccatttccaggacatatcatgatttctctgatctctgacccccatgcctttggaagtatggtctgcctggatggccttttctttcttttctgttaggagaactcctcttcattctttaagactccagcacaaatatcacttcttctgcaaagtgtcccctaatcctcctagggagtcagtccccagtgcttgtaccacagcttccagatccctgcagtgtggctctcagcatatggtgttgcttgttctggtctctccccctcttcagactgtgttctggagggcaggccacttaccttagtcacctcatattgccagtattcaacacagcacctggcacaagggagatatagaaccagtatctgtttactgaacgaaagatttaaaaacaggctgggcacggtggctcatgcctgtaatcccagcactttgraaggctgaggtgggaggatcgcttgagcccaggagttcaagaccagtctgggcaacatggcaaaatgctgtctctacaaaacaaatccaaaaaaaaattagccaggcatggtgatgtgtgcctgtagtcccagctactcaggaggccgaagtgggaggatcacttgagcccagaaggcagaggttgcagtgaaccgagactgcaccactgcactcttggggcagcctaggtaaagagtgagaccttgtctctttaaaaaaaagaaaaaaaaaattaaaaacaatattcatattgacttctagatcattaccaaacagtcctttctcttctgccctccgcccwwacatttcacagcagggtatgaagcctttgcctyccttgcctctattatatcctatcctcaccttccgttgtttttttgttttttgttttgagacagggtttcactctgtcgtccagtctaaactgtagtagcacaaccatggctcactgtggcctcaacctcctaggcccaacaaatcctcctacctcagcctctgtttasctaggactacaggtgcaccaccgkgcctggctaattatttttttcttttgtagagatggkggggtctcmctgtcttgccagggctggtcttaaactcctgggytcaagcaatcctctcacctcagcctcccaaattgctgggggttacaagcgtgagccactatgcacagcccacctcctgctctttattgaaacccatttcctattcaggtttctgttttcctacaagaggcaatgaataataagttaactttttgcactttctgttttaaaatgatttcatcttttcatgttacaagaatggacctgggaggttaacttggttgggggaagtataggaatgctgacattttcagattcccaaatgtcagcggtatattttgggatggttgaaataagatgcatgtggcttcagatctcacgtaagtgtatgtaatttccacaaggaacttcagtgactcccaatttcttcaacagtaatgggatagaaaacttcagaagtctgtgtaaggactaatacatgccgtactgttttgtgacagaaagtactactcatttagctattgtatgaggaattaaagtcttaccactacaaatctgtcttcatctgtttgggctgctgtagcaaaaaaccataaactgggtagttaataaacaacagaattaatttctcacagatgtagaggctgggaagtccaacatcaaggtgctggtagagtcaaggtctggtgagggctctacttcctgatttgtaggcagccgtcttttttttttattttctttaaaaaaaaaaaaaaaattcatgtggcagaaggcacaaggatgctccctggagcctcttttataagggctctaatcccatttatgagggctctaccctcatgacctaatcacttcccaaaggccccacatctaaatgccatcacactggggatttggcttcaacatgtgagttttggggagatacattcagtcggtagcaaagatcccactggcctgcaaaccagggtaatttttttcctcgtttttatttaagaaccatttctaacgttgctaagattaatgcataatttggtgtcgcccttaaacaatcagtgtggacactattagtccacagaaccgaacctaatgtctgaatttttaaaaggtgaaaatgctgcccatatcctttttaatccttactcctaaatcaaatgggttactctagtttataactaaaaacatttctcctcagacatcaggagtttaaatactcagaacataaaataccctgagttagaatattcatagcataaaataatcttatggtgaaatctttatggtaaatacttgagggaattagagattaatagtgtaaaatcttgaaaatagtatcggccaggcatggtggctcacacctgtaatcctagcactttgagaggccaaggtgggcagatcacaaggtcaggagttcgagaccagcctggccaacatggtgaaaccccatctctactaaaaataccaaaaaaaatcagctgggtatggtggcacgcgcctctaatccctgctactcaagaggctgaggcaggagaattgcttgaacctgggaggcggaggttgcagtaagccgagattgtgccactgcaactccagcctgggcaacagagcaagactccatcttggcagggaggggggtggagaaaatagtatcaactatgagaggaaaataggagtgtgatgtggatttctcccagcccagcccagtcatgagtcatttgacctctagtttcccctcacactctgtctctgaatctcctttcttcctgaatgaaacgggtagcaatacttccttttaggtactcataacatgctcagaaattaaaacgaaaagtaactgcatggtaatataaaatacagtatactgtgttataattttaagtgcgtgtaatcctactgattcattattttaagcattcattcccttgaatgattacaaaatagtttagtacaatgatagttgtatcatcttccttaacgtggcctcatcagttattagtcactgaaaaattaacagtgtattccttgttcttagggtaaatcaaattttatatttagggtatatgaagaaacatctatgatagagtcattaaaacttctgggtccccatcctggctaacacggtgaaaccccgtccctactaaaaatacaaaaaaattagccgggcgtagtggcgggcgcctgtagtcccagctactcgggaggctgaggcaggagaatggcgtgaacccgggaggcagaacttgcagtgagctgagatcgcaccactgcactccagcctgggtgacagagagagactctgtctcaaaaaaaaaaaaaaccgaaaacaaaaaaaaacttctgggtccctagccacttgcattgagcagatgtctgcagtcccaggtctgtttgacttgtagaaatggtaaatgcttttcttgctagtgaagaaggtggtcagagtcctttctacatgaaccattttgatccacatcaaagaggaatgttcagtgttcttggtatgcacagtctggacattcggggattatggaactggaagcagattacaagatgatggatgtggcaggcacattaattttgtttggtcttgcattctgacctcagagggcccttcatgtggctctctgggtaatgtgaactttgtttcatagattctcaggcagggtgattaattgagcaggcttgagggtttgacatgttcacacggaatgtggcaggtgtgtgatgaggagttcaagggacgggcactcctgcctcagcaccagggagagctgatgatctgcagtcgtgactaacccttgctcttctgttgctgggttttgtttctaaggtctccatggtgattgaaataaaatatttaaggggcttcaccaagctggacagaatgttttggtggagtcaaggctcagataggagggaagggtgtctggttgatggacatttcacaacagattttactgttctgatactgtggcctcaaggaaatcacccctacctttgcttcaggtcacagccagaaatggatctccctcaggagacatccatagccctgaggtatgagagtgatggttttccctccattctgccggtacatatttataaactctgacttgattacattaagtcgtgccggtgtcatcatatcttcaaataacatacttctgtccttgcagaataatccaagtttgcagctgtttttcatcmagggcaatgtatagaagagatgaacgtgggtttcaagtacatatttgatgaacacaagtgcaacattatctgaggtgatttcttgcaatgtccttggaactacccccagctctcaacgccgagccgggttctgtttgtctgctgtttccctggtgctgcttggctctctgggatttttcctgctcaagagttgtctgcagaaaagtattccttaagcctgaacctgctttgaaracaggaggctataagtggggaggttcaagcgtgctggtgggtcaaaatgacaggtgcaccaccttggcatcccacctaaccttgagagcaggtggctaaagccagcaagcctggctttattcagaaagagacagtttcaatatctccgtgttttgctccctgggagaatgtctgagtcataaaaaaatccactccagtcccacctacttcctcatttaacctcctttcataaaatggcatatgaggttcaaattttctaattataaaatggcagactagaagctattgtggcatttttttctgtttacaataggtcccctggatcacgtagaaatttaaatgtgaacttctcttaaaatcttcataaaccaggcagaattttattcgtattcagttctgtaatagcttatatatacaagctcggttcttgttactttgagatttttgacaacaaattaagaacagagttctttatgaaagaatccaacctatacatatttgggtctcagccatttcacattttttctaacccaaaccaaaatattctattcctgcactgtaaatcaggcagccagccttggctctggaaaagctgtctcatttgactgttagcgtgactgttagtgatcaccagtggtttggctgacattattaatttcatttcattcttgaccttagactttctatcttgataaatcatcttgaattgcaaggcttccaatcctcttctcatataatctgaggagattttccccttctaagggcaagaaaaaggagagattactcaattaaaaaaaaaaagttttgtattgtacacggaaaattcgtattttgattactttctctcaaatgctgtgaggtctgaacatttaaaaaattaattaatgtataagttttaggtagaggattctagttttagtcagagaactttacaaaagattttctgtcgtggaatctgccatctcatttatcttatttaacacatgagtattcttattttccacattctgctgatgagggtggaaattggaacaactcctttgaaaaagagtttggcagtctccctgaagttgaaagtgctgtggtccagcagtgttactcctaagtgtgtacctaacagaaatgcgtatgaatgtttacccaaagaccagagcgtgcatagcagcactgtttgtaacagcttaaacgggaaacttccatgtgcctccatgtgaagagaccaccaaacaggctttgtgtgagcaataaagctgtttatttcacctggatgcaggtgggctgagtccgaaaagagagtcagcaaagggagataggggtggggccgttttataggattcgggtaggtaaaggaaaattacagtcaaaggggggttgttctctggcgggcagagtgggggtcacagggtgctcagtaggggagcttttgagccaggatgagccaggagaaggaatttcacaagaccatgtcatcagttaaggcaggaacaggccattttcacttcttttgtggtgaaatgtcatcagttaaggcaggaaccggccatctggatgtgtacgtgcaggtcacaggggatatgatggcttatctgaatgcccctggaaagtagaatgggtaaataaataatgaaataatcacaggatggaattaacatacagcacggagaatgagcaagtcgcagttacacacaacatggatgaatttcgcagacttaatacccagcaaagagggcawcmtgtaggatttcagatgaagcacagaaacaggcaaggccagtcttgaagttggaatagtgcccctttggggcagtgacagtgattggatggggtgctgatgatggggtgctggtcccaggatgctggtaatgttctttcttgatcgggaggccagctacacaggtgtgttcaatttgtgaaacttcatcagcttgtatgcgtatgagaagagcactttaccacatataattcactgaaaagtttaagtagtttcactttatttaactccatgtatcctttctttaactgcacattaccctttgcaggaggggccatctttggtgccaatgtctgcactcctgcctcctctctgccccactctcttctctcctaggattacctccaaatgccatgctctctcccacttccctgcctttgctgtggccacacttgccctagagctcttgcctgaccaactcttaagctcctttgcagattctctctgatcctcttcagtgtgtgacccactctgttccttggtccctgtgaatggctccatttctgcccgtaagccgccctcagcctccttcacttgtgtgggtcagctctgagcagagggtcctctttttgtgttctttgagccccaaacccctagtccctggtacttagcatatgtaagggctcaaatgttagttgcatgaattcctttgtctggataccccaagccctgggacagtctccttcttggctgacactactcactggccagctgaccacaaagcaacaggaaaaaaaaattatcaaaaggaggaagaaaatgaggaagcattttgtattccctagcaagcaattttgagtaacctcaaagccccatctttgtgtccactggcaggctggtgctcagccctccgctggagccctggtcaccttagacttctcccataaccagggctagcttccctccctggggtctgagttccctgcttccggctacccttttttccttgccctgctgaggtgctcgaaactctccctgagcccaggaaggtggagctcagggccatgtgatctagagtgagacagccttgggtgcaggttgctcacctactctagacttctggcctccctcttgcctagtgagaggcttactggaaggttctggaaggtgcctcttcttcaggcttgttccctcctgttatgtctccattcttcagggtactcagagactttctttgggatggagttgttgtatttttccacagtgcaatgctcatctcccttctcttcctttgaaaccagtttctgctcaggactagagaggagagtggccatagaaagacatccaattcccctactcaaactctggtgtcctgccctgacacagtcagttgttccagcatcctttcctgagaggtgtccttgttcctggccagatataaccatgtttgtaagtttcctttttttagctgctcagatcactaagtgatgaggatatgtcgtattctctttaacaaatctgtgctctttagagtccctaagagtcttggttacttgcatttggtcttgctagggcagaggttatcaagctttttcccccaggtgatatttgtggcacacacatgaacttggggtatacctccgccctctcccctcatttagtagcattctgttatgtttccttgaaggaaaacctcaaaatttaggattaaaatggaggtacaagaagagatcctttttttttaatcggagggtgggctggtacactttaaattgcattttaaggctgggcgtggtggctcatgcctgtaatcccagcactttgggaggcygaggggaatggatcacctgaggtctggaggtcaagaccagcctggccaacatggtgaaaccccgtctctactaaaaataccaaaattagccgggcatggtggcgcacgcatgtagtcccagctactcaggaggctgaggtgggagaatcacttgaacctgggaggcagacattgcagtgagccaagattgcatcactgcattccggcctgggcaacagagtgagaatccacctcaaataataataataataataataataataataataataataataataatatttgcattttaatatcaactgctaatttataggtttctcatctgcaggcttattaagtgaagagacaaagcattattatttaggtattcttaggattgtaaaataacatcatggggttttaaaaaccacatgcagccatgcacatgtgtttttatgggaagacatctatcaatttataagaagttaactaaatccaaactacgtgggtccaagatggtttttatacaatatgggccttacttttaactttttcaaaagattgaaggctgtgttatcttatagtttaaataatcactatgttgtgattgtgtagagcaggtcagaatgtcctgtattcattcttttagcaaatacttaytcagcacctttactatgttgggtgctatgctgggcactggagtggagttaaggttttaaaaatgatggacacatggccgggcatggtggctcatggctgtaatcccagcactttgggaggctgaggcaggtgaatcacctgagattaggagttctagaccagcctggtgaaaccctgtctctactaaaaatacaaaaatttgctgggcatggtagcgggcgcctgtaatcctagctactcaggaggctgaggcaggagaattgcttgaacccaggaggcggaggttgcagtgagccaagatcaagccattgcattacagcctgggtgacaagagtgaaactctgtctcaaaaaaaaaaagtcagtaaattattagcaaactagcaaattcctgccccaacactttacagactttgggcttattgcttatggtaaatccaaagtaaaatcattttgaagactcaggactccagaatgctgacttgagcaatgcttccagaggcacagaccagtacaaatgaagtaattctagccagtcatggtcacctgaattctgggcaggccctaagaagtttccaaatcaccaagttgtttggccactctgcgtttgcggacaaaacatctctgcgctggcctgatgggaatctgcggcttccacatccccgcattggagccaggcccctgctctgcttgcctcttctccaggattttggctttccctaaaattattagaacaagaagcagtaacgctcttctcagcagtcttttaaaacttgctttaaacactgggttctcaaaaaactaatttttagagggttttttttttcaaatgaaagtaatctgtgtccaatggtcaaaatatccacaattatggatacattaaaaagaaaaccctcagataacttttttaaatattttkwtgactgkacatgtgtaaacatgtgtgcatataagactatataaacttttatgattgcacaaaaagatagactaataaccgtaagtgttttcctctgaaaaccaacaggtttttacaaattgtgtgcagccatgtattttakcatctcatttttcattaagcaaccatatgtttgctctgtttgtaccaagttcttgagaaragttcctttaatgccattaactccatagggtttgacatatgcaacagcagtaagtattgaatgtggtggcaaggaggtgggtggtgattttttaaaaaagagagagtggtaaaaatatatcacaggtacacaaggagtacttataatttctatggtaagcatgattatgacagaaaatgaatcatgccacctgtgctgtgtcagttagcaacagaggaakaaaaatcagaaggatggagaaatctaagagtgtggcatcagtatcagtgggggggtgactatgacagtatttcctcagaactaaracacgtctttgtttttttttaacatatctgaattttatatttgatttttgctgccagccargggacaggcatgacatgtcatctcctggacatatgtgaacatcaaaagggcagacacctgcaggggcggaaaagatttcctcacccatcacaaggtcccccataagaaaagacaagataaacaagagaaaagcatacaaatctatttaatataagttttacatgacacaggagactttatgagaaattgaagacctaaagaaataggtaaactttgtatatttttatgcttaagtttgaggaagactggacagtcatggagaaatataattggataaagtgggtgtgatctaatgggaataaactggggagaatttagcaaggctgtttgttcagattcttctgtatccctgtgtcttcagagttaaagatgtttctttcctctggatatggggcgggcacctctggaatgaggatcctgtgacctgcttcaggggagagggacaaggggaagttgagagactttcctgtttctgctgtttcctcaaatgccaaggtgccattttttggggtagaatgtcctgagtcccaacacaccaaacttttgtgggatgggtgtccagcagcttggaagaacatcctgcagagaaaagtgaagggcttgttaagcatcactggatccaactaattgtgcggaggagtttgaggaggtgtgactcagacttgcttagccacattcctgaagtgggagtcagaagtaagctggctctagaggattgcaaagctggcttaagaacttctgcacccttagctttgaggcttccagtgctgttgtggattaattaaaaaatgctgcgtcaccggtgctctcatgaaacacacaacacttctgtgtggaaaattatgaacatacatgattcagagttgaaaaatgatgagagcagttggattctaaatgtaaaagttttggaaaccttagccaacctacttcaattctatatcccttattaaatatatacaatagtgatagataataaaaatgtgtctargtctcagctcttatgaaaaggataaaattaaaatttgaagtgttaagaaagaattatacatattttaattggctgctttttttcttcctggaagtaataaaatgatggtgcgtctaatggcatatatgtttgatgaaatatcataccctgttgttatcctggaagaaagcaagcagtttgtggaaatcatgaaaggctctgtgtgtgaaggcgcctcaragtgacacaatatttaaggccctttcaaacctgcacatcctcagagggagagggtaggtggcccctgcagttatcaaagctgttgaggagttcccaactaacccacagayatctgcctcaacagatcttctgacgcagccacccaggcaaatggatatcagccaaaaagagcccaagggtccctggtttaaagcaccatcaaagggcccactcatcctcctgttaggaggcaaagcgcctgaaatctccacacttacccttatgtgggagaagagatttcttacccattcatggctgatgcccctataacaaaagacagattaacaagagaaaagcaaacaaattgatttaatataagcttatgtcacatagatgtcttcagaaagccccaaggaaacagggcaaactgtatttttagggacagtcatacagaagtttgatcaaaggacaaaagatctaatggtaataaactcaggggtaggggtacttagcaaggcctgtttgttcagcatcatcttggcatccctgtgtgatatttctttcctctgggtatggtgcagggcccctctggaatcgggtcttaatgatctattttctggggaaggtgagctaggtctcatggcttgctttagaggaggagtaaggggaattcttcctagtttctatgggctgcttctcctgttccctcaaatgcccaggtactgtgattggaggtagtgtgtcctgaacatgcatcaccttcttagacatggggtttgttaagaaatgtgctcaggaatgtcgtttggattcttacctgtttgttaataatatatatgcatgccacgtatctgtatttacacacacacacagccttagtctgtctggtgctgctataacaatactacaaactgagtaatttataaagaacaaaatttatcacagttctggggtctgggaagccccaagatcaagacactagcatctggtaagggctttcttgctctgttttcacatggcagaaggtggaagggcaagagagtgaactcactctcacaagcccttttctatagcagcattaattcacgagggctctaccttcatggcctaaacacctcccaaaaagtctgcctcccaacattgttgcattaggggttaaattgccaacacatgaattttaggagacacattcagaccataacatgttcatttgtaaacagatggttcccaacttactttttttttttaatcagggcagccttcattttacaaagcagaatgaaagcmccgctacttttttttttttaactttctgatattgtgaaagcaatatgcatttggtagaaatcatacttcaaattgattttgaattttgacctttttccaggctagggatatgtggtatgatactctcttgtgatgctggacggtggcagtgagccagcagctcctagtcagccacccaatcatgagggtaaacaacctacactttacagtggactgtgttgccagatgattttgcccaactgtaggctaatgtaagtgttctgagcacatttaaggtaggccaggctaagctctgatcagtaggctagttgtatgagatgcattttgacttacaatattttcaggttacratgggtttactgggatgtaaccccactgtaagcagaggagcatctgtgtacgtatgtatgtcttctataaagatctgtgcatatatgacccagcactcacaagttcatgcacacacacatattgtttgatgacctgcttttttacacttaacgcaactctgtgtcattgcatattctctgtagtgtcattgtaagtgacaccatagaattcttttgtttgggtttatgctagtttatttaatgagttattcattcartgatttcttctagttatttaatgttataaataatgtcagagacatttttgtgcccatactgtgtgtggctctgtgtgtgtgagttcttttaacaaggtttactgattcagactttgcttggtctaagtgcaaaggatcacaggcctcttatggcccctttactatcttttgtaaaaatgtgtgtgtaggttaaaggcccaaaatatggttaggatgagggttataaccatgatattaagctcaggctcaagatccacccagtcttgggcgaatgacctcgggctaggtcttaacctctccaggatgtagtgttctcatttgtaaatcaaatcgactcctgctttgtaaaattgttggggagtaagatcaggtgtatgaagtacctggtatggggctggcacatggtaacccctaagcccatgttagtccagcttgggtagtggattgtattcatgctgatacaatctgaaagttctgaaagatcataaagggcttataacagatggtgctgtccgttgaccacttatgcctttgttccttagttttcatgggcggactaaaataaaaagaataaaatagtatgtacccagtaggcatgacgagcttcatgggcctgtgacttgtgcggtcgcggagggtgccgtgcttagtttagtgctctgcttagtttaatgctctgctgtccctgtcttgaaattcttgattttgaacacaggctccctgtttctgtttttcaccgggccccacaaatgatgtagccagtgttgtccagaagattgttaagagggtgaaattagaactctcaaagcactgagtgtagtactcaggatataataggattcaataatcactaggtgactataataattttttgtaagcagaaacaactaagtatattaatagacattacattatgaaaacagcagtgtgggatatataattaatctcatttacagataaactgaggcccaagaaattaaataacctgctaaaaccacattgcttatgaaagcagagcttggattcacacccaaattcttctcacccaaagcaccactgttgacctgacctattaagtgttagttcccttcattccttcccaggagaacctctctgtraaacctcgtatttaagcttccttgatacccatcagcaccccaagccttactcccagcagaattttcagagcccctcaragtgatccagaattcccaccagacctagaaactgttgaggctacagcaaatgggaagcacagttctcctgctcaccctcagtcaccctgtctcatcccatcctgtcctgtccccaagcctgcccagaattacttgctcagagttccatatctgggcaaatatgaccagcctggtgacaacttagcttccttcctttggttcctgaaaaacttagcattggatgactaccatctaactaatacctccagaccttcatgagaatcagtgagagatccgccggcattgggtcctagcaaagtagctgtaagagatgcctatgacccatacactgaggacctgaccatctgcctggtggcagagatcccttgctttcctacactgccaggctgtgatttgctctgcccactcttttccctgccagaaaagaaagaagatccattccaccatgctgctcagaagcaggtagacagcttcatgtggggaagttctagtgcaggcctgcttgcagcatgtggcctctgagtagagaagttagtacgtgagcattgcgtctctcggattgctagatttgaattttgaatgtgacaatgagactgttgtttcaaagcaattccctaagtggctgtttgctcaagacttttgtagtgtgaacagagatttgggggagggggagaagccatctgctccagaatagtcttcgaatgacacgatcaaatgactgcagagcaaactggagggagtccaacagaaagttcctgtctgctgcatccagccccaaccagcactcragccattgtgtttacatggaagctcacacacaggtttcaaaggcaaggccgtgataaccaaggatgtaagtgagatgagtgtggaaaagaccacgtcagggagctttctcaccccgtatctcaccagtataccatttggaaaactaaaaagccattctttagagagaagctcagtcttttttcctgatcccttcagctatgcatttggttacaattaatgtatcagatcaaatgaaaaagttacattcctttgtaaattcatttttatgtgctcgtcttctattagtgtttaaactctgaaatctatttacttaaaatatgaggcaattttcttgtttttaaaatatggcctgyctcaatttgcaaaacatccttgattcttattttgtttctctaaatacgtgtatgtgtgtgttttttctttttctttttgctattaggcattcatgcagcctcacttgctgggaaatgagttcacacatttggagtttccaaggagagtacagagaaaggagcttggaaagaagatgctctacagggactttaatatgacaggctggtaagaacatgccttcctctgcctcggaaccacacagtgtgtgtgaaggaagcatcaccaccataaacagccagttacacagtttggatcaggaagcacagccagagaccagggtttgtggtraaagacaagggggtacacctgcctctgctatgtttgcttaggaccaaatcacgagccttggtttgcctctctgcttcttcgaggccctccttggggatattggaccccaggaaactgacctgatttctcacttcacatgtagcaaatatttgagggctttaaaaacacatgaagctttatgtgtttaggtcagggttattaaagaggtagaatggccaaaggtttattgagccagactgacttgggtttgaatcctgactctgattcttctaaatgagcaaagttggttaaattgcttaacctctagagcccatttttccatggataaagtgataaaaagatatatcctttgaagattcattatcaaggctaaagttaatgagctattctcattaatatcacattcaaattgaaataagaactcttgtcaggggggttgtcgtattccgaaaacacaactgtgtaagcatcaagaacatttctaggatggagcagtggctaatgttgactaagacctcagctatttcttttatctgactgatagatatgataagtacttatacactatagggttaatgtaaggattaaatgagagcgcagtgcctggcactgtgtgggtgaagatttgctcttgtgccctggggtcctaacgagcgagcctcctgccagtctggagaccatatgagaatgagaccatggaccctttcttccccatatctccaaaagagtcaaagaagtagattaagtagattttcttatctcttccccattgaccaaaatagcaatagcagatggtcacagcccaaattcccatggtgatgacttggccagggatctactgccagggtacatactgtcttcagggaacaagttgagctacccagagaagataagaggccaaggggcttctggttgtcctttgccaaccaagagaagtttctcacctgtatccactcttcttcctctacaacaaggttagcaaactatgacctaagagtcaaattctgcctaccccatctacttccagaaataatttttaaaaatatagctacacccatttgtttgtttgatctgtgactgccttcacactgcaacagggcaattaagtagttgcatcacagactggttctcaagcctaagaatttacccctgctctaaaatatgaatggatttatcagaaagggttcacctttgcagctctgagttctggagttttgatgccccagggtcatcataccaaccctgactgggttttcttgtgaatccatttttatttagttagcaaaatcagcacttgtacaggaaaagtttaatgtgagagctagtgtaattcagcaaagcatcatggggtttagtctgggaactgtagagtttggaaagatggaacgttaggaacccacatggttgtaaacacataaaaagagtagatctaaaagacagcaaggaacatgaccaaatagaagaggagagactatgggagacagatggggctggtactgagggaacatgatagggaaaacgggatgccagacaagtttagatttactgggaggctatggggtgctcttatatattcctgagaaagagaaataaatgaaagtgatgtttttggagggccattctaagagaagttggaatgagattgactaggagagaaagcagattcaggtactcagagaaaaactatcataacaacatttatgtgaggtctcgaggcctaaatagagggatagaagcagaaaacayggaacgaaaatgaataagaaactaaatgatttaggccaagggataaaggtaagaggttaagtcattgacagcaccagttgcctatttaaatatgtctctttaacaagtctgtaggctccttgagggggacaccagtgcctagtcctgtgcctgacacatagtaaacaggcagcaattatgtattggctgaaaggaataaaggaggtataattgacagaagtggggagatcaatgttgcagacagttgatgtgcacatttaaagcagattgagcttgaggcaaggctgtacctatgttctttctatgccagaaaggcaaattagatctaaagtagtcaaaacaaatgataaatatctgcctaggattttgtaataaggaaaagtatctttgttgcagatgcttagtattgattcaaagggggagaagaacagctcattgttactaactttgaaaagcactcctaatgagataataggcatcgtcactttaatgggccagatgctttcaaaggctgtaaaggttccactcaaacctctctttgtaagtagaatgtgtgatgaggttagtttttttatgtttctttctccaaaccctggaagctctgcttttgtgttttgtttgtttttgttttttgtttttgtttttagtggcttgtacattttaatatttagaaaatggctaaagattgtcctggttttataattaaaaaaaaaatgtagctaagttcagggactagattatatccaactttatatgcacacagttactttctttcactcttgcgtgcacacttgctcttgttctctttctcattttccttctctttctctctctctctctctctctctctgcattagcatggtcctaagcagataaacagtccacaaatgggctatttttaattgtatagaacttcacagaaggtaatgaataatgaaggagccacaactgagaatggctttagtcagatgtgatttgctgatttgttttcagcctaattccccaaacggctgttggctcacaaccttggctacaagcagatttatgtgcatctttgtgcatttcctacctgttccaacttttgatttgaaaataggacttaagttgaagaaaagccctttacatctttgtcagaagaacctaagaaattgaaaaccagtttaggccaagcacagtggctcatacctataatcccagcatttggggaggcataggtggtaggatcagttgagtccaggaattcgagggtgcggtgagccagaatcatgccactgcattccagcctgggcaacagagcaagacctcatctctaaataaataaatgaatcagtaaatcaatcatccattcaatttagactactgcctacgtaaagcactccccccaactttaatgaattcctttttaaaatgtttttaccctctagcagaaagccttagatctagcagttattttttaggacttaaagatgggaggctgggcatggtggctgatgcccataatcctagcactttgagaggccgagatgggaggatcacttaagcccaggagttcaagaccagcctgggcaacataaggagaccccatctctataacaaattttttttaaattagccaggcatggtggcatatgcctatggtctcagctcctcaggaggctgaggtggaaggattgcttgggcctgggaggttgagactgcagcaagccatggttatgccactgcactctagcctggaacccattcttctgaaaccttctaacaagtaaaaagtccacctactgcaaagctgtttaatccttgtagtaaatgcctagttgtggaattttttttcttcctcatcttccactaatcatcatggtaatggggctgacaattattggaagagctaagggccagacactatgatgagagctttacctaattcctcatacctaaygcttaaaacagtcctgtgaactaggtacattttacagatgaggaaactgaggcacagagctaagttgctcaaggttacataactcgtaagaggagaaagtgggatatgaatccaggcagcgtaacttcagagtgtgtggtgcttactaaggtgctaaactgccaaatgtggaatgacccccccttactcccattttgcaggtgagcaaattgaggcctagaggtattaggtggtttgctcagcttctgacacagcttgcacacagctgatgcaaatgtgtcagaataaggactagaatccaggtttctgactttttgttggggttctttctaatacagtgtgccagtcagcttttctttaggataattagacatgatcattcagtttcgagcttcggtgtacatttaagcaggggccctctgtccaccaggactggtgtcttgacgatcctatagggtcaagaggatggaatgaagcattttaggactgctgaggccgtcccttttctagtccccagtctgaccctgtagaccattgctcaaattaaactgatgcttcacacttctcactaagagcttgtgtcatttgggggtgggggttctggggaagatcccaaaaggaccagttcttagaaaaattgcctgctctcattagaggagcaccacgccggcactcagtggtgtgtctgctgcaggaggaagtgtgggagaggatgtcagctctgggaaggcttgtctcataattaaggatgagtctgttgcctcttaatggggatccttttttttcccaccctcatgctttcacggagactgtggagcagcttggcaggctcaaattgttttgaggacaaaaggttattgtcaccaggaccttcataatgcagttggcctcttccctggctcccccacctccccttccccctctcctcagatagtttgcacagtggctagatttacaaagccattctcttcgcagtgcccccagtgctgagttcattcytgatggagtcttcccttgctctccctatcacccccttggctctcacctyctgcgcatggtgtcattggtcccggtgccagaatccccaagctggggcccatcctccccatccctttgtgttgagctgctgttgcaggatgcacactgtagctggcattgtgttgccttgaragcagtgtatcccgacccgcagccctctgagatgtctcaggccataatttactggcaagtgtctatgttacygagttgaaacagcagtttctcacagctcgctttgtggcaccaagtctctgctcctgtgaccactggctattccgctttctcaagtaggatcagcrtacttcgtgccatgtccagccacmtggggtggcaagcaagccagggacccagagggacatgtgtgtgggagggggctgaaacttcacccctggcgccaggccagattctccagcagctgttcctgggctgatgggatttgtagagagagcaagggccaaagaagaaaagtccatcttgtgaatgctagattgcttccagatggttctggtcatgagcaaagtataccagaattcttcctttaagcaaagcctttctaacgttatgatggtctcatttcaggggcaggctggactggtaacttgagatcacatgcttgacttggtaaagagagtcctgttttggcgataggcaccttgtgtactttgctctgccaagcttctggggccttgggcagatcctggcctaggtctctcgtaaatacttcctctgaccattgctgcgaacctctaagtgtggtggcggcrgggggtrggctttgctctgcttttagagctgctggaaaagacagatcccattagaaagattccagagatggcagtgttttattttgtcccttagagcccctaactttttataattctaacttgatgatacatcacgataattttccctcctctgtttcccttaaaactatgagcaaataggggattttccactgggagcagagtggagttagcccattttctcctttcagcactttctacttttattgaggcaaagagaaatttccattctctgtgctctcgagcacagtagccactagccacatgtggccatttaaattagctaaattacataaaattaaaaatttatttcccgagttgccctagccacatctcagttgctcagtagccacatgtggctagtggctgctgaattggaccatgcagatatagaacgtctccatcatcacagaaagttctacggcatggtgctgtggtctacatagtagaagagcgtgggtatagttgggaatggtgtggtgcaaggagctctctgtaactcagcatcccaacagcaaagagttttttgttttggtttgttttttttgttttttttaaagacagggtctcactctgtcactcaggctggaaggcggtcacatgaccatggctcactgcagcctcaacctcccgggctcaagtgatctcccacctcagcctcttgagtagctggtactacaggtgtgtgacaccacaccctgctaatttttgtgtattttgtagagacagggttttgccatgttgcctagactggtctcaaactcctgggctcaagcagtcctcctgcctcagcctcccaaagcgctgggattacagggatgagccaccaaacctggccccaaagagttttttaaaaggtgggatgggtactgataactgtggacagggaatggtgtagccacaccggcctctggtgcctctgatgccagactctgagtcagcagaggggtgggcttcacacccctttcctgatcctcaggggcatcagtcattgtgcttaggaacaactcacttcatagccagtagtcacttttgggccaccaagaagctgcatccagctggccagactaaagggagacccatttcatcagccctagtcagtagcgcacctcccctcctcaagcagcccagcagccttctttcagctctctcccctatctcctggatgaggaccagctgctggcactcttgtccctcttgcttttcctttgatttcttggggagtaattcaggccctgagaatatgatttaaaagcagcttggcttccaaccctttccactgtgtttggggtgacctttattctccatctatagcctggagtttggcttggggtggagaagcacagccccacagcatcaggcttctcaccaaccatccaaacgctttctggagagagaaactcactggagatagttccacacatggtctggagctgccaggttgggttttacaaatatagatacagcttctatcttattctttattgctctcttcaatgccctctgacagtgcattcaagcaggctgacaaggaagtggatgagcagattgagaaacgccacagaatgcttatgaagccaactccagagctgcgccygcatttaatataaattgatttattgaatcaagcacagaagccctgttacagaaaccccaggctttatcctcttgaggaccacctaataaagcagccccaactgacactcctcattagcttttccacggatcccaaggcggtttttaaagggacagtgtccctctttggggcccaaatttatgtgttggccatgcctgtgggtctaattagctcagcgttattagcctaccttagaaagcctacatttttgaacagcttgactcttgagttttacagagtaattgaaaaattcaaactcagtacttttccctctttctgcttttaatcactcttaacccaatcttcggaaatttacctgcagatgtctctggcattttggggacacagaaggatctctcagtcccaccccagtgtaaatcctgatgttgccgtcatgccacagacctacctcatggggaggctttttacactcaccagagaaatatcacattttaattttataattacttcacaagaaagcaggcctttccctagtgaaacctggtattcatttcctctcagcaacttgtattttcataatttaatgattacgggccaccttggcagcagtctgattgctgaaagcactctgaaaatctgaccttgtagagacaggggcaggggggatcatttcagagaattttaaccccaaacctcaatagattatccaggatggagaatggctgggccagggattaggcacctgaaaagtccctgtgttccaaattccaacggggctggagtccaactcagaatgggtcagccccacatggggaggggcctctcccggggcttccagagctgagatgatgaatggttatttgctatgtgcatgttctgcatcttttcaagatttgcagctctagctgcaggagcagcagggaagaaagcgggccctgctgtgtgcagcacatctcctgacagtgatgaatgactccctgctccctgccctcctgcgcaggaggccagtggaagctatggggtctttacgaatggttgcaagccaagacagacaggctttgtcagaccacagggaggagaaagaaaagagatgccccaccagctcgctccccattgatcatcactcaccctacacacgcatgcacgcatgaatgcactcacacacgtctctctgcttcaatgagtaaaagtttattgtcctaaagtggctgaactatttccaagcctttcttcccccctcagacccttcaaacactcacagcatttatatctattatccacatacgcttaagcagagtcacacggcgcttcccctgtgactggtgtttggggttgtacagtatgtatgtgataagaacatagctgcaagtcatctggggaagtttggggatgtcaagtgcttataaaaatctctcttaaagtagtgtccttttaaccaagaaggccctgtagacacttaccatctatttgacaggcttgtattgtacacctactacacagtagatgttgagtagcagttaagagcaaggatgctggagccagactgcctagctgggccaatccccaccacagatcattttgccactgtcagccttggtttccccatttgtaaaatgaagctaataatggtacttgaggccaggtgtagtggctcacgcctgtaatcccaacactttgggaggctgaagcgggtggatcctttgaggccatgagttcaagaccagcctgggcaacatggggagaccctgtttctataaaaaatacaaaaatgttctgggtgtgttggcacgtgcctatagtcccagctacctgggagcctgaggtgggcagaacacttgagcccaggaagtcaaggctgcaatgagctgtgatgataccactgcactccagcctgggcaaaagaacaagatcctatctcaaacaaacaaaacagtacttgataatagttgggatattatgggttagtaaggttgagtgcattgaacaaagcctggcatataatagcgcgtgatgagtttctaatactataatcattagctattatggagagtgaaagggtcagcaagagctgctgctggcctcaggaggtctacagtctgttgctgaaatgctgcctctgcaaggtaatgagaagctagaaaacaaaaagacaaaggaaggcagtttcgagaagaaactaaagtcagatcaggtctgctggctgcctctgcctagcaggtctgtcctgcagcatggcagatgaagatgggtttgacacagaaaacgtagagctcttgtctgtcagaagagacaccatcactacagccaggaagcccgttgccagcccctctgtcccaggcactatttgataggatgttttttggtttggggacttttttttttttttttttaaagagacagtctcactccactctgttgcccaggctggagtgcagtggtgtgatctcagcccactgcaacctccgcctcccagattcaagcgattttgatgcctcagcctcctgagtagctgggattaaaggcgtgcaccaacatgctgggctaatttttgtatttttagtagagacaaggtttcaccatgttggcctggctggtctggaactcctgagctcaagtaatctgcccacctcagcctcccaaagtgctgggattacaggtgtgagccacactgcactcagctgatgctggaccttttaatgtactcctgtagtcttccaaaccatacccaagaagctgggagggtcaagcccatctgtggttaaagcatgtccttgcgtaggaaggatttcatcatataggactatgttagctttaaagagattgccacgtggcccaagactggcttttttttttgagacggagtttcactcttgttgcccaggctggagtgcaatgaatggcgtgatctcggctcactgcaacctccgcttcctgggttcaagcgattctcctgcctcggcctcccgagtagctgggattacaggcatgtgccaccacgcccagctaattttgtatttttagtagagatggggtttctccatgttggtcaggctggttgtgaactcccaacctcaggtgatccgcccgcctcagcctcccaaagtgctaggattacagtcgtgagccaccacgcccggcctttctggaaatttattgaacaatatcatttcacctttaaacctattcttcaaacttccacagtgggggaagtagatctgttgggacatatgtataaataactaaagcaagacaaaagataagagttatacaaaaaggtttgaagaaaatgcctgtggctgtggtggagggagtagttgttttgagaggggagattgggattggggaggacttcctggagaagattgtttgaaccaaagatctggattacgagaggggtttcaagaagtttggagagaaggacattcggagcaaagggcactgtgccagcagaagcccagaggagtgaaaatgtgatgtgtgttttgggaatttggaagccagagataatattcaaaatatttggacaatcaaaatggacaagtaggccccagctgggctgcagcagggtcctagaagcctccctgctgtgccaggcattaaccctttatttactgttacctcttggggattctaggggagagtccagagcagcagatgggggcattcatggagactgagacagccattgtttgctgactagcatggaacgtttcaatgttttagcccttcgtgtgcagttatattggtgtgtatcagctagataacagtcccgggaggctcacataagtgacatgtcagagggagcaagagggtgtagagcagtggtgggcagtgaagcaaaccatgaaactaggtaattacattggagtcagctcatggggaactttgaatgccaggctaaggatgccaataatgaacagaattttattttcccacccttaagagctccacaccttaagggtggaatatgacgtatgaaaattacacacaaggcagaaatatagagctgacaatatgtatatccaggacatataggggactactaggagaagagggagggggtgtgagctgaaaaactacctattgggtactgtgctgacacttgggtgatgggaccatttgtacctcaaaccttagcatcacacaatataccagtgtaacaaagctgcccatgtacctcctgaatccaaaataaataataaatgaataaaaatacaatttttatcagtgacttagaagatgatttaagaaaaaagaaaaggacctatgggctaattctcagcctatttttaggatcccatttctaaggaaattccagagaagtaggtacactaccactcctgaaattttccaggtactcacaaacccaccaaggaaacattttcctgtgtccaaccaacactctttcagttacaattagttcactcttaccagagcttgataaattttctgcttttcccagctctccaggtttcccagcaggaaattggcacagctggtttcgagctgataatcctatgaagatggtcacctgcggtggcctgggggcctcttcatctaaatcagctgtggtgatggtttcaaactccttgcttctgggcttaccctagtaatccacacacaagagctggagagccaccactccaaaccctgaaaaatctcatcctaccaccaccgtcctcttaccttcagacaagtaaatcaaggacttattaagagagaggctaaagttttgtgtctgttccttgctggagagctgaaagcagatctctctgtaagagccaggaaggctgataacaaagatgccagcggtgtttcagaactagtgtgttgtcagttgcctctctcctttgttgtaatcagatcataaggaaagcttcagaagcctcatgaggggatggaacacattcactttttgttcttcacctggttgctctggcaaaagctgtagtattctgccatattccaggttcagattctgctgagatgggatcagccttgtcagtcttccagggtagatcagatgctatgtatcactctctgtacctaaaggacaaggcacagagcttcatctctgtgggacaatcagtttcaactactattcattaagtgaaccaggtattaggttgggcattgaagatacaaagcagaaaaaaacagtgccaaccctcatggtgtttacagtctagtgtcaggacagggccatatatggatgattacagtttcatacaaaactaatagacaaaggtttacctacattgaagctttgtcatctggggcaattactgaaaacatttcagggtctattttatctgctgaattagaatctctatggattctgcattttttaataagcaccccaggcgattgctgtatatccttaaacattgactttgggcagccctagagtttgttacaatggatatgaataacagtttgcagaagtggtcggttaaagagcgctgggcagcctgggctgtcaaagtattgtgactcctgggctgctggtggtctttgcccctggttatccccttgctattgcttgggaatgtctttgtccacctgcagtgagccagtgactgttcataaggtgccagtagactggactggcagtggctgataagggatggtaaagccttcaggtgcaacggtgggtcagggtcaaattaggcctcctctttttcctttttgtgcccataacctggatagtccaggcttcacacatagtataaatacatgggataggtcaggagaccatgctkcccagggcatttaacttaatggtttctgattcctgctcatcttcagtaaatgcyacacaccccatctccaaggcctgatcctctgggtcacattggatcaccctatagaaaactgggcacctaggtatgaaaatttggagtctgagtttattgcacctgagcactttgaacgtcaaagctcaggttaaatctaattctatagtgatcttgtacatctgcagtattgttaagagacaaccctagttttcaaccctaggagtactggtatgttttaacttctatgcgactgaccattataaaaacctagaatgtgaagatgagcttaaattttttttttacaatttaattttaggaagagaattaataattaaacattcttttgcatctcatgccattttgtggcatttatgcagattcctagctcttcacagaggcacagagaagcgtggttaagagtgtaactgttgggacagacctgaagtgagcttgacccctatttcctcccagatatatgacctctcttatgcctccattttcttatttgtgtaatgaggataatgtttctatctagcttacagtgttacagtgaggattatgtaagtttttaaaaatataaatccttagtgcctggaacaaaaagattgcataataaacattggggtatgtgaaaatccgttaactgctgggcgtgaggtgacagcagaaaatttaacaatggctgcctttgctctccatcctctgaaacaacagggccacctggatgcaggagctaagagtgtggtattcctccctttggtaaatatcgacagctgttactcaggcctgcgcttcttgccttggcggcctgaataatatgggggttagtagaagatttcagaagagtatgggaagctacaagataagcctctatttcacctgaaaattttgggagtgaggtagaaggacttcatttgtaggcttgtgcaaaactctcatggtttttaaagataaaacagaagactcaaagcactgatacttgagatctgcaccgtgtaatgttatcagttcaaaggcacttgggtggaaagccttgaaatgatgtagcataggttaaagtccctgcatgtggcttctcccaggggacactgcaggactctgctccatgatatgaatatccatctgagcagagtgggagaagcttcgtgagggaaagccgcaagggccgacacagaggaactgcctgtgcagcagaaaccctctttgtaattaataatctgtttgctattttcaccccaccatttgtagctatggggtccattttgttcatatcctgatttgtatatattgacttgatctcatacagtataaagggaatgtcaatgaaattcatgtttatttcagaataaatggtctctgagaaagctgaaatcacttcacatttgtgtgctcatgaagtaagggtctctgattcatatcggtggagagagctaaatgttattgattagaatatgaagctgttacggccaagtgtgaatgcacaccaagtggatactgaatcagaaataatttccaaatctggaatttccttaagagtcattcataatgttttatcctgaaatattattagttctgttttatacatacacatgattactttttttaaaaatactgatttttttccaagkgcatccttttctgctgctgaactcagcytacgaatcaaaaggtgactttcastttgtttactttattctactccgtatacccagcacctgtgccagtgcccggcacctactaggtgctcagtaaatacttgcaaatgaatccaatagaacccattgtttttatctggtcaaagcctgagctcctaatttggaagctacttagagcaggttctgttcttctaccaaactttgagctgtgggtagggacccattcacaggattgtgaaatcagtttagtatatggagagcagcattttaaacaaattgaatagcacaggatagaaagaaaatatcggtgtatatcacatagttagggtaaatattgttttttgccgtgtgtttgtgcatatgttgggttaacaggattgatatatttcttaccaccggtgaaacctctgctgtaacccagtagagtctcccaaagaacattgaccagcaaaatgagagcaatctctgttgcctcttgctattttccataggcctggtgagaagaagaatctttaggccaaaagagagaaatgtttactactctcagaactccaggcagggtctggctcaggcgtgctgatagggagaagtggggaggtaggcattttcctagggactgttggttaaacctaccaatcaggtgatttcctccagggcagytgcattgtcggggaccagagcttgggccccattatggagagttttcatggaggaaaaaaagccagcagcctttcttgtggctaaggagatgagcaggtggtagccaggtatgcacaagctaggctgctaccagccctcttctgtttatcaccaaatattaatcacactcacaattcaaaggtactatttgtgcctgaatctaacttgcactatattagcagaagtctatcaggttgttcacagcttaaggcctataggcttcaactaatttaaagaacactccaaggaccaaagaaagaaaacaaggtagcatttgtttggagagcttccatcccacagggtaactttcccagggatcatatcattcagatacctactgaaaatatcttccaacacataaattcaggaacccaatgagccaaaatatgacccccaaaactagatttatacatacttaaagcctgctatacaatgatgagcctggggcgagatgttgggtccatctccaaacattctaagccccaaaactcccagctggatagagggtgtttcgcagcctcttcagactcaccctggggactgatccttgctccacaacyctgacttgagcctgctgttgttaagcatgcctcagattcactctccttcacagtgcagctctgtctttccagcagacagtttccatccaaaggcaaagtgaatcttagaaaccgggaaaaaaagactctaaaagatgacatttaaaatataatagtaagatctaaccaaacatcagactcttcttgtgttgccttaaaggacacacacacacacacacacacacacacacacacacgctttctctctctttcatgtagtgaggggggaagagctggctgcctgctgtaaggccgcttgaaggttcagaaagcagcctccatttactgagcactgtggttagacttggggcctgattcctttggaaatacagatggctggcagaaaaaaaggaagcaygaggtggttgccaatcctgcattgctttttgcaggaaggtctcaggagagtgggtgtggggagaggggagtcaagggagagcctctgtggattccagaattgcttaactgggrtcatgccaagctcttaaaagccacaagtagcatttgggctccaggcttatgtctgttcctgtccagccaggcctgggtggtgtttcatccyaggcctcctgagatttaagctactgctgagattttgttatagraaggcaagaagggggaccgaagatgtttctgtgctccggcctcctcccaaacccaaccagcccctgtggaatgtgcctctgccgggctaggacttggtttytaatgagaagaaaacaaggctgcctgtggctttctcctccctcctggaggggcactgagctcccagctaaggaaaaaaaaaaaaaaaaagggctccttttatgactatttcaatctaacccagctataccttctttagattattatctctgaggcatccttctgagtatctgagtcctcattttagaggagaacaatggactgttctggataaagttgcacgggtatgctccttcatgcttacagtagaaaaagtatgaattaggtggcttgattgctcagcaggaagtggtttttcytacggggatgtgctgtgtcttcctgcttacggttgcctgttagctctacatctgcatggaagaaagaatgaggctccgaagaccttaatagccacaactgatggccaaatagcacyttatccttcacaaaggatgttcccagacatgtttgccyttaatccttgcaaccatcctatgaagtgtccagttgaagaggcagattcagtgaggtctgagggattttcccaggttcatacagccagttcacatgacgattgagatgtgacttcagaacctctgaccccaagcctggtgtgctttaataccacagtgggctctgccaggagggaagagagactccaggaaggaagatccccaggggagaagaggcagccaaggcaatgtctagagattagtggaagaatgtgactcactggtgtgtgtcattggagctgcacaagtgaattgttgagattatgctgtccccgaagggagcataatagggtcccctgttataccccccggaggggatcacgttcctctcgttcctcttaaatgactttgaagtcttgctaagggaattaagacttagggaaacaagtggtatttctctctctctctctctctctctctctctctctctcyctgtagctcaaggtcatgacttagaagagaagggagatcgtgggaagtgatttatgttgatgatgccaaagtgtgaactctaggttcctggcccatgggttaagcaatcagagtaggggctcttcctggaaatggaggaatccagcaaagactaggaagaactttaaaggaggaacttgcctttaaaccaagttagaaaattgtcttggtaacaccatatacactggtgaatagctgtggcaaaaaaactgccattctgacgtggtactaaggaactgagaaaggaatagacgagagaatcataaatgttattttttatgattttataactatttgtatatatactaataataaaggggaacttgaaattttaatataagtaggtaaacatatgtcagaggtatcaccaatgggaacccagccatgaatattagccatagaaaagctagctattaaggcagagtgaatgggggatatctttagagggaaactgacatgctaagggagagataccagcctttgttcattcattcatccatttagcttgtgtctactttatgtctaccatgtgcttgcacaattgtagatacaaagatagacaggtaaataggaagaaagtctgtgcctttatggagttaatgtgcaggatgttgggacagaaggtaaacaaattaataagagcatttcagattgtgcttgaagcactgaagcaggatgagcaggagcagagaacgccagacttgtagatgagtggtcaggggaggcctttccaagtgatgtccaggagccagcatggcaggatcaaagggaagaatggcccagacagaaggaatgaccaggccccctggtgtgtcaaaaaaaaaaaacaaacaaacaagaaagccattgttacaaggcgtagcagagtgatcgacgatgtcagagtgcaaaggccagatcatggagggcctcatcattggattgtattttaagatgacgggaattcagtggagaactttaaggtggagagtgatgcttgtggattaaaagagaaatgtgggagatttgctagcaggcctcccagctatgaggacagtgtgagcaaagctttactgaagggatgtataaaattgccacaaagacaaagtatgtttatggtggagaagtcctataactgctgctcattagggtaaaagggcttcggtgtggctgcatgggcatctcaaattcagatgttcatagagaatgtctgagcctgtaaggacagcacctagcccactagggcaaaggtgggaaaggggtgcttgtgagtgagcatcagccggaacagcatagtcagacatagaaagcagccgaacaaggagactctttgcttttgttttgcaaatatattatggaacaagaaaatacgaataaagcctctgcatagggaaggtagtattaatttgcttgcttaaccaaatatttattgggtacccattatatgttgagcactcttgtaggtataggagatgccataggtagcaaaacaaaaatctatccccatagaacttaaagggcatgaagaagcagtagaaaaaataaccatagtaaggaagtaaaattctttaactgttaggtggtggtggatgctatggaaaaaaaataaagcaggaaaggggactaggaaatttgggggacaggaacaatgttaaagaagaccatctggttacttggcttttatttagatcgcaatagaaaacctttgatgggtttcagtagggtaatgacatgacctgacattctaaaataattactccagttgctctgagaacaggagtaagggaaaatcagaacagttttcaacactctcactgccatccacctggtgacatcatcctagcaccatcgcctcttgcctagatcattgcacagaggcctgatggatccgtcccaataatgtaggcaagaaactatggtgctagggctctgacagcagggaaggtgttgaaatctgaggattctggatttgtttgaaaggtagagatgacagtatttgrcataatgttaatagacaaaatactcaatccttgttgtgttactggaaaattgagaaggtgacaagttctagcaaagaaaagtatcaaaaagctttgccacaggtggagacaggatcaggaacatgtttagccataaggtaggaagaatagcaggaccaaggagagaaactggcctgagagcttcaacaagggagtgagagaggaaaaatgattcagaattggaatctcagaggtggggggtgttcttgctgcaggccacatgaccagggtgatgatggggaacagagaagaaggtcagcaggaagtgagctaggagttttaaagsgaggaatccaaaagcaccaccaaattctaagaaaatgctgagaatgacatcctgggaaagagtgaaaaagcaatctgaacctaggctgaagtcatcggggcaggtgggagaatgtcctgaaaggctggtgggtaagggagggggatatgaggcagatggagggactgacagaagggcagtgagagagcctcagcctagaaggatggggttgatgtaggaactataagcatcactcatgtgccttaggagcaagagggatttgaaggaatgtcgtccactggaggtggtatgatcaggagagccagcttaggttcaataaggcaggctcaattagtratctgttcttgttgggtaaggttcctagattgggtgaatactgtatgcatagatatattctgagtttgtaagaaatcggattgtttcttctctcagccttttggacaagatggagaaatactgagtggataatggttcagttaagttgcttcatagatagcccaagagctattccaggagagttgaaatccatgaggacagtgtccatctggatcagtgttgacagcctttttaaatcctaaacacctcctctttaaacattaatatctcattgtccaccctctactgttgagtctgtcttctgtgcttctccaccagacaagattctgccgagctttataccatctgttttttgtattgaaaaggaaattgcccggtgtagtggcttacgcctgtaatcccagctctttgggaggccaaggcaggcgtatgacctgaggtcaggagtttaataccagcctggctaacatggtgaaatcccgtttctactaaaaatacaaaaaattagctgggggtagtggcgcacgcctgtaatcccagctactcgggatgctgaggcaggagaatcacttgaacccaggaggtagaggttgcagtgagccaagatcgcaccattgcacctaagcttgggcgacaagagtgaaactccatctcaaaaaaataaataaataaaaataaaaaataaaaaggaaattgataggttcttcattttcatgaaaaaggatactgctgaatttgatgtttttgaattgctttccttcacatgcctgaaatgttgccaccccccttgtgtggttagcttggccagtaggaaggtctctaatgattccacttagcaattttttcagtgatstggatgaagatggcagggctgcttatcaaatttaacatgatatagcatagacagctgatattttggatggaaggatctgagttcaggaagttgtcagtgagttggaacaatggactaaaactaacaagataaaattaataagggcaatggagtcctcccttcagggtaaaatatctattgtgtgtgtcattataaactagaggagaccatgagccaaaaaaaacattctcaggtcttttttcttgtggactagggtttttcatttgttttcattcagagtctccatatgtaaccctaaaaaaaaatacacataatggaaatagctttgttaatttttwaaaaatgcaaggcccaaatcaaaagaagtaataattttttttcttatttggaccacatcttaagtgttttcagttccgggtaccattttttgaggacactggccaaccagaaagaccctagagggccacyaccacagtattcagtgctcagttactgtttgttggatgcatggggactagagtggttaggatcctccaggtcctgtgaagaacagttgaaagaactaaggaaaaggaaactttgagatagttctctttaaacaattgaagagctctcaagcagaaaatagtctggatttatttcatgtttttccagatgggccarcgggtttgggtcagtttaagaaagaatttcccagagctgttctccaatggaatgggctgacattaagtaccgttaaactcctaggacagtgactttytgtggcagtccattcaggagaggccaggaaccaaggttaggtgtattgtagaagggattcctacacttggggtacagctgtcttggtggcatttcagtcttattgctgaactgctccttccaggaagtccaaaccaacagtggcttttttttttacagctttgcacaatcaacattacaaaggaaactattactttaaaaaagtatttaatggaaacttctgagaataatgcctctcagtttgggaaagccaagaatttagcaacccttttaagccttgcattttttttctcatctaaaaaaatgattcagttggcctcataaatactcattaaggaattggcccaaaatattaataagagtttgtctagaaaatctttcctaagcctttcagttttgctatctcgtaacaaataatataatctctggtcagtcatattattgtaaaactagcgagtgatttgtttggggcgctagttcttaaaaatttaattaggatttcaaaaatcttaggatgtggtgtagaagaattggttctatgactagacactctctattcatctcaaatccaaagtaccttcatgtcttggagctctcaagcttcactctcctatcttcccccaaatgagaaagaaggaagccaaggacaagctggaagcataaattcaagcctatagccttgacatggactataatataaaacagacaggccttccaagtgggccagaacttagatggcctccttaaactgagagcagtttgaggaaagtctgttctctgtgggagggggcttggttgactctgtggtcactcattgctggcgagatggccagaaaagcagctgcaggtctaagaacatggatcaatcccagcattttgggaggccgaggtgggcagatcacctgaggtcaggagttcaggaccagcctggtcaacatggtgaaaccgtatctctacaaaaattagctgggcacggtggcactcacctgtaatcccagctacttgggaggctaaggcaggagaatcgcttggacctgggaggcagaagttgcagtgagccgagatcgcaccattgtactccagcctggtcaacagagcgagactcygtctcaaaaaaaaaaagaacacagaccatcacttctgctgactttcctctcttcttctctgtagacccagtaccgtagtagccactagttttgtacaaacatgaccccttttgttcttttgccactcacacagaaaattccccttcctcttttgccaaaagtcttcttttcttcatcagatatcagctggtcacccgaagagagtggacaataatggtctcatttcagactcggactagaatgagaaattcccaaagctaagtcctgatatcacatttctttgtcatgttttccggaaaagtccaagtccggttttaaggccactccacctttttggtctgggaggagtaacttaacctctctgggctcagttctctcctctgtaagacaggacattataaggccattgagagattttagatactataagtcagcacagagcctggtgtctggcatgtagaagatgctcagtaaatcatagctgctgtgattactattagctattattaatttatacagactctaatcaagttgccagttttaactcttgagtactatattttatactttattactcaaggctttgtaactatggatggaagtccacttaactttatatgatgatctgtgcttaggattcagaaagatggagggggagaaggtgttgtacttttcctcctcattggtgctattcccccttgtcgttagttgctgggggagagggagtgctcatagttgattgaaaaccaacactggcggggcagaataaaccttccttttccaccattgtttctatttctaatgttttgttgttcctgaagataagcagaagctaacatataatattaaaatttgcatttggtttggtcctgtgggtaacaactctaagtgtgtgtctttcagagttgtgggacatggacttcgtgctcctgcaacactctgccatgtgagaattcaatgacccggcttgtgatagagcagttttcttactacttctctaagcctgttaagagtgctcttcgcctgtctctattaagctctaggtaatacccagtcattggttctagagctgcagccttctgcctctatttaattctagccttctasctctatttaattcctgtgaatgtctagtcatagacccaactcttctacaccagatccaggctcctcctgtgcctggatctcaaggcccagcccctttctacatctggtctccactgctgcatccyctctgtgcgggcctgtctcctcactctccacatggggtcytcaatccctgttcacgctcatctcagggcctttctcaggccattttcctcctctcccttgagccatgtagtctgttgtcttaagggtcaagctgataaggggctaattgctgaatcattttgaatggtagttaattgatgcttgrtgtatagtagtggatctcaaccttggctgcacattggaatcacctggaaagctttaaaaaacccaaattcttctaataatagctttatttgttccccccccaaactcatataccacagtgtttaaaatagctcatgtgagtatgtaaaaacatcaaagtggttatttccactttgtgttagtttggtagatttggggsaaggaaacagtatatttccttttttgaaaattcaattcctagaatacctctcagctcactcaacagcagcagcatttgttttgccaggcacagtgctaagtacctcctaagctctccacattcatttccctattttaatctttgcaataatctcacgaatgagccccagattttgccctaattgattaatgaggatcctgagggmctgagagcacatctacttgtgcagggctataccaaaggcattgctgaactccagctcaggcacatctggtgccaaaacctcactgattctccaccccatgggaaggacaccttaccatgtaactttctgaggatggacctgctttaactttggggttgcatgctttttaaatttagttacattcttttgtacctcaagagcttccataaatttgatttcagactcactcccaagcagcctagatatgtccaggaatggcaggccatttaataaattaggatttttaatgcactcaggagatgttgttgtagaaaagcatctacttatagcacctaattcagcagaacctaccctatcttttacttagtcttttaaataactttgaagttatgagcagtgttatccccattttgcagaaaggggaaccggtatgccacgtaagtgttaattatctactaagtattagtaataactgccactaagtgggctcttactaagtgcaggctctgtactgagctctttgtatcctgtgtattagcctcattgtacagatgaggaaactgagactgaaaaaggtgaagctacatgctcaaggtgataaacagctgtaactgggctaacagttgtttgttcgcttgtttgttttttaacttgkttataagcaaaattgcaagacatggtcttcatcagctctgtccctttcatcttacccgcctccgctgtgcaggctgtggcactggagaaccctatctggaataaaccattgaggcataaactgaaggttctttctgtgtattgagtggctatttaaaagctattgtgaaacaaagaatgttttaccaaccttgcatattatatagaggacaaacaggctcgaaagatttcttccctagccatcccaatacaaggctgttttggtataaacaacccctgaaggtgagaactggctctcraagcagtttcacactccattcatctctgagctctgctgtttctcacagttttggattcgtgatgagaatactgttgctgggtcacttcattattacacagaccctaaggccagaaacccatctcccctttttgctaattatscatatgccaacttatttcctccctcttcaagcatataaagacagtattttctggtttggtaaaagacacacacacacaattctgtagggagaacaactccctataaaggaagangtagtcagtgtggtgagtggatggggtctcagggaaaatgaaatccctagcagtcggtgtcagggcagcaggtcactaaytgagtgcaaaccttttttaaaatgttgtttatcccctacagggcatacaaaaccattgaggatgaggacttgaagttcccccttatatatggagaaggcaagaaggtaggcacgtgtgcttcccctgggtagagaggacagggctctgtcccgccttcgctccacatagcccgtggcagtccgtgtgttccactcagcagcttgtgattttatagccttgacagcttgaaagcatatcccatccatcatccttcaggcctcctgtcttcagggtccaaggagtagtgggggtgggaggtgggcggtgagcacaagggactcaagccaattttgtgaaaataaagtcccccttcccaatccatttgaataactttttacagtgtttaaacatgaaccactttcacacacatcatctcatttatatctgacaacgagcaaggaggcaggtcaagctggctgtgttatatcmatctggcagasgaggcagctgggactgtgaggttaaaacagctcaggcagatcacgcagccaagcgaggggcagctgcggatgtggtgccttggctttctgtctgcttcgcgcgtctcagactccaccatggaagtccagactttgcaagtctgtttgccacttgccccatggaagagagtccaaagcgtcactgtaattagactataaggtcacagcaaccagagtccagactaagataacaaagaccatcatcagctcccagggttccagtcagaatccagcactgaacagcacgttgtcgaaccaaagaaaagctgtggatcctaaagtggtctctgagcagaggcctggaggaggttgaaatcctggagtggagagcaagaagcttggaatctatttcctagtaagaacaaacaccttctgaatcattgcattcttcctcggaacactaatacatttcaactcggtgtgaagcattccaagtgaaaaatgtggtcacattgagaagagtcttcaactgataatttttccagcattcgatacgatagtttttatcaagaagaaatgactcagaagaaaaccaaaggatgccttccatgggcagagtgtgtgtgtgtgtgtgtgtgtgtgtgtgtgtcagagcaaaagcaagagaacaaacatggttaggttttgggctccgtgtagaccagcagtgatttcaatgcaaaaagacatctcaacagaaggaggaataccaaacacaaatatctgatccaygtaggaatcattttttaaacgaacataccccattcatgaaaatgaacacctttcagatcacagtctctggttaagaatcgtgtcagggctaataggcactgttctgatataaatatttgtgccttttggtacaatgggcaccattaatgagtatcattcagcccaatgacctatgcctgcagctccatttctttgtggggctgagattctctgtattaccctttaatatccagtgagttccagtaaactcaggaacacattctgttacccctgtatctctagttcctgtctagcctggtacctgacataaatgcataagtattaaataagctgttcagttatgttcagtatactttccttagtacaataggaaaatggaatgatgtattcttggaagtttatagcagtaagatttgaaggagcaagagttttctaattttagtataaagttcaattcaccaaaacatcatgttcctcaagcatttcaggtaatttaagcttgatggtcttgcgatgggcaggtggcaagttctgtccgtgtacctgttggcctatttaaaagccaccatgtctccattttgcttttgttggtagataccacccctttctgaggactccatgagttcttggagctccttctagatcctggactgggattttctctttcttctccgcrtacccctacgcagaaatttcagagtacttctgtggccattacttctcattttctttcttcagatgcttttaaagactggtgtgggtaacacctggatacttcgtaaacaaggtcagtcactagcagaaacatcagatttctttggctggaaagagcacacagagaagccgccatttcagggaggagagcaggagagccacaagggactcagaatttttcacatttagagttgagcacttcttggctagaagggagccagtccagcctcccagcagggcagagggccccaggctttgctttgcatcactttttttttttttttttgagacatggcatcaggctggagtacggtggcacaatctcggctcacttcaggctcgacatcccaggatcaggtgatcctcccacttcagcctcctgagtagctgggactacaggcgcatgccaccacactggctaatttttgtattttttgtagtcaggaggttttaccacattgccctggctagtctcaaactcctgggctcaagtgatcctcctgccttggcctcccaaagtgctgggattacacatgtgagctactgtgtctggctgtgtctcgtgtctttatcccctctgacccttgccctcaaaaaggtgtcatggtttcatttctgcttaatgtgaactctgcctaccttccgaaccaaggctggcttcaaaattcacagccctgttgacagtctaggatgaagatgaagacaatatattaaattgcagtgtttcttagcatttatttacttcatccccactcataggaggtaattactcttatcacccaggtaatagagtgaggattcaagctcaggtctttgaaccatttcactacaccggatatattttttatgattaagggttaggacactgctttcttccacccaggatgactttcactccatccctctgtgtcgcctgtcttgatgcaatccacctttctgtgctaagtgccacctcctccgtggagccttctcagtagaatttttacctcctctaaacttgcataacccattgtctatgtgtttttcagtacttaaccatattttatgtgttattaattacacatctccctcttatctcccttaccaagtttctttttggtttttttatttgtttgtttgttggtttgagactgagtctcactgtgtcacccaggctagactgcagtggcatgatctcaattcactgcaacctccaccttccaggttcaagtgattctcatgcctcagcctccaagcagctgggattacaggtgcccaccaccatgcctagctaaattttgtatttttcgtagagatggggtttcaccatgtcagccaggctggtctcaaactcctgacctcaagtgatccacctgcctcagcctcccaaagtgctgggattacaggcaagagccaccgcacgtggccccaagtttctttgtagtagggacgaggccttagacatttgtgtccccaacatatgatgtaagtacatagtaggcacccartaaatgtttgggtaaatcagatcttcagcataacaggagatatttaagctgactgtgtaggcattggtgtaatagtgytacttccttacaccattcaaaaacagttcaggatgaggtctcagccctgaggcctctgtgtagctatgtcacagcactggtgacattttgttcctttccacccagagggaatttgtggagatcttagcaggataggttatagagttgataagtttcttttctccagccataaaacataataggtgaactctgggagggcaagagctatttctgattttttacaccttttactagtacatatcacaggactaaggacatagctggtgttgagcaaatacttgtacagtggatatgtaacagaaagattggtgggtgtgtggatgggtgggtggatggatggatggatggatggatggatcgatcaatcctattgggtttgatatgaactgatttctgcagctgtagacgtcacgcatgcattggagttagtttattggacatccttccttccagtctccaaaaaaagaaagctgaaaagaaacagcagcaacctgtcaagcttaagataatggatagaaaaagcactcctcaaatacagaagtgattttggtgagccctttcttggtaagagctatccacgtatgttagcagcaaggggcctggaaacatatctgggcaggaggaactggaaaattgtttggttgttcctagcccaggcagctgcactggaatgggatgctttcactgtgtgcgtgtttctgatgaccctctgcttatactcctaggcccgggtaatggcaactattggagtgaccaggggacttggggaccatgacctgaaggtgcatgaytccaacatctacattaaaccattcctgtcttcagctccagaggtaccgcatgaggtttttgtttatattttgtgcaataaaacattttcggcgttattcctcctgtgactcacaccccatatccagacagtagccaacttgtattatatgtacttccactgtatctctcacgtctgtgtctttttcccactccattctcactttgactcttctggttcacaccttcatcacctcttacccagatggctgcacagcctcctcctgacattttctaagtctgccaatccatgctacttattgcagtcaggtaaattttccttaaaaactgactcctaattgctcagaaaccttcaatggcagcccaggcatggagagtaaagctcagactcccattcacttggtgttcaaggcttattataatttggtctggacttctctgatctttgttctcctgcaccagccagaatgaacttgctgtttcccttacatgaycttaggtttcccatatttgcttaaactattccttttgccaagaatgccctttctccccaactccaaacatccaaattctttttttctctggagtttagcttagatgcttttttatggagagttccctgatttcttccttgcccaaccagaagtaatgtctctccctacttgggatatacatagagcaccttccacgtrcagtgttttcactgtctgccttcggtcacagttgttttgttttgttttgtattttgagacaaagtctcgctctgtcgcccaggctggagtgtagtggcatgatatcggctaactgcaacttctgtctcctgggctcaagtgattctcctgtctcagcctcccgagtagctgggactacaggcacacaccaccatacccagctaatttttgtatttttagtagagacagggtttctctatgttggttaggctkgtgttgaactcctgacctcaagtgatccacccgtctcagcctccctaagtgctgagattataggcrtgagctaccacaccyggcctgatcatagttatttatgtataccttatcccctcgttagactaattacctgaagagcttctgtcattcagctgatgtttagagaagttaatttacaaacaagttggtcatatatttkgtttaaaaaaaatcatgtgtcttaccatataggaaacagtatcgatttctatgttgactttctggatatatcatttagaaatttttttgcttccaaatttggaaaagtctaaccgatagtattaggttggtgcaaaagtaattacagtttttgccattttttttttttaattacttttgcaacagcctaagagtttaaaggtaaatttttctcacccagtaagaaggctgaaatctggtggctgctggcgttggttcagcacctccattgtgtcagggctgtagcgtctctgcatttctttgactttcccttcatggttacaaggtggtggcagtaggtccaagcctgacatttctatgcaaagatggaaaggaggggcagcctctgtcccaacagatattcacttgcctctcattggccagaactgtgttacatgaccttctagctgcaagggagtttgggagagcaagagttttaactctcccaatttcgatagtagaaggaaatcaggaaggcataagtcaggaaccaatagcatttactacaatgtgtaattaaggttttttgtttctttttttttttttttttgagatggagtctcactctgttgcccaggctggagtgcagtggtgcaatgttggctcactgcaccctccacctcccagattcaagtgatgctcctgcctcagcctcccaagtagctgggattacaggtgggcaccaccatgcctggctaatttttgtatttttagtggagacagggtttcaccatgttggccaggctggtgttgaattcctgagctatagtgatccacctgcctcggcctcccaaagtgctgggattgcaggcatcagccactgcggcttgcctgtaattaagcattaaaataattccttggactggaaatgctcagaacatttagacataactctatttgcatgtacttcccaagagcaggtgctgttttaacaaagactattttggtcagaggaaacagaaacttactagagctaactcaaaaaaaaaaaaaaaagtactgcaagaaggccggctatggtggctcatacctgtaatcccagcactttgggcggctaaggcaggaggatygcttgagaccagcatgggcaacatagcaggacccttgttcttacaaaaagtaaaaaattagtttgatgtggtggcacatgcctgccccagctactcagaaggctgaggtgagaggattgcttgagcccaggagctcgaagttgcagtgagccatgattgtgccatgacactccagcctgggtggcagagtgagacgctgactcaaaaaaacaatagtaataatattagaagagatatttatggtgtccatgagcagaatgattgaacagccaggctttatgggaaagtggttttgaaatcaaggcagccctgcaaagcctccacagcggaaagctctcagccctcacatggagttctgccactgatgtggccaaccacattctttatggctctgctaccaatcagcccagtttctcactctcccaattccacatttccggagaggagtctggttggcccagttcaccttttatatcagactaaagtgacttcccagcctgtgtatttgtcccttcagattatatgtccacttcagtaccctttatgggcacaaacagtcacctagacccaccactttggcggagctgtgagccagggagtggtttccttagggttttttagagctgggctggcatccatagtacatgtagataaaagggactaagaagccactgaaagagaaaactctagtaaatgttgggcatggaagatacacacatttcctggtatcacccaggatttcaagtgaggtcagctcggtagaaataataattaccatttgtcaaaattctgcaagtgttctctcttgagtcctcatagcaattctgcataatgaagaccatgactacattaggtgtccaaagttccccctagaagctggtggattccttcccaacatcaggatccgtgaattactgctaaaactacttctcaccagagaagagcaataaatgtcggacctccaactctctttttgaatgccattgagcacagggcttgtaactggactcgtggacttttctattctcccccttacargagaggcatttgtcagataacttaaatgttgccttcacctttctactttccaaaaagcatccgtaaaggtcttgattttgctccttaaagcaaagtaaaaacctccttctccacctccctttctcacatttactttttatataaaatgagaagcagcagctccacttggcttgaaggagagtgctctgtatgcattagattttagatcttccaatctctctgctactgcagatctcaggaagggactgtaggtttaaaacttgggcctgcatggaagagtccctgagaactcggtaagaatcccaggtggttggtgagaaaccttatgtcacctcgctgaatgatactggtttgtaggacactgagttggtcacttcagcattcgtgggagtggagaggatttagaatgaaactgtcaacctctgcaaaaatttaaatgctcttagaaaagttctagagttgaataaagtgtggcagtttcaataataataaaactaattgttattaactacttagtctgggtgagacaacataccaagtttatttttaattgacaaataattatgtatatcgatgggatatagtgtaacgttttgatatatgtttacattatggaatgactaagctaattaacatattcatcacttcatatacttatcattttttgtggtgagaacttttaaaatctactcttaacaatttaaaaatacacattattattaactgtggtcatgctgccatgcaatagatctctaaaacttattcctcctgtttaactgaaacttggtatcccttgaccaacacctccctatctccatgcaacaaattaaggtttttacaggacacatctcatttaatcttcacaacaacactgtgaggtaagtatagttattatacccaatttacagattgggaaattggaaccaaggaaagtaaaataacccccaaagttatacagttaataagtagcaagctggtacttgtacccaggtctatttaattagatcaggttctgtaggggagagaagccaaattcaaggaaatttatttggtcagtgtttagggacgtaccaagtactggttcaaggggctctgatgagggtgcatttgtcttaaacctaagagagcaactttgtcttgggaccttgggggccagagtttcccagagaaatactattggcctcagattgaagttgtggaaaatgatggtatagtagaaagggtaattgggaaagacagtaatggcctttgttgtgtgtgcaaaccgagaccagacagaattgtgcaaagtaacactgtgcacctataatttagcttaatgggtatgtagtgcgtctaagattctcttgcacaagattaaaattgttgtacatgttaaatgtttccagatggagaggcctccaccagagccaggaaggggtggcggggggagggggtggaactgttagaagggaagcggaagagcagcttgaattggctactatggaggagaacacaagggaaaaaaataggtacaaggaaccccctgtccacaatttttggagcaggaaccccctttccctgggtggtagtgacaaaagcattcccatgagaagtggcctctgttgggagcctagaaagctcgattaacatactgaaaccacctaaggaagaataactgacccacttcctctctcattatcccatcctgggcccaccttctttctgtgactccctaagaacattcccctgctatgttctgtctttgccaggcgtggatctttatttcacatttgggttctaaatttcaaacccagctcagtctggtagttttaacagttgtagggggctgggggtggaatgtgtttgaattctgagaaaaagtgcgcaaaaatcttcttggaaatcagcattgttcccattcatcattgtggctcctaatttgatttgatgagttaaatagaaataaatcaaaaacatgtggatcaaatttatgttaaaaaaaaagaaactcacaggagtttaaaaattagtgaagggtttctagccaaacacattttcagtttcgctgaacacaaggcgctggaaaaatctcgagtttgccaaacccaaagagcagccgccaggtttgctgagcttctctcaaaccttccccagtctaaggcagggatttctggccaagaamtgaattccaagagaggccctcaccaccagtcgagcacaggcctgttgtctggaggtgtgggttgagtgtaggggatgttttgactcccctctagcctacagtgcctggttttttctgcctaacagcatagagtgcagcctctcccccagcataaggaaaakgttcccagccaggtcccccatcctcttgcttagtgaagtttgccattaaacttttttatactgtcctgaaagagttcagtggagaaggataggatttgttaactcaaacgcactggagcccrggctctcctcacattcttctttctcagcaattctcccagtcccagtccagcacacatctcctgttctgtaactcagacagcccagcacaggctggcagcccaaaactccagatgttctctgtgccacaccccttcttggccagtgacaggccctccgtagagctaggattcttcttaatttcacccttctttccagcctccactcaaagactgtgctgttgcctttagccccattttgggctcttggagaaacaaggccctctctatttggggccagtttgcggagccagctctctcctcagctcagcaagccccctttccgcccctgctagactgaaccacaggggcccaattttatttctgcttcatttttcctttccttggttatcaagattcctatcaggtattttttataactccagatcacttatttagctcactctccattttctaaaatctagattttctttttcttttatctgaaacagccttctttaaaagaacaaagaccttagactgtagtatctgaattccaacccagcaccagtgttaccagaggactgcacaagcaatcacagcctgtcttttctcttccttaaggtggggtaaaaatccctatgttgacmagttgttaggaaaagcaaatgagaacatcagtgaaatgagagcatcagtgagaacaagatgtggkacgtggtcagagatagtaaatattagkcttccttccccacyggcttctggaggtcttcacacttaaagattccttgtattcactttcatattaatagagaatgggccaggcacagtggatcacacctgtaatcccagcactttgggaggccaaggcgagaagatcatttgaacccaggagttcaagaccaacctgggcaacatggagaaaaccttgtctctacaaaaataataataataataataataataataataataataataataataataataaataataaactctcccaaatgtagtatctataaataataaatttataaataataaattagtggtacctgcctgtagtctcagctactggggatactgaggtgggaggatcacttgagcctggaaggttgaggctgcagtgagccatgattgtgccactgcaccccagcctgggcgacagagaaagaccctgtttcccaccacccctccccatgaaaaagagagagaatgaaggccaggcacagtgactcacgcctatcatctcaatgctttgggaggctgaagtgggaggatcacctgagcctaggagttcaagaccagcttggacaatataatgaaaccctgtctctacaaaaagtttaaaaattatccgggcatagtggtgcacacctgtaatctcagctactcaggagactgagaggccagagaatcacttgagcccaggagttcaaggctgccttgagctatgatcacaccactgctctcsagccttggtgacagagtgagaccttgtctcttagaattcctactttttttgggattcccccattttctcccatgaaaacatgaataatatttaacatgtttacatcttarcatttataatcttctgattctgggtgactttttgttcccaagccaaaatcccatttggagaaagaacatattttgttgtattttgtgctttctacagtctggcccattcataagaaacaatattggtgcatactgacatgggaaaatggctgtgccatctgaagtgaagcagaacatgattgttcatacaaagagagtgatgatatgcagaaaaaagcatatatgcatggccgaaagtcttgaagttttaaaaaatggtaacagtaattctatttggaagaggaagaaaaatttgttttaaagaatttcctggacacctcaaaaaaacctggaggccatataatatggtggttaaaaaacttagactggtaatcagtcttgacttcaagctctatcgttgcacttgctaagtgaccttgaaaaagtacttccctggatctcaggttcctgtttggtgaaaaagaggacaatagagttgttatactaaggaaaccaaggaaaaaactgaatgacatatgaagtacttaacaaaaaacctggcataataaatattagttcctagctcttcttcctactccattacaaccacaaaatttcagtggttctttccataggtatcatgagtccggtggtgtttactgagtagagcactggggaacatatcttcaaggaattcaaatttgtggctagttagatggttagccaaagaaggatgagccataaagcatgtgtttcctgctttctaagggactaggggatttggatataggagggagaagtatatcatctaaagaaaaagagataggacaatttctttttttaaagaaaggaagaaatcgtctagtgtgaaataaaatttgccttatggggtcatttgagtttgaaagattagcttgaagggctgttagctctaataaagctaactgccccagaggtccttgaactggacctaaggcagtagataaggtcttcagcaagaggaatatcttagccgtaaccatgggagatgggggagctgcagacagggcagtcattgcaggactgagactgtggcagtgaggagccgaactggggaagggaccgtggaaactaaaaggtggcataatgaggcagactggatttagaggatgaagccaagtaaaatttaaaaaacaagacttcgctttccagactatgtgaaaggaagaatggtggtacttgttgaggtctaaagaggaaaaaatatgcttttttgccgtaagttttctgaaccaattaaaaaaatagacactggagtctggggtcaaaataactttataactaataactagtataaagttagattggtttggttaaggtttggatttgagaccaaaatggagttctcattcctctcctctagcccccacatcaaacccatggaatagctgtgggctctcatctcccaatcccagagcgggagggtcttcctagtatttacctgctggargacaggagcagagggaacaagcaccacttacagacaaatagggaccagagaaataactccagggagttcagtgtcccatgtttcatctttccagtcttattgggatagagggcatwcaagagttatatcccaacacaattcctctatgccttttttggttacaaaacaaacctcctccaaaacttagaggctttgcagaacaatttctgattctctttcatagttctgttggttgactgggttcagctgggtggctcttccttaggacctctcacatggccaaagtcagatgtgagttggggctggggttgtctgaagacctgtctgggctggaagtccaagatggctttctcacatgttaatgttggctgtcaactgggagtttagctgaggcagcactacatgcctctccaggtggttttgacttcccagaacatagcagctggattctgagaggaaatattctaagagtgggtggtttaagaatcccagataggcatggtggcacgtagctatagtcccagctacttggaggctaaggtaggaggattgcctgagcccaggagctcaaggccagcctgagcaacataggtgataccccatcttgaaagaaagaaaggaagaaagaaagaaacagaaagaaagagagagagagaaagcaagagagagaggaaggaagtaaaggaaggaagggagggaggggagggggaaagaggaaagagggaaagagaaagagagagagagagaaagggagaaagagagaaaaggagaaatgaaaatagtcccaggcagmatcagcaaggcttcttaaaacctagcctaagaagtcccagaacatcatcactgtcacattctgttggtcaaggaaatctctaaggccagtccatgtttgaagttaggggaattggatccacctcttgatgtgaagaataacatgcttgtacagggagggaaggaattgatggcagtcatcctggagacagacactgtatcacagccttcctgtagaattgccctccctgctgtgcaatcttgagggtgaaagtaataatcatctgtctttccaggactaagtaatataagttgatgagttagctgtttagctaattaagaaaggaaatctactttgcagtgtaaaggcatatttacaaagaagctaattaaacttaagtactggggacctgcgctcagatcagaccctgtgagttctgattgttgccggaaaatgtagacaggctgttccagatgaagaggaggagccgggttgcaatcaggaaacatttatgtaaacatttctcaaaggaaagggacctcagcttccagggttccagtaatatgttgtaatttttttctcattaataaacattcacattagtatctaaatttgtattcataattacttttgcattcttgrgagcccccaaaatttcataaacctcagacctcacaaaacatgtatccccctgcaaaaagggaaaatggggagttctaaggatactttgttaggctaaagcattcatatttgacagctttcttgatccactctccagtcctgcatatctgtaatatctcatacttctgtgttctcaattagcatggcacacccttgggggcgatttgcctcccccaaccaccaccaccactttgaatatttttggggatgaaatcacattaagaatatacaggtggccaggcatggtggctcatgcctgtaatcccagcactttgggaggctgaggcgggcagatcacgaggtcaagagatcaagaccatcctggccaacatggtgaaaccccatctttactaaaaatacaaamattagctgggcacggtggcatgtgcctgtagtcccagctactcgggaggctgaggcaggagaatcacttgaacccacaaggcagaggttgcagtgagccgagatctcaccgctgcattccagcctggcgacagagcgagactctgtctcaaaaaacaaagagtatacgggctgggtgtggtagctgctgcctgtaatcacagaactttgggaggctgaggcaggcagatcacttgaggccaggagttcaagaccagcctggscaacatggtgaaaccctgtctctactaaaaatacaaaaattaggcatggtggtgcatgcctgtaatcccagctgcttgggaggctaaggcacgagaatgtcttgaacccaggagatagaggctgcagtgagctgagatcacrccattgcactacagcctgagcaacagagtaagactctgtctcaaaaagaaaaaaaaaaagtatgcagaagctactttctttgaatctggtatattctcaccttacatgggagagacttcatgatgtggcctgtccatctccatctctaactctcaggtctggctataaaaatcagttgtgtgcatctgtgtgtcatttacatggcttgttctcatttggccaatgacttgagatttgccaaccagctatttgaataaaacttgagatttactctgacacacaccaaaaaactaacttagcaactcacaataattcatggtcacacaacagaaaccaacctgtatgtgtcaaacatttcctctcattggagattgttgccctctgatcccctcctgaaaaataataatttcatttggatgtttcagctaaatatgctatatcttttttatatttattgcattaatgcatataagaatgtttagaagttggtttcaaaaatgcaaatcctgggcatggtgactcatgcctgtaattctagcactttgggagaccaaggcaggaggttggcttgagctcaggagtttgaggccagcataggcaacatagtgagaccctgtctctaaaaacaacacaaaacttagccaggcatggtagtgtgcacctgtggtaccagcttcttgggaggctgaggtgggaggatcgattgcttgagcctgggaggtgaaggctgtggtgagaaattgcaccagtgcacaattgtcaccacagcctgggcaacagagcaagaccctgtctttgaaaaagaaaaactgcaaatccctggaatccacttcctgaaaatctgaatcactagatctgggatgagttctgagcatttttacattttggataattctgaagtaagtgatccaaagaccactgtttgagaaacagataatgtcacaggatccttaccgtgttgcttcaccagccggaaaccactgtggctggtggcatctttgcccaagttttgctygggcccgctgggcctgttctgcccactcagcctggcaggctgcgctcagcttttgctactggcccagaccccatgcctgccaagagtgagccaggcacagagcagtgaggggtgtgtgagcgagtaagcaagtacagggttcggccactacacacatccagacataccacctttggcaccccagcacggctgaaccaggcacaccacaagcggcttccactgtgggcactggggaacatggtggtgcctgaaagcttggaggtaccaggaactgtagagccccaaagagggcatcacaaccctggctcrgggagctcctaagtctgggttccccaaagggccatggctctttcctcctctcttctctcctcctcattgcctgcagtgtggcaagagggaggcgtgtttcagcactgtttgtgttacaattctttcagtcccgccattcagtgggtcctgagttcttgtcccacatccaggaagaatgaggtacatgggcaactggagggtgagcaaggtgaagaggtgctttactgagtgatagtacagtgctcaggagacctgaagtgggtagcttctttccacaggcaggtcatcctgatgagtgcagccctcagtggagakgagacccaaaatgggtagctcctatctgcaggcaggttgtcccattgtctctgtgagtctggctgagtctggggtttttacaggcttcagaagggaggaagtgcaagctgattggttcaggggtggccatgagtgggccagaaaagcaccataagctctcactccaggctgtggactccacctggaactgacagcctggctcccatgcttcaagtcatccttggcttgaagatgctgctttaccgcggacctgcccctttccccccaggaacctgtgtgcttcctgctgccatcgacatgtcatccacgacaccctggctgtctacatcaagaggtgcctgcaggcccaccttgagccaccctcagcccttcccctcggcctccctcccatgctyggtggcgaccaaagtccagaggtggctgagatggcagggagctggcatgtcagtgctgccccaagcccccacacacccagccgggtcacgacagtgaccaggctcagcgacaactttgctccacactggagtaggcactgggagctgagagaggccaggcagcaggaacagacacttccaagcctgcaggggcagggggacttccaagacacccaagagcatagggatgcctgggtctgcagccatggttgggtggctgcacctgcacccaggaggacagggctcctgtcccaccaacttgggagctcccacctgttcccagctcccaccagctccatggagcacacaacastggctgtgccacccctgctacagccagcatctttgcagcagctggtccagacaggctgctactgccatcaataagctgttcttcactgtgctgcaggaacttgctttacaatcctaaaatgggtttgtgatgcgtccatattgtagtctcaggttgtgtgaagcagcaccttcaagccagggatgacttgaagcatggaagccaggctgtcagttccaggtggagtccacggcctggagtgagagcttatggtgcttttctggcccactcatggccacccatgaaccaatcagcatgcacttcctcccttctgaagccygtaaaaaccccagacccacaatgcatgtggctcatgccaggctggtgggttaaggatatgatatacctcattctgcacttgaacagctatgttctgggcttcttgctaccagaacaactgcaatcagcgggattgactttgtcacacagcaaatatcccacagtttacccatggtgattgtatctccccttctaaggcagcatgcataatagcttgctcacttgctcttgagatctctgaaaacctgctgtggtgaagagtcctgtgaagtagtgacactgattttttcagtcccaatggccagaagtagcagtcattttattatttgtcaggtgaccatcttaacccctcaaccaggaattttcaagaatcaaaggggacactattaataattatgctggaaaaacagrcgcaaatcaaaactattggagtaaacagggatgtatggtcactctctgcctcacctgccttctgggtggacttgaggcaacttggttcatctgttctgcaccctcatgtttgcattcacaggctgggatttcttctgatgcttatctttgcaaatgggcatttttgtgaagatagacttattcttcaaataattattgagctatgttgaagcccattcattcactaattcattcaatggtcctttggatctagtggtgaacaaaccattggaaacccagagaattgtaacgtgccaggccttgtgtgttaaaaaatggaatgtttatgcaatagcagctaggcattggttataccttcaggctctctgcacaatacctcatattttagctggtttagaaagaaactttttgatctgttatatcgtatctaccctccaaagtcaaatgtttggtctgtagactccaaaaaacaaactctcaagagtatctgtggcatatttcaagtataaatttatacctgcagccaaaacagctccttttgcaatagtatgagcagccaacatatttctaacacttcagtgtcactggattcacttgcagcccaatgttctgaagtcctgtgatcagttacatcaaggcctgatgctgtgaggagagtcagaggatgttggagccatgagcagccccattggccacctaggcctaacctctcatttcacaaacagagacaggggagattggagaagtccagcctcaccctccccactccccaggggacatccagtaccacagccaaaccaagcaaggtaaagctgcccaaacacaccagccctttctcacatccccaggctttagcccctgcagcttcctcttcgtgtaaggcatacgatgtccagctcgtccatccaaggaatcagtaycccatttacctttggtgttcccagcagatggtctgtaagctttgaaactgaatgaataaagtgattttgcctaatgcagaggtgggtttcaaacccaagtcttctgcctccaaattcagtgtttgtttcatgacatcaagtaaagtagatagactactacagagaatttgggtatagtcttggtggcctgctggaatgccaatcttgaaatgatctacttggtttatagggctgcaggaagtgtgttggtgttttattttcttcttgtcataagtgtcatattcaaagatccataggttgagctgttgggttggacacatgaaatagaggggacaagatttcatctctttatttcccaccaactaytggcagcctttaccttgggaaccaccttggctatttctgccaggaaacactattgagagctccagtcactgctgttttaaatgagactttgggaattgaatcccagtttccctgagcccactcttaatcctttccttctaccaactagacgatattcagatgtggttgccctgagatcagtgccataaaagaattaaaattggcagttcccttccacattatttgatcttaattacagctttgtgagagaagtagagcagttgttatatttcctttttcttgtgtttttcagtttttgaaaaatgatttcagagataggaaaattgagcgctaggccaggtgcagtggtgtgtacgtgtaattccagcactttggacggccaaggtgggcagatctcttgagctcaggagtttgagatcagcctgagaaacatgatgaaactcgtctctacaaaaagtaaaaaagtataggtggtgtgcacctgtagtcccagctacttgaaaggctgagatgggagggttgcttgagtgtggcaggttgaggctgcagtgagccaraattgtgccacagcactccagcctgcgcgacacagcaagaccctgtctcaaaaaaaaaaaaaaaaaaaaaaaaaaaagagtggctcttctcaagtcacaaagcttgttagaagcagagacctgaagcaaggcttctgataacaagggcaagcctctttctcttccacaaagccagtcctgagctgcaggagctcattgtcctacattgagtacttaaaagggaaaamccagtttggagaatctgctgaactgatcaagacacaaaagctgtgagggcatcctagagaagcggcagagatttggcaaatggaagaattgatggattctttttaaaagtagctttaagaagccagagtcagcttataggtgtatgagccctcctaacatgccaccaaaatatcatcagtaataaggcaaagatgggagcaagtattacacaaacgctgaaacagcagcctgcagccgagcactaagtggaggtgctgtattaaagagttgcttgtcacaggctcctgtgtaaaataagtgcccaatgttgacattaaggacatctctaagtgctctgaagctgagggctctgtgagagcagtcagcacttggctcattcagagcacattagtcaaggttcttgtttgcccccagacttattcctgctcccccacactgaatgtttattggcagctccactgaaaasaaaggaagaaaaggaaagagtttgccacttctgttatatatcagcacattacatttgtttgacgatttggaagtgtctcagttaacaaactaaatctgttggatcaccgtgaaatgagggggtcttctgaaagtatcttgtatgtttaatttgtttcttccactctccttcccctgtttatgctttgcctcagcaagkatgtcctgaagacctactgtggtttacactatagaagatgctgctagacccacagaggaaatacaaattgggatttctgggccttcagaagttgaattttggtgggacaataagatgaccaaccccctgggtgttcattgtaagctggacaggggtaaaatacccaataaggaaatgctttcttcggttgtgaattgagtgctaggcacagtgctctgttctgggtacaaaaacagataggataagatggaccttatccctaaaggagttgatcgtctgttacagtttttcaaggtgagattccccccaccacttgcatcagaattccctggggtcctgttgaagtatgcagctcagatctgtacaatcaagactcttacaggtaggatctttgaatcttaacttggttaaggtagcactccaagtgattctaaacacatttaggtttgagaatatctagtcttttagaagagacagaaaagtgggccctgaaaggctgataacaaagatgccagcggtgtttcagggccagtgtgctgtttgtcagttgcctgtctcctttgttgtgatcagatcataaggaaagcttcagaagcctcatgaggggatggaacacattcactttttgttcttcacctggttgctctcgcaaaagcaatagtattctgccatattccaggttcagattctgctgagacaggatcagccttgagagtcttccagggtagatcagatgctgtgtatcactctctgtacctaaaggacaaggcacaaagcttcatctctgtggaacaatcagtttcgacgattattcattcagtgaaccaggtgttaagttgggcattgaagatacaaagcagaaaaaaacaatgccaaccctcatggtgtttacagtctagtgtcaggacagggccataaatckatgattacagtttcacacaaaactgacagacaaagatttacccacagtaaagcatataggtaaatcttatattagtgggtgtgaaaggattgtgcctgcagaggaccagggaaaagaaagatggcttctctttggtcctccttagggttgctttggcaggagagagtgacacccacctttctcagccctcccttcttcaccaccagtctaacactgagtaacaggaatccaaaagaaggttggggaggtgcaagaagggacccatgggaaattgactcgctcagatggtaccttcccagagaggtccaccatgacctcatcttctaaratgactctattgttctccttaccatgctggatttttcttcagagcatctttcatcttctgacattgtaatttatttgggtgtctatctcatctactagtttagaagttgtgagaggctttgtcagttttagtcactgtgtccccagtgcctggaaaacgagttggcacacagcaagtatgcaataaaagcgtactgaaggcagcagaaaggcaggtccacacaggtcccattttttagctgctcagattatattgttctgaaaaactgcaagaatctcaaggattygtctggcttttttctccctttcttggtggatgggaacccgggaaggagccattagaaggtctgaccatgtcccccagtcccacttcaaagccgtttctgtagcacacctgtcccctccagggctgcaaagactcttccagatgtctgagtcctggggagcttcagagcccattagtttgatgtgaggcttccaggaacattaagaagctatttaaggaattgaacaggggaactttgaggatgtgggtatggttcgattgagtaaggccaacaacagcttcagggagggaaggtcaggactccggagcccagtggaatcctttgaagcctttgctgctggggaggrtaagcacacagtgggatgacttgcgcggcagtccaattcttctgaaaacatttttgcaaaatgttctgcatcacaggttaatgtataggacacgagttgtaagtggaaagttagcaaagatttttggaaattggctaaagggcaggaaacagagggtggttgtaaaaacctcaaaagatgttaattggggagtgcttcacagaccagggttgtgaccagctttttattattttcatacaaattacatgaagaacggtcttgagaaggattttcatgttggctaattaaactacattagggagccgagcatagaaatgggaacggtagaattagggaaagattacatttattgatggaattgaagagtagcattttataacgtgtgtatgtatcaacccacacccattctgttggccagatttccatttgagtgtggacaagacaacttcagcttgaataacacaacctgtcacatttcttgggtcagcaggaagcactttaaagagggtttggcaccctactcatagggcagactctgaaattaaatggatgttatctgcagacctgaaccctctcttttagaagaagctgcaaggcaaatggaatctcctgtttaactgcaagcataagattgagacatccacatctcaccacctcttatgactcaatattgtctatcataaagagttcaaattatcccaaaaatttattgtaggtataacccaataagaagctaggaatcggccaggcgcggtggctcatgcctgtaatcccagtactttgggaggccgaggtgggtggatcacctgaggtcgggagttcgagaccagcctgaccagcatggagaatccctgtctctactaaaaatacaaaattagccgggcgtggtggcacaygcctgtaatcccagctactagggaggctgaagcaggagaatcgcttcaacctgggaggcagaggttgcagtgagctgagatcatgccattgcactccagcctgggcaacaagagcaaaactccgtctcaaaaaaaaaaaaaaaaaaaaaaaaaggaatcaatcctctaaacactattttttttttaaagactgggtctcactgtcacccaggctggagtgtaatggcacagtcatggctcaccacagcctcaaaatcctgggttcaagcaattctcctgcctcagcctcccaagtagctgggatgacaggcatgcactgccatgcccagggtctcattgttttctttaatttttgtagagataggatctcactatgttgcccaggctggtcacgaactcctggcctcaagtgatccccctgccttggcctcctattagcagtgtctctcaaagttattgtatactgaaagtaacaacacagtgaaccagtacttgaagctaggagcccaggggtgacatttacagtctgtcaacagcccactctaaggaacagtctccacagtcatcataaagtccactgagacgttgattcccttgtgtacaaatctggcccagtaggaatcctctctggccttgctactcggggcccggtctgtgaacctgcagcattggcatcacctgggaggaagttgaaccacagctctcaagcccacccggaactgaattgtaatctggattttagcaggatccctagctgacttctgtgcacattaatatttgagaagctctgctctaacacaccgaagaaccatggaaaataaagcataggagggttgcttgtttctgatacagtgaaaattggaccacattcgtcagtgacctgaggacagaattctgacatttgggactttctggtctgccggaaactgaggctttcatgttttctttaatttggcttaaaaggctgagtgccctctccggaacataagtttagccttaagtgagcatgccttttggaaagaagatgttaaacaccagtgcagtgtactcctgagtgttcctcccttgagcgcagctcatgtgctgggccattagctaattgttaccttcttgttcacaggccacaaaggcctggcgcctggtggctgcttttcatttgagctcattcacccagggccctgtgggtaaacattttgttgtgttctgctgctgggaatagactgtcagcccacaggaccagccccatgccagggcatcactagcctggacaaacctttctaaaacataggaggcttggctttcaaagacctaaacagatttagtctctaggctgaggtgatatgattgtctctagatctgaggtgacataacaatggctgtgccataggacatgtgccctgacccatcgctttcactcagacttgcatttagaaaataacaggaatgggctgggcatggtggctcatgcctgtaaccccagcactttgggaggctgaagcaggcggatcccttgaagccaggggttccagaccagctgggacccagctggtaaaaccccatctctactaaagatacaaaaattagctgggtgtagtggcatgcacctgtaatcccagctacttgggaggctgaagcgggagaatcgcttgaaccctggaggcgaaggttgcagtgagctgagatcacgccactgtactccagcctgggcaacacagtgagagactccgtctcaattagaaagacagaaaatagagtaataagggaggctgaaggggattgattaawttgacttgcttttcttctcagttcatgagatggtataataggcagggattgattctgccaaattaggagggaagagcagtgaaaccccaaatccctctccacacctccctatccctccccwcccacattgaagtaggatggacatagaattgtggcctagcccaagagaggcttgatttttattcttactagttttgcctaggctgcctcattctctttccagagcttaggtgggtgttgaaatatccaagtcatttaaggtactagacatgaggaaagacttaagtctgtcaagacaaagacatactttggaggttcagagtgagcgtgtatcttctgtgagcctcagttgaggctcctgaaacatgaaggtagtgtcagagcccccatccttatgtgagaggagttggctgcttgggcctcagagcaggtaatgcaagaaaggtttcaagtgagtgcattaaatagaatgtctcgttactcctagacaaatacatgtagagcagctactaagaatcctgaattggttttatctcccccacagactgagacctcctctgaagcagaaaaatcagatatttaactttgcatttatagcacttggcacagggtaggcccttaataaatgtttgctgaatgaatacgcaaaggaagacagcaaacaagctcactgctgatcttctggctagcataaaatccacttataaatcatcattctgactatacctcagacattacattttcaattaatttcttctatgtcaattactaagcccaccgcttaggctcattcacaaatgtgtattaggccccatgtgtctatatagcaagtctccaagggagactatccctggccacacagctcgctgtataatcaagtaccctacaatgcatatctgaaaaccactaggstgggcaggaaaagggaaggggaatcagaagtcagtttgttagggagaataatatgcttccaatttcttaagtggtagtattcttgttttttttcaggtaagaatctacgatctttcaaaatatgatcatggatcagatgatgtgctgatcttggccactgatggactctgggacgttttatcaaatgaagaagtagcagaagcaatcactcagtttcttcctaactgtgatccagatgatcctcacaggtttgtgcatttctacaattgtagggttgttcctcaagcattcttccatgacatgcctgaaattaataatcatgcaattttcataattcatgacttagaggctgatatggacggtacagtaaccaaactgcagaagggattacctttcttgtaagaggtactttccagccaggtgtggcgtctcatgcctataatcccagcactttggggggccaaggcgggtgaatcatgaggtcaggagttctagaccagcctggccaacatggtgaaaccctgtctctactaaaaatacaaaaattagctgggcatggtggtgggcacctgtaatcccagttactcgggaggcagaggcaggagaattgcttgaacctgggaggtagaggttgcagtgagctgagactgcaccactgcactctagcctgggtgacagagcgaccctctgtcacaaaacaaaaaaaaagaggtactttctctgccaaataaaaatcccccttaagttgaacgtagatacaagtggtaaagaatttgagtgtttgtttaggcatttcagcggcatacctttctcacatttttacttcctctaagctatcctctaaagtagaaataatcccatttytgatcctgttgatgagastgatggcaaatgcaccccagcactgatagtcatccattggagaattgtttcttttgagaaatacttggtaagaagagaaagatccaagttaagtatttcttacagtctagcagcagtgtaaataacctaaatatccttagaagactctcagaaataaacagaaactacctctcgagaaaggcagctttatctagaacacaagtcaccatgagtaaaagccagcaggaataacagaggcatcagaattggacctgtaaatacttctttattggatttagcagtcaaaaatataaatatttttagctgggcatagtgatgcatacctgtagtctcagctgcttgagaggctaaggcatgagaatcgcttgaaccccggagacagaggttgcagtgagccaagatcgcgccactgcactccagcctgggtgacagaggaagactcggtctcaaaacacaaacaaaagaaagccaacaataatataaaatattttaacatgcttcagaaatttttttttagccaagcatggtggctcacacctgtaatcccaacactttgggagataacgcaggaggatcacttgagccacaggagtttaagacaagcctgggaaacatggtgaaaccccatctttacaaaaattagctgagcatggtggtgcatgcctgtggttccaactactcagggggctgaggtgggattgcttgagcccaggaggcagtggttgcagtgagccaagatcgatcacaccactgcactccagcctgggcagcagagcwwgactccgtctcaaaacaaacaaaaaaatttaaagcatttaaaataggagtcttaaaagagactaaaaaaatgactaaacaatttttaagaaaatggaattctagagatgataaatttaaaaataggaattaaaaattcactgaattaaacagattagagctagttgaagagaacactggtgaactagaaaattgatctaataaataatccagtagatggcttagacaaagagaaaagacaatgtgaaatgagattaagagactaaaaagatggcctaaggtgctctaaaagaattccaaaaggataaactatagaagatgggaagaagttccagaattttttgtcaatactaaacctaagattcagaaagcctgacaaatctctggaaggagaaataaaatagtgaaaccgaagaaaagccgagtgctgtggctcatccctgtaatcccagcactttgggaggtggaggcgggcagatcacctgaggtcaggagttcaagaccagcctagccaacatggcgaaactcccatctctactaaaaatacaaaaattagccaggcatggtgatgcatgtgtgtaattccagcyactcaagaggctgaggcatgagaattgtttgaacctgggaggcggaagttgcagtgagttgagatcacgccactgcactccagcctgggtgaaagagtgagactctgtcccaaaaaaaagagaaagaaactgaagaactttaacccctttgccttccaaaaatatattaaaagcagccaggaaaaaaaaaaaaaaagaagacattcagactgacagccaactttcaaaagtaaacggtgccaatggtgggattatatcttcagctggctaagaaaaaaataactgtcaatctaggaattttagatgtagcaaaactatcaataacaaggatgaagtaaacaaattttcaggcaaaacataaactgatacatattaccgccaactaacctcttctgaagaaatttctacagggtgtgctcaggtaagaaaaggaaatgatcccacaggaaatatctgagaagtaaaatggattattaagctaaggtattagtaaacakgtggtcatatttaaatataccttgactatataaaacagtaataagaatgtctaatgtgtgggttaaaaatgatagaactaaaatattgcataaaaatagcgtacaaattgtcaagggaggggtgttagctcacatgctatgcttcttttgagaagttaatggtgtttaactttaggctttaagtaaacaagttgaaatagctaagaaaactgttaaaataatagaaagggtaacttctaaactagtaaaggagaggaaactcacatggaatagaaamcaaacttctaaacaacttatgaatcaaaggaaaaaattataatgaaaattagaaagtacctgggcctgaataataatacatatcaaaactgtaaaggctgaaattttagcctttttttctaatttaataaactaagcatagatgaagactccattcacctctgacctgccagaaatgactattatccctctatgccatgagctaactttatccaaatgtccccctgtgtcacagggaacctctggccacaagatcctgatttctggaaacagagaagaaaagaaagatacccttaaccacagagaaagatatttctcagagtgaggccctaagggctgacttgtgttacttggctagttcggtctatattcttygcataaatgtacacagaataattttttttttttttttgagatggagtttcgctcttgttgcccaggctggagtgcaatggcgcaaatctcagctcaccgcaacctccgcctgccaggttcaagcaattctcctgcctcagcctccctagtagctgggattacaggcatgtgccaccacgcccagctaattttgtatttttagtagagatggggtttctccatgttggtcaggctggtctcgagctcccaacctcaggtgatgcgcccacctcggcctcccaaagtgctgggattacaggcatgagccactgcgcccggcaagaattcttacaacttaaaggctctaaggagccaaagtgaagctgcctacctaaattgatccatagaatcagtacaattataaccataataccaatggtgtttttatggagcccagcagttctactcttaggtctgtaccctggagtggtggttctgaaaagcacggtcctttgagctacatggcatcagcagcacctgggaacttgttagaaatgcaaattttggctggcatggtgggtcatgcctataatcctaaccctttgggaggctgaagcaggaggatcacctgaacctgggagttcaagaccagcctgggcaacatagtgagaccctgtctctacctttacatatatattttataaatttttttttttaaaagagaattgcagattttcaggccccacctgaaataaaaacyccaatggtaggaccaaccatttgtgttttaacaaaccatgcaggtgattctgatgctgctaaaattcaagaaccgactctcctagaagaactcttgcatcgtcgttcatgcaagaagatattcacagaattgtttttattacagaaactggaagtaacttgcgtgtccagtggtgggacgggtaaacaaatattgggatactttatagcacctcccccacccccaaaatgagccaaagctgtgctcattaacagggaagaatctcaaaaacataatgttgagtttaataagccatagaggaatacatacattagaattctatgtacatgaagtgaaaactaccaatatattgtttagggatatagacattaaaactataacaaaaaccaagaaaattggcccaaaattcaagataatggttactttgagaggagaagaggcagataccaaggggaatatatgcttgaggcctgttgggtttctaagatatttactgataatattctgttccttcaagtagatggcaggtacattgttgtttgtgttatttttaaactataaatggtatatgagaggcagggtagtctcgtggttaagagcctgtaatctataattacttcccgagttgaattttggctcttccccttctagatttaggatcttgggaaaatttcttaactcttctctgattgttcatatgtaaaatggagattccaacagtattaacctcatgcatatatattattaggtgaagtgcctaatagataataagcactaatagatgtgtgtgttgttatgtctcacatatttcacaacagaaattcaggaaacgtgaaggtagaccatctgtctcctcctcgaattgtctgatataattcagctcaggtgtggaggaattgatggcactataattaaatattcttttatttgaatttgaatgtgtttttcgcctttcaagtttcatgttatgtatcccacttgttagcaacattctcatgttgatttttctctactatgattatttttataaagctttgcaaagccacctgccagttatgcattaaaaggcactcagcactttttttctgtgtctaagctggcttggtcttgcttaccagcctttctccagagtgataaatctgtacgccaaggagtggtaacctgtgggcagcgtgcacatgccaggtcagagcaggctcctggggtccacgagaactgctgcctacggaggcagggttcacaaggatctctttggaacaaacaggatgggaaagaaaaaatgttttctgtatgcctttyggggaagatggcaaaccaaagcaatagaaagaatcctatatcagatggatgaatgaatgaaagggaaaattgcaaggggaacacagtttatcagcaagaaatagactatcagtctgcagattagacaattatggttgtaaagacaggtgcartggcatgtgcctataatctgagcgactccataggctgaagcaggaagatggcttaagcttgagttcaagaccagcctggacaacacagcaagacttcctctctaaaaataaggaaaaaaaagtgttttaacagacagaactggcctaggtgcagtggcccacacctgtaatcccagcattttgggaagccaaggcaggcggatcccttgaggccaagagttcaagaccagcctggccaatatggcgaaaccccgtctatactaaaaatacaaaaattagctgggcatggtggcacctgtaatcccagctattcgggaggctgaggcacgagaatctcttgaagctggcaagtcgaggttgcagtgagccgagatggtgccactgcactccagcctgggcaacagagcgagaccctgtctcaaaaaataaaaaagaaaaggaactgaagagtcaaggttttcttcttaacaaataactcccattctgatttgttcatttgggaaataccactaaggacctattattttgtgagccaaggcctgctagatactcgtgaagaacacacacctcagctctgccctctttgagtttacagtctggagggattacagcagcattaacctaaagcaaaggatgtctacacttaaacctgaagaataaacaggagcgaggcaagggtcaggggagttggggagaaaaaacatggcacattctgggacccaacagtcagtgtggctgactggtcttggaggtggggagcagaatgtcaacagatgaggtgtgaggggtcagcaggggcccatgatctcatgagatcatgaacgtgaaaattatttgtgttaaaggaagtctgtggtaacgatatggaatttatgtaatttgttcattatgattcacaaccaggaagcattctgcaaaatctgatggtgagaaacaagatgaggattgttttcctaccyctgtgtgttcctttaagtaattacacaatattgggacatcagagaaacttaatttgtttcagactgacaatttaggtcttagccaagaaacctttgctcagaccaatgtcctaaagcatttctccagtgttttcttctagtagtttcgtagtttcaggtcttatatttaagtctttaatttgtttttattatttgatttttgtatatggtgagagacagggctctggttycctttttctgcatgtggatatccaattttcccagcaccatttattgaagagactgtcctttccccaatgtatgttcttggcacctttgttgaacatgagttggctgtaaatgcatggatttacttccaggttctctattctgtcccattggtctatgtgtctgtttttatgccagtaccatgctatttgggttaatatagctttgtagtatattttaaagtcaggaagtgtgatgtctccagctttgttctttctgttcaggtttgctatggctgttctgggtcttttgtagtttcatacaaattttagggttgttttttctatttctgttgtcaaactcataatttaggaatatgtgaaacagtgttctctttcatgtgtttgccatctttgtacatacctgtgtgtaatttggtaggagggcaccacactcacacaccagtttaggatgtctccttgggaggctcatggacaaagagagctcagtcccaagagccagtgccctcccagctgggagctgttctaatcttgtcatgccaaatggaaatatgagtagaagttgccaagtcataatttctgtgatgaggaaaggcccactataattccagaggctctattagcccttccttggccagagagttcctatttctccatatgtagcctgggactacacgtttgcctgtttaattttcagtggagagttgctgggttcaagcctgagggaactgaccaaaggaggtcagcctattgttggacacaaaatgagaagggaaaagttctccccagggtgggaagcctgagggaaggggaatggaacaaagccggtgagaagggtaaggtgcttctgcatctgaggttttgagtgggcctgttttactttgagtcttaccaggatctcccagttttgtctagaaaggaagcaggacaaaaagaggcagggaatgaggcctgagacaggcaagactaggggcttttgtcgtttgattgttgggcttttgtttatgttgcctgtaggttccttttctttttgtttttcttttacctcctagtgacagccattctaaacaaattgccagyattgtcttcctctgttgacatccttcccagcaaggaatttaaaatagcatctccccctccagaatgtgctgtgagggaagaggtgattagcataaagatgtgttctgaccctcacaccatcctctcaggcagagatgggagtaaaaatgagctgtatgatctttctgaccctggtgtatcttaagtccttttgctcttttgaactgtctcaacaaaggaaccagaaaattaaaaggcggctttatggatgagccagaatatgagtgcagtaagtttttctctttttttttttttttttttttgcagtttttacggttttttagaacacaatgtgcacatgagctgtctacccattttcttcgctgcacagcctggcattggggttggtgactctgatggccagctgggcagctctttccacaacggctttgcagttcttggaggaaacattgtgaatgatctcagcacagtaagatttgttgcatggcagcagcacttccggctccttgacgctgtggatcaggaacttccggaagccactgggcagcatgtgctgtttttctgttgctcccataaccaatgttgggcatcaagatctagcctttgaaccttctatgagccctgttgtcagtacctctgggtttctgccagttacgcttaattttgacatattggtcagactggtgctggatgaacttcttggttctttttttgacaatcttgggctccacaaggagtctgaagttggccctgatgccaaggaggagatggcccctctttctttctttcttttctatcacagtttgccctgaattgtagggaagctggcagttcttttactcttgtggggtcacgaaatgaactgttcctaggaaatgcattgcgctaacatcctggagtggggttgctgcaggtaatggaggttgggctgcacagtcctctggttccttataattccagtaaggttctcttttaagccctaaagatcctacatgatttggagaaggcactcaaacctggaaagggttttctgatgcaaaatatctgcaactgactgtcccctctgtaaggctggaggttcagtgggggggtctcctgggaagaatattcaaaacggaggcaaatatgtaaacactcagagaagaagacgcttaccattttgtcagaaaggaataaattgttactattactgaaggggaagggagtgggcaaagccaagaggaactagggccagggaatagctaaccaaacttggaaatgcacatggattcacattcccagtgcccaggcaaaactgtgcaggctttgctctagagcttcatttccccaaaactgtctgtggaaacttcttttttacttaaaaaaaaaaaaaaaaaaaaaaaaaaaaaattcmccgtgttacccaggctggtctcaagcaatcctcctgcctctgccttggcctcccaaagtgctgggattgcaggtgtgagccatcatgcctggccccacctcattttttttttttttttttttgwaacctggatttaatgaccctctgtctccctgccatgacccttgaggggctttttatgcagtatttatgcagtattaaatctgtaagaaccagtataccataaaccctacagagtatgtytctaatgagagaagccttcctgatgtccacacttgtcagtcttcacatccatgctctccttggctcagawagctgkgtgccttggaaggaagagattaatcagtgaaaggttaatagtaaaacaccaacactgacaacaggcgttaattcaagtattaaatgctagtttgcattaccctaatatgaaatttatttttgcaaaatacaaaggttctttttatgaaacctttccatgagttagctgaactaatttcttgcatgccataaggttttcaaaaactatgccttaaatgcaaaaaggaagggtttcctccacttttcaccataccaattactggttttaagaacaaattcatgagtgtttgatctggtgtctgaagactagataaaaatctgcagttttctctcttttgcaatgtttagcacactcagatctgtgggaattcagaaatcagcctgaggtcctggctgtggcagcctctaacagcacacagccaaccaccgtcccatcctgtttagggtgtttatgtggcagagctgtgtggccccttagctgtgtggccacatcaggatgttttacagggcttcccagggaggattgagaaggaaatagtctattatgccccctcgtattgaaatgttactgtttggaatttgaactaaaaacctaccacctaagaaaccagggaaccagggccagggtgcatagaggtggatgaggcctggcagggcgtctcaccctctctcatgggggtggggaactccctccagtctgcagctttgtgtctgctggcagcacacaaactcccaatgagcccagtgacagcactgcagacaacagttgtcgttattctggtgtctcagggtattctgcctgagtggagtccccataacctgacaggggacagaagctggcatgagcagcttcacctgcttaagaactcggttccagagctacacaaggggcatctgtggaccagctctcagcagtgaatctaagatgtgtgcctcttcccaggatgagttgcctagttctgggcacaacaaaggccattccctattctaagccacccctgaccctccacccaccaagacgccactgccatagacccctgccaacattccaaagctgggagagcttttctacctcttaaatttctgaggcctgctcagaatgcaaaggggattcctcctcctgttcccctcacactgtattactgcgggtgtcagcagatggagcctgccttttatatgcaaatatttggaagccattaattccccagttcctgccactactcaccctcttataagaccctgtctgtaccatccaaatkgcaaattgaagttcccacccaacaagaactattaagaactttaagatayggtgatagcctgcagcctgaaattgacttatttttgacactgttgtgctgattcagatgctaaagattcagaaaacagactataagacgtagatgacttatgacaaaactcctggggaggagaaaggcatttaatatctaataaggaacataactaacacttattgacctccgattgtgtgccaggcactgtgctgaatgctttatggaaagatcacatggctgttacaggagccttggaggtctgcactattattgagtaaggaaagaggggctccaagaggctaaaaacttcttccagagccacccatctggatggtgggaaagccaggattggaacctgggcaagccacgcttacacccagagcccttttctggtccattaggaaggaaaagaactaaggacagcaacagaatctgcaaggacaagaggacaatcgaggatttatggcctccttccgcctgactttaagagtcagtggttatgaaaagagctttggccttcccatcgctyttcagcccctcttcctttttgttttccatgcctcccctgctgtcctttctctgctccctcccgctcagagcctgagccctgtggagtttgccaagtctgatccctgcccagcagccattgctttcagcagagctttgctgataaatattgaaagcttcagctagagaagaaaaatgttctcaaaattcaaaacatgtctcctggggagactcttcattaggagtgggcatttcaaactcctccrcagttgtctaatgcagsctggcccagcattcagtgacggcactagggctgctccacacacagcttccagaagcatcgggctccggctgccacacagtcccagttggtgtgtaacagaatccactacccattggctgtctccagctgtaccatattcttcttggctgctctcttggatattttatgcttatacagtatgtatgttttgactcaaattttcttctactactttctacagttctcctttgatggcacctaaatgcccttgtgttcagcctcaataacaaaaccaataaagccttcctgttttaataccaccttaagcactttcactgtcaccaacccagggatccctgatgtaaggtagaaattggagaatacaatgggggcaggagaagcagttcttttccttcagagaaagttgtttgtttgttcttgccccagtcttgacataaagcagcctagcaaaggatttcatgcatttcatatggcaaggtggctccgaagatggatgcaaatgagctctgaaatggccaccagcctggcccaatatggtagctagctgacacaaaaggccttctcccaagagctgagtccccggggttgtgttgagttaatgaatctatgaggaaagctcctgcgagtgacttcatcttcccctaatgctgttgctgagtttcactgcaatgctggtctcctgtggcatgaagggaatgtcaggaagctggtcctagagcattcgtactgtcacctatggagtgcagcatctaacggctcagttgtccacgcacactgctcttggacaaggagggatagacatgcactggagaagccggcggagagaagccgtgtgaaggaatccgacctcctgggaacagggtaggaagaacaggtcctaggaatcttccctaaacttctccctcaggcggggctgtccttacgcttctgaagcacatgggtacatggatcagggcagctgcctgacaagactgaggttttatgaggaggaggaaatggctgggtaggtttaccacacaggaaaagtgtgaagttaaacctcatatggttagcagcggcgaatccatacaggtctgcagcaactcagttcttgctgccttggaggaaagaattcagcccagggacaaaaggcagagtgagagaccgaggcaagttttagaggaggaacgaagggaagtaaagtacatttggaagaggaccaagcggccaagcggccaacttgagagatccaagtgccttgtccggccttgacttggggttttatacattggcatgatttgcgtttcttctcccctgattcttcccttggggtgggctgtctgcatgcacagtggcctgccaacagttgggaggggcygcatatgcagtgtgcttactgaagtacgcatgctcatttgtttttcccttatctgttgagtgtttctggaggaaggccatatgatagttaaactcggccattttgcctcctagtgcgtgtgcccactcgcctatcycctgagaccttatcaggaggctgatcacctgcttcaggtgttgctttttttttttttttttttttttgagaaagagtctctctctgtcacccagattggagtgcagtggcacagcctcgcttcccaggctctagagatcttcccacctcagcctcccgagtagctgggacgacaggcatgtgcccagctaatttttgtatttttttgtagagacaggattcaccacattgcctaggctggtgtctaactcctgggcccgagttaatccacccgccttgacctcccagagtgctaggattacaagcgtaagccactgcacctggccaggtgttttctattgggagactgcatttccctggtgccagctgtgaccaattgttattttaragggtttaacaatggcctgactatcacctgatggtcgccagacattcctgggggagggccctcccctrccctgatcatgtctacctaactgcctactctaacaatactactcctgtggtatggggatcctaagccaaaaagctgaaatgaacatgttctagcactacagaaatccatactgcccctcagtaaaggcaaattttaaatctctttggataacccagggcacatgtgaacaaccccttctgaagaagcacttattcttcttcacactcaccatgaaaaagaataaccaaatacaatagagccttccctccgggccctcaaagaaaacctgggtgtaacagaacaagtttagaagagagttaaacttgtgcaaatagaatcataaggtcagaagaggtcaatttggttctttggacaagaaccaaagagaaattcacaacggtgaaacactgtcattgaaacaaagtaattcactaaatggatagtaaactgctaaagggagttagtgaattgaaagatatcgcagagaagttgaaatctgcaaggtaaaataagatctaataakagtttatggagaatatctasaaaatagaggagaggcaatatccaaaaagttgatggctgagaatttttcagaagttttcagtttgaaagagtaaaactaatttcttaccatgataagtaaaaagctcctttttgttatgtcttagtggtacttcatatcagcaacraaaacacaaaaacttgaaaagctatcaatgacaaaagccatttacctataaaggaatgataaaagacagacttctcaaaaagagtagaagtcagaagtaagcagaataatgtcttcaaactgctgagggaaaataacagacaatctagaattgcataacaataaagctatcagccaaaatcaaaggtwaaaataaagattttcttaatccaaagactaggtgagcttaccactcacagaccattgttaaaaaaattactaaaaatgtaattcaatggaaggaaattaaatccagaagcaaggagtagtttcataaaaagcaaagaagttagtatgttggtttatttatgtaagtgtagattgtaaatgataatgattaaggcaggctcaaaaaaaggtgaattaaaataataggcagtaacatggaaaatgaaagaaggcattctaaggtccttttattttcaggaggacagaaatacgattaacttatatactaaaaatttaacataactgataatagaaataacacttccaawccagttgggggaggggaatattaaagctatccacctgacagaaaacaagaaagaaggaaagaagcacataataaattaaaaacacaaaataagttttcatatgtgtgtgtatatatgactgcaaaatataggtacaggtctaccagtttttgcaataaacaaaattatcatcttagtgactatatrgattttgttttaattagccatgtgctactaataaaatacacttaaaataatgcaaagtttattagctgggcatggtggaatatgccttagtcctagctacttgggaagctgaggtgagaggatcacttgaccccaagacttcaaggttacagtgagctatgattatgccactgcactccagcctggatgacagagcgaggccctgtctctgaataataatratgcaaagtttagaagtcctacactgccctgtggatttcataattgaacaatatcagggtgtgaaagtggcattgaaaaacactatgatttcttgcctaagagaccaggataccattaactaaggatgatagctggggatgttccactttggaagtaaaaagaaattaatgatcattgagttcttcctaagtcttagttagggcctacaaaggaaattaagaaggagcatcagagagaaggacttgtgctgtgtgtcatggaagcccagtcacaggagaacttggagtgggttatggcatgggagccccagaaagaaaggagaattcaagaacagagatttttaaggataaaataatcagcagtatttgtgctgaacacaaagggttaagcagaataagtattgagaagccacccttggatcaagctttaagaggacagattagtagagtattgggcctactggtaagagacaaaggaagaaaatgggaagtaataaattgagaaagcaagagtggattttccctcaggaagttaagcacctaagggaaaacagagtggatggtgaagagagaascaatctcaaaggaagttatcttggaataggaaataaccatattgaagaatgaaaccttaattacctacagccctcagggaaatgagtttcctgggtagccatcttttctaggtgacctaatccttgctttttaaaaataccaagctaattttgaccatttaaaaaatatgcaaagtcactagtaatagcagcatcagggtggtctcttgttcatctttcatgactctaataaagccagtcatttctccatgactgcaggacctgttgaggcctgtttggagcttaaaatagccataaagagttgtgttttgagttcctgtatctgttttttgacatctttgagtgtctgtctatctctttttccatgtctcatgggtaatgtgctgacgtagtaacaaggtttaagggaggcacatttcacacgtaagtgtgaaaactcaaacatcaagcttatgaactacaaaaggattgagtatcttttattgtcaggcatattttctcatagcataccataattttctatgtctagtcagctcatacctgggttaaggtgtgttcaggcctgataggcaaataaacttagccasgtttctgaacctaaaaagctcaggtgcagactgatcaatcaccaggataataaacatcactctggtgtggctggtggcctttccccatgtgtttatgtctcatatacaatttaatataaaactaagagtaagctggggtgatatggtttggctctgtgtccccacccaaatcttatgtcgaattgtaatccctacatgtcaggagagggacctggtgggaggcrattagatcatggggaccgagttcccccatgctgttcttacgatagtgagtgagtgagttcttacgagatctgatggtttaaaagtgtggcatttccccccttcactcactgtctcccgctgccatgtaagacatgcctcgcttcaccttcaccatccggcatgattttaagtttcctaagactttcccagccatacggaactgtgagacaattaaacctcttttgcttataaattacccagtctcaggtagttcttyatagcagtgtgagaatgaggtgagcagctgagaggcttttctgactatagtgtatgagctgcaatatgtcgattttcagatatttacttagctcttcagccaaagatctctttggaggcctttatttcctgatctcaagaggaggagaacctcaggacgaactgtttgcatcttccctcaagaataacttaaagatttctgcctcaaagatgataattctctcaatacagatagaaaaaattattcacctactaccccatcctctagaaggaaaggtatttattttgtattgactataatatcctttctgctgtagtgtatgttacacttctgtctgctatctgggctgtacaaatagacttgatcctcaaagactgaacaacttggaatcttcacaatcctgggatcatttgttagagcacttgttcttaaataatgtaacaatgatgcagttctcaacatgaaagtctgtgaattttagcaaaagaaatggagaggcttctggggttctgaattccataactcacagctctgaaggcgagactactgaaacattccaagtagagaaaggtcactagcaatatcagggtggtcccttgtaaaaggcccacaggctggcttccaagaggacttatacggtgacatttattatcttgatgatttaccagtctggctcttagcttttcaggttcagaaacygatttaatcaagatacagaaaagagattcattatcagagttggtctcaccttaaccaagctcacaagattgatctgtaaagcaaaatgccacttgacatttaagcagagaaatataactgatggatattcttaaagtaaaaacgactagctcattctttcctgcaggcaggcctacacagggaggcagatcataatcaggaggttctttggtgaacacgaaatcagaataaagctgaatcatatgcttaatggtatagactaagaaaatagtccatcccacaccaaatatgaccctgccagtggaactaagttcctttgaaggctgtcaactatgactccctctgctctggtcagtgtttggatagacacctgccaatgttttgtctcatttttttatgcctcagggctaacccaggcccatacccacccaaatcacttcccaagttagtctttctcctagatgttaatactttcccatcagcttacagtgtcattctttctccttaagcttacagtttaaatctcagcaatcttattttcaaattcttaagggatcccttgctgaacttacattggtcaagaggagagggtgacgctgacaagtaagcagctcactcacaccaaggcttatcagtcatttacaaaaaaaaaaattaaataaattaaaaaaaaaaaccaaaaaacttcacattcttgctatatgcttatgccaggttgtattatttttaacatttttccttaactcacttttttaaaaaatttattttaaatgatttttaccataaatagaaaatgactattctttgtcacaaaagcaatataactctaaaactaaatatattgaaaacaaaagttctgatttttcccatgtactttttaagctagataccatttgtcatggaaagctctgagcttgagcagctctttgagctatactagcagcaaactgagactcccctcaatgtaatcaatcaaaaacatcaaaagaggactgagsaggtgaataatgtaagacattatctaatgtatttagtgccttatcccactaccatgtaaacaataatctcacattaggtgtcctacattttgggaaaagatgaccttgtctttttcgtattgtaagtgtatttgaaacttatttatacaactgtagtgatgcctcccccttcccagcctcacttgaccctggcttctgtctgatgctctactgactgtctcgttcctggttctcctgygtaggtacacactggcagctcaggacctggtgatgcgtgcccggggtgtgctgaaggacagaggatggcggatatctaatgaccgactgggctcaggagacgacatttctgtatatgtcattcctttaatacatggaaacaagctgtcatgaaaatggcccaggggattgggaggacagaggggaagaaagctgggatgcctcttggcaggacggaactgggaagtgccccagctgagttccaagtgatgcagtctcttcccagcccaagcggggagttcatggccaaaagactatgcttcaagatgaccctttggtttccatttcttctttagtaacaggtcaactcaacaagagcaaaacacaaaggctgctaccaagtgttgttgtatttcagttcctttcataggcctccgaggtggccattgactatttggggtatayatgtcatatttattttatctagagtagctggggcagccattttcaggtgtaaatggcagaggactcttcagcctgtcaagctgccagcttatctacgggttaaaaagtgctgcattggaaagtagggggtcatgcctcaaaatgtaagtaagtgcccaccttctaggaagcctgaggtttatttcagggattgccgtctgccccccgccccccttctctttttttcttctctgtttctattcttttatggcagtggtggagtgaggcagggatttttttttttttttttcgtgtttttgacattccttgaatctgttttttattccccttccacagaacaggcctgggactttccaacaccctgctaaggaagttctgtgtccaagtcccacccaggctgggttgtccccacctcctccagcccacacagcccaggcagcatccgggccagtgccctgcatgacagagggtctttgttgtgtaatgtttgttcccaagttgcattttctaaccgaatcagtgtgttttcatgaaactgagtgtttctgtggaccagtagttcctctgttgtcttcagtggtcttcctgtgtggctcaagggttctctgtgagagtctggattttcatttctggaatggctggccccatcccacttttctgtatcatggggacacatataaagcagtgtttaatagagcagtttaagaagttgcttgcatctgttggttcaccatggctcatctggggaccattttggattcatgtttcatggcttgtgactgtccccaagcccactccaaacaaagtgtaaggatcagagttctgtcaaggagcagcagttctgctctccccatcatctttgtgcaaggcccctcggggggcactttaataaaagaatttgaaatgggttgactggccattctcatgctgtgctccctgtctcttctcttctctaaagaatcatgtcccagctcctcaaggtccctctatggttccacatctgagtgttcgccacaagagcagcagcagcaggcacagtgcatgccatatctacctgctgcttctctgctgggaggaatggccaagtagattataaaactcacttctgtctcttaggcagacttgtacggccacaaaattacctagtcttcttcctgctgagctactgaggtattgccaccattttgacaactttgagtaattaaaacactcttctgacccaaaaaggaaaaaaggtcactgacgtgacccccccagcatgctagagagctaattccagttctcatatttgtttgaatttcttcccagaggagaggataggaacctctcctccagggcagtaaatcacctgcatttctggagttgtcggtattgtattcgaaaaggcctggagcccctcctgctcaggaaagaactcattccagggtgtggagacagtgccgtctggcaggtgaaatactgtgggaattcacgccaccaggtgtttgtgcaagtgttggcctgggaagaatgggacttcggccttgtcaggagttgtcttcatctgcagcacgtttcttcctcctgcagtagatcttagctaccccagatatctctatggagagaagtttgtggaaaatgctttgcttcgtggcagagtctgatgctgtaggaaaaccttcgggcatgtgacagcagtgtggtccactccctgttctgccctggcgctcagagtcatgtgtaagtaggaaacctgagcaagtcttccgtggaggaccctgagctgccgtctttgggatccttcctgtgtccccaccgtctttcatttatttgctttcctgggcctctatctgggccctaccttgagcttctccagttttattcaagccaccagagtaagaatttgggtgtagatgtcacaactaccttctactcaattcaccaattcatttactgctatggcacgtctcaggaataactctagaaacctctaaatcgaaatattataaaatcttgagcacttagtcctgctggttttagttagaaaggcatccaggaattgttttcctacgcccccttgagtggaaagatcttagttagaagataaagtcaagtttgtgttcaggggatgggaggaagactataaataagatgaagaaatcaaaagtaggaaacatgatgtaaacgaagcatggcagatctgtccagcactgatattgctctataaattgagcttactcagttttggccttatttttttacccaggccccatgtcacccagtcctaaaacagtaaccgtgtctacataacgggttggcccctggtgcatccctggaaaagtcaaaggacgcacacttcgaaattctgcagaacgtatttatacatggttcagaaatcttgcgtatctgacttatagccaaatctgcttgctcgaatagcctcagaggaagtcttgtttaataaaaaccttttgatttcctagtcaagtctttatggttgtctcgaggggtgtgtggctactttaatgaaaggctttcctgctctaaatctctttgctgggctgggcctcttcagactatctggtgaaactcctttccttagaacaaactcagtccgtccatgctctgtggcattttgctagatgataaccaaagccttattcctgtagccagtgtcagcagtcagagaggtggagggtgtgttctgctgtggttatgcatacctatctgctgttcttgaggtgtaaaaggaaaggtgaaaatcgggccaggccaagtactcagctgtcttaataggatgaagccttaagcagtggaaatttcagttattttccacagtattccattttggaggatttggggtgtttactttttaaattcttgaacaacttaacctccatgaggctttgtgaagtcagctgtgaccaccctcctcttactgtgttctcagtattcattcacttccagggaagaatgacagccacagggagatggtggtgggcaagaatgagagtcccaggatccagatttagcctcagatcttccccattcaggaagggttttccatttaacaagagcactagtatgaaaacattagggacaaatctcccatgtctttgaaattcggattctcctcttgagatccccttcctcacctgccaatcaactttataaggccacaagtggtcactggttttccttccacaggtttgaggttctcagctttccttaagcgacccagcagctccgctgttttcagagtgaatatgttaagctttgatgagattctattttcagtaagttagtgcttctgggacacttggagaaagctgtgagagtcattgtctacgcaaagaacaacgaagctgatcctaaaagtgatccaatctaagaaaatggtaaaacgagctctggccacagcacagaattttatgtgaggaactcagatttttgaagacttaacaattgcagagaaaggttgcagcctgcacaccatagcccacctctctgagcagactttggttttgtgtggtgacgtggcacatgtttgtacactgggatttttcaaaggacgctacgcgagcagactgacttgcctcttctgtgagcactgtggcttttgtcagatggagtgccggtctgcagaggactgctctttcgaatccacagtgttatctgtgtaaatagctttaatttttcttctgtgtcttaggtgaagttttgttcatgtagcaaccaggtagacagtgaccaaataaggctgtaaatgtgctgtagttttctactgtgatgtacttgaaggagaacctgtgtcctctacttttctgatctcccacaagtattttgtgtttgtttcctgagtcctgaggttattattttactcctgttttgcccccagttttctttgttttttttctggagacccagggaggcccatggtggagatcatttgtaaggaatggatcatggtctgggtttccaaaactaccctagtacagtgaatgagagaaatctgcctggaaattgtttcagaaccatgtacctttatgctttgtgattgtgaaacattgacttttttgtaaccccaaaatgaaaactgtttagtaaaggggatctattttgtgtgttttgaaacttaggtgcaatgtcccctggaaaaagctaaagaaatgtatatgttcaatgacattttaaaataaaatattatatatatgtatatacgacatattcagcaaaacttttttctgtcttttctatgaattcactgtgaagtttctttgtatcaggtaatggtctgtctggtttctttatatcaggtaatgataatgatacaaagagtatcatggctcaatgtgagattatcaactgtgaacacagactcgaaatccagagggaatggatgccaacactataagccttcacaggaataacagtaaaggctaatacatttcaactatgcctttggataccattattaccatggataccattagtaaacacatgaataattcagagaaaagaattactcccaagaggtattcttaagtgagagggctagagcctaatcttgctgaagacagtaagaatccagacttcccttcatcgcttaagcattttaagtatgtacttacaaagggttagtaaaatgtaccatcttatagaggaaagttactgtgacaggtgggataaggcatcagagcatgctaattctgcttagttctaaaatccaggaagttaaaagtaatctataaaataccaacaaaatattttaaatgaccaggcatggtggctcatgcctgtaatcccagcactttgggaggccaagcggggaggattgcttgagcccaagcgttcaagaccagcatgggcaacataccaagaccccatctctataaaaattagccaggtgtggtgatgactatagctgtgcctatagtcccagctactcaggaggctgaagtggaaggatcacttgcacctaggttggggctgcagtgagctgtgattgtgccactacactccagcctgggggacagagggagaccctgtctcaaaaaaaaaaaaaagaagaaaaagaaaaaactattttgaatgatccacggtcttgattcacaaaagcaagctaaaagtggaagcttgggaagaacagaatggaagacagtcatattagaatgctattattgtgaaacatcctcagctctattcaccttcacttgtaccctaatgctgatgctgcctccttctccccaactcagtagtggaaaacaatggaaaaaatccatccttggattagataccaggagattgggacatttcttctccatggaagatggaggagtcttctaacattctgtcgtgattagctcttgaaaggtgtggcagttgtctcccaaaatggctgccaacaatgcttcctatgtctgtatgcaagtgttccttttcccatcaagaggtggagtttgtttccccaccccttgagtctggtctggcttgtgacttgctttaataaaatgcagaagtgacattctgagacttctgagctgagatctctggaggtctcctagcacctgctttttcactcttggaagccagtcaccctgtaaatgtcagactagattagtgagtgagtagaggccacgtgggagagaaccacagtgcccagacattgggagtgaggccccaaatgagtccctccaggtgataacataaggagagagaggcctagccagctctcagctatttgggtcattccgcttgaggccacaaacattatagagcagagaatcatccccacttagccctgctcaaattcctggcccacagatccatgaacaaataataaggtatagagaacctggctctcggggtttgggagtaaaatggttaaaaatgtaaattttttaaagagaaaatggcattgagaaaatatacttctgacgtgggaaataatcttccatatgcaatgtggtagggtgactgaaatgggagaatcagttttttagcagtaatgcagggacgaactcataatccctacattcacgtgtatgcttttgctgctgcttgcagctggtaatgagccttactaagccaagaaagtgatggccatttggaggctatgagcctagaaggggaaaac

SEQ ID NO: 98171 - DNA, 15734 bp, Homo sapiens
aattaaaaatattccacaatacccttgtgagcttgtactttggcacagtttgggaaccatggccccagtcactccatgccacctcattcctgaatctatgtagtgtaaatgaatgggctctaataaaactacctgtgtatgaatgccatcttcaccccttatttactcgtgtgattctaggcaagtaaaattcttattatgcttcaattttttcatctgtaaaatagcaataatcttagtatttttgcaaggattatacagaataccttttacatgtttaggtaaatgcctggatatataataagcacacattaaatgctggctattatgattaatctccattgtctctttctcttttgttctttctagactcacctaaccataaattgaatcaaaataaaaactagaggtatatccagcctatcaataccaatgaatcccacactgttcaaaacagaaggcactagccatgtgtggctatttaaaagtaataaaattaattaagatgaaatataataaaaataattcagttacctaatcatactaattacattgtaacttctcgatagtcacatgtggttagtggctaccatattgcatagcataattacgtttttatgctagagcacagcactgttcttatcttttctagtcactgccaccttgtatccacataaaagaaactggaactgtgctttattatttacttttagggtaaaagagttcctgtagcattcctatagacaggaaccagacgatcatcaatcttagtgtgattagagttcattaatgccttattaccttttcttctatcttctcatcacttctatcttcagagggactccttgtccaggaacatacttagtaacacacttaccctccacccgcaagatcaaggaaactaaaaaaaagtggcaggaataggttctaagtcactcagtattgccttgtggaacgtattttattcctgccctctcaactgagatctcttattctctctagatcacaagctaaatatgcggttttaaaaatatctatccctggccaggcacagtgcctcagacctgtaatcccagcactttgggaagccaagacaggaggattacttgagcccaggagtttgagaccagcctgagcaacatggtgaagtctcatctctacaaaaaatacaaaaattagccaggtgtggtggcatctgtggtcccagctactagggaggctgaggcaggagaatcacctgagcccaggaagtcaaggctgcagtgagctgtgatggagccactgcactccagtctgagtgacagagtgagaccctatctcaaaaaataaaataaaatatctactccccttatcaccataatctttggtcttccattttctccaattactgaaattaaaacattttagggtttttccctgttttttttttgttgttgtttgtttgtttgtttttagatagggtctcgctctgccacccaggctggagtgtagtggctcaatctcagctcactgcagcctcaatctcctaggctcaagcgatcctctttcctctgcctcccaagtagctaggactacaggcacgcaccaccgcattcgcctattttttatttttatttttttagagatggggtatcttcatgttgcccaggctggtctcaaactcctgggctcaagtgatcctcccacctcagcctcccaaagtactgggattatgggcatgaaccagcacatccagcccttctctttctgttatagggatcacttttatttctcttttctaagagtgagacttccatctgtgcctcactcagtggcaggaagaacagagcagagataaaggactggcctaccaccctctattccaaagaccttggctcctagaaagggaagccaggaattccctaaaggaaagagcaaagaactgaggcccaggaagagcaaggagcacaagggagcaaagtcccaatgtaattaacgtaaattaattctttaaaaccaggtcacaccctacccaatcccacccaacccccggcaaactacccctcgtcttagttaactcactctgcacattaccagaaactttctgtgcctttgaaatgcagtaagggattgtgttgttttcacacaggtggtaaattaccacttcaggaaagaggaaaaaagaaatagggcatgtggaatatgtgaaaaaaaagaaatcagattgggacactttgggtcatagaagccaagcagatgttttccaccccatcctctggccatgtacacactgtactagttatcactttgttggaaatctaaagaaaaaaatgctttgaaatctattctattatataacacaatgaagtgtgttcccccaaattcttatattgacgctctaatcctcattgtgactatatttggagataagtcctttaaaaaggtaattaagtttaaatgaggtcataatggtggggccacaatccaataagactgttgttctcataagaagaagagaggccaggcagggtggtgctcacctgtaatcccagcatttggacaccaaagcaagaggatcacttgagcccaggagttagagaccaatgaccagcctgggcaacatagtgagaccctgtctctacaaaaaattaaaatattagctaggcatggtggcatgcacctgtcatcccagctacttgggagactgaggtggcaggactgcttgtgcccaggagttcaaggccgccacagactatgactgcaccactgcactcctgcctgggtgacagagtgagaccctgtctctaaaagcacggaaaaagaagagaaagaggaagagaaagcaaaaatgtgtgtagagaaaaggccatttatgccacagtgagaaggtggccatctgtaagctaaggagagaagcctcaggagaaagcaaacctgccaatatcttgatcttgggcttccagactccagagctgtgagaaaataaatgtttgtcgtttatgctatctatagtgttttttatgtcctagcaaattaatacacctcaatagcctaactgttctcaatctaagtgagaagatcccaccccataggtaaaaatcaggcaatacctgagacactcaatatttaccagagataatattaaaatggcttatctgtaaaatacaggtaccaaccaatcagaaccaatggcgccataaacaaccaatgccagccaccctgtagtgccccagctgaatatcctccctgcttgcaactgcagctaacaatattgttcagtacccagcaaatttatcccaagatggggcttaagttacttcattaattaattagagagccatctatcaagcagcttctatgttccaggcatttagcataaaagggggctcatcccaagcaccttctctctgccacttctgtgcttctgtccctttcaatctacctatcaaattatttgaatgtaaaatattagatcataagtcagaagacggggatttagagctccatttcaatctgtcacttagcttaaatgactccagtttacacagcctcagtttccacatctgtaaaataaagatatagtcttgccttccctgtccacatcacagtgggttctgaaataaaatgaatataactatgaatgtgctttattggccgggcacagtggctcacgcctgtaatcccagcactttgggaggccgaggcgggtgaatcacgagttcaagtgattgagaccatcctggccaacatggtgaaaccccatctctactaaaaatacaaaaattagctgggtgtggtggcacacacttgtaatcccaactactcgggaggctgaggcaggagaatcgcttgatcccgggaggtgggcagagatcacaccactgcactccagcctggcgacagagtgagactctgtctcaaaaaaaaaaatgctttattaactgtgagcaagttccaaatattatgattactttttgcatttttctgcctattgatctactcaacaacacagagctcagatcctagttatccatgcacaatactcatttttctttatgttttagaagttttctctggctgctctagctagaagtgatctcttcttttcttgaacttgaattacattgtttaattcttttattatgaagcatgtgctgtatcatgaatttctagtattgatatttttccatgtaataaaatactagtgctgattttcttttttttttttttttttttgagacacgatcttgctctgttgcccaggtttagatcatggctcattgtaaccttgaactcctgggctcaagcaatcctccacctcagcctcccaaaacaccgggattacaggcatgagccaccactcctgacctgatatgttatactgtcaatgtttacactattctgtctccctacccagagtgtaagcttttttaaggagtgtctttcacaaagtgtagatatttaaaaaatatttttaggacagtttttggaatatatgtgtaactagggcgcaaataatggatcctactccaaccccagacaatgcttgagcatctgtgtgccacaaacagcagaaaaagcagcagactggcctccctctatggagctacaacctcttccctattttgtatctggagcttccttagttctttaagtgtctgttaggggctcttatctaactggtcgaaggttactagcttccaagtagaagttggcctgagaaaaccctgtctaaaaaaatcaggacctaggtgaagtctccagcccctgtagcagccaagtgctgggacatctgcagttcctttgttattacatatttggggctggctgtactttctttgatgcacttcctttcttagtggagagtctgctagccaaactgataatggacctcctcggggtttattgtttttatcaattccttgttgcttcccatatttaaagcagtcccagtttgggctatgacttgggaaaaaatccaggtgtggttcaggcgcccataaagaccacacgagacttcaggtaggggaggaggcactgcccctttgctggaagcaaagttgagacaggcctaaagactgtcccatctgtcaaataaggtgacgaaaataaccttgtatttgattaatccaatctacaaacttgtgcgtatgttaaaggttggtggtcataaaactgagtaaaggcacggtggcttgtccctgtagtcccagctactgggaaggcttaggcaggagatcaaactcaggagtttgagtccagcataggcaagaccccatctctattgaatttttttttttttttttttagtaaaacgatgaaatcttctagtagtggagacactaatgaaaagataatttaacaatttgatcagcaatggggaaagacggggctctgtaaggacagcttccaggaaaacccagtcttgtgtcctgtcctgaaagtgactctagcgacaaaggctggagtgataatcttaactttttaatccatttccttctggtacctcattactctgactttttaaaggtacttctttgagtagaacagctaactttgtctactgttccccaccgtccattttctccccgctcagaagatcccaagcttccgcactcctttattgcacccgcccagcctcctttaaaatgcataagccacgccccccatgttctggcgctaagttcgggccaatgcagttgcgccgctaggatcacaggacgaaagaagtaaagtcaccagccaataggaaaccagctacaacgcaaagccggagaaaagtgttttagtggtgtctttgaaccaatgaggagcagagcaacagggaccgtgcagcttccagaaacacgtgaccagttgagcagacgcagcctagccctacctcctggtctggaggtagcgcgatgggcgtcgctcccaatagcttgcagaacctctagtcacgtgcaggttttgcaagcccagcagcatctggcaggtcatgtgacagttgacgtttgtgcgtcgctccccaatggaaaaggagagctgccttcacaggaccaggaattggtttatctacgcgaataatagcatgacccgggcggggatagcctatcacgtgctgctagacggaacggggcggggcaggccactggttgcggagtgagctgggcgcgcggcgcgcaggcgccctggggacccggtagcggcggtggcggtggcggcggtggcggtggctgcggcgacggcagaggcgaagggagccggatcgccgacctgagcgggaggcggcggtggcggccatggcggcagatggagagcgttccccgctgctgtctgagcccatcgacggtggcgcgggcggcaacggtttagtggggcccggcgggagtggggctgggcccgggggaggcctgaccccctccgcaccaccgtacggagccggtaaacatgccccgccccagggtaagccggggcgggtccgaggtgctccccggggtactctgaaagccggggagggggcgggaccgagggcggaggcgggtcccagtcgccaggtgcsggactgctgcacctgtgactgggcgaggcttccttccctccgtaatcgcgaccacagcctagggacggaagggggttctgagcaacctgatagaagtgccaattatgakaagccctccgagcttggtcagagggttgaagatcagaaggacttccctaccaccgtggagcatcagtgggggtgtaagtgatcccagcccttctatttgcttcctctccagcatttcccccgtttcccgaggggcatccagccgtgttgcctggggaggacccacccccctattcacccttaactagcccggacagtgggagtgcccctatgatcacctgccgagtctgccaatctctcatcaacgtggaaggcaagatgcatcagcatgtagtcaaatgtggtgtctgcaatgaagccaccgtgagttacacatatctatgaaatgggccctgtttcctggatcctctttctgatgtcttggttctagaccctgaccttccggctattagccaagtgcttttgatgatacccaggtttcagttccaggtgtctcacacagccatttccccagaagccactcaccaaagctaatgttcactttctctcactttyacacctagcctagttcctatttgcaaatctcatgatatagtctttcttttatttctccttcctggttagcaccttatttttstgatctcatraagtgtttttggagggaagtggaggggattgggattagaggtttgcttgctgatgaccctattattctctagccaatcaagaatgcacccccarggaaaaaatatgttcgatgcccctgtaactgtctccttatctgcaaagtgacatcccaacggattgcatgccctcgkccctactggtaagaggcataaggtggggaagggcctaagtggggaactggaaagtcaaaaaaggatgagcgtatacagagaatgtaaaggtgagagagcctagtgtttatttaggagaaaaggctttgaagcrtgtgcctcaggaatgttatagctgtctttctcgtttctcaataaaaatattgagatgaaatgatgtcgtttcggagaatagagagccttggggactgggtgtgttatcctgaggtcggaggggaattggggacctgaagtttaaacagtgctctttctttctcaaggattcttgagggtatacagttgggggacagagtatcttaagtacagagaagtcgagtgacttaatagacagggagtgggggatgtggaacagggwctgtgaagatttttaggattaaaaatttttcaaacacaagtttgaaaatacaagtctttttcttttgtatagcaaaagaatcatcaacctggggcctgtgcatcccggacctctgagtccagaaccccaacccatgggtgtcagggttatctgtggacattgcaagaatacttttctggtgaggaagsggtattgggaaggggaggggaaaggagactaagagtcatttcgagtatatttcttagagtaatggtaatgacccctgaaaggtctgtcctrtgggaacatgttctgcatccccaccccaaggttctcattgagggagaccctgcttgtgctattatttttgttttstttctccatagtggacagagttcacagaccgcactttggcacgttgtcctcactgcaggaaagtgtaagtgattagggattgagctggtaattgatgtatggagtaaaaactacaaggccatagaaagcatccatttctatttgcctccccacaggtcatctattgggcgcagatacccacgtaagagatgtatctgctgcttcttgcttggcttgcttttggcagtcactgccactggccttgccgtgagtacccttgccccaacctctttcattctgcagcctcatctccataggctaagatttgggaaactgctaccctaaaaaaaagtggaagaaacttgggggactagtttgttttgttttaagatatggatgagctaaagtgcaaagtggctgatcaaacagactttattactactacaagagtgaaaaacagccttcctttctctgtaggatgaggataggacagtgaaattcttaatttaagagttgctatttttcaaacctggctcagttgtcagatattaagaaaaactgagatacagtgtgggatgggatgagtatgttacgcctaagggaaggaagctgatcagctctgcctttaagaaggtccctgagggtggctacatgtggataaggaacaaggactgaagcgtgagttattactgttcttagaactaataggaggtagtggagaccaacattaaccccatctttcttttcttctccctccttatcttcatcagtttggcacatggaagcatgcacggcgatatggaggcatctatgcagcctgggcatttgtcatcctgttggctgtgctgtgtttgggccgggctctttattgggcctgtatgaaggtcagccaccctgtccagaacttctcctgagcctgatgacccacagacygtgcctggcccctccctggtggggacagtgacactacgaagggagctggggtagttaaaggctcccggggcttctagaaggaagccaagcagctgccttccttttccctggggagaggtaggaaggaaccaggccctcacttaggtttggaggggcagataagagcactgctgaccatctgctttcctccaagggttgctgtgtctagggtgaagtaggcaaaacgttgcccttaaaactgggccctgaagacggttccagccttgtccttcctgtgtgctccctgagagccattcctgtcccttacacattccagggcagggtgggggtgggtagccctgggggttcccctccctcttgtgcaccattaggactttgctgctgctattgcacttcaccagaggttggctctggcctcagtaccctcagtctcctctccccacattgtgtcctgtgggggtggggtcagccgctgctctgtacagaaccacaggaactgatgtgtatataactatttaatgtgggatatgttcccctattcctgtatttcccttaattcctcctcccgaccttttttacccccccagttgcagtatttaactgggctgggtagggttgctcagtctttgggggaggttagggacttatcctgtgcttgtaaataaataaggtcatgactctacgctttttcagttgttaacttgtgtgcatgaaaatatgaggaagagaatgtgtagccccacgaaggggtaagacacgaagacagcaaggctgaaactatggctctttattttcatgtggataattcaaacaaagtcattagtagtctttgttcaatttttttttaaaaaacaaaaaaccctcaaataaaaaatcttgggcttaaaagaactctatcacaggagcctggttggaggattcctagttttatacatgagaaatagaatgcagatttctctgaagagtgtttaaagaaggaatggtagttgagggggcttatttcccaggctcaaagtgatttaggggtggtgtcacagtgctaggtatagggtgataggacagtgatcactgccgagggccttggaacggatcttgctgtcacacaatgcaggtaacagagagtgggacaacaaaaagtaatcaaggcgccaaccaacattcttggatcgagcattcatcatataagtccaaaaggtgtaggcatagggtgtgttggggtagaggtgcctaaagctgtcagccagtggcacagcctgcagtaattccccgaagccttggcgctcttgtggcgtgaagccagcattctttttgttccccttggggttgcgaaggtcaatttcttcatgtgccacattgaggtctccacacagcacaaggggctttcgggaagccaggcccttcaggaacttgcgaaaggcttcatcccagcgctgccggtactccagtcgtaccagacctcggcctgcattaggtacatatgctgttaccagcacaaacgagtcaaattcagccacaatcacccggccttcctgatcatgctcctcatcgcctatagaaatgaaacagaattagcataaaaaactataagaaaagggaaagcaatcaagaggtggggcagagatagagaattagcaattggttttgaagagttcaggcattaggcatcaatagggtctcacctatgccgtaagaaactttgagtgggcactggcgggaaagcaggcccacgccactgtacccttccttgtccgaaggagctgaccagtattgatgagagagtccaggcagctcctgaagttcagctggtagtttgttctctgaacatttggtctcttgaaggcacagtatatctggggcttcttcctttacccactgtaagtgaaaagaaaggtggaaaacgtattatcaattcagcagaacatttattgaataatctatatgctaagtcatagatacgcacgggttaaacagtctcttggcctaaggagttcgagtcaagcagcacaatattcaaacaattctaagctagataaatgaaaacaaatatagagaggtaagaaagtcttacatgctatgccaaggagatgtgttttttctataggcagtggatagcaagctaagatttttaagctatggttaatggaatggaggacatgcttcatatggaatgcaatgcaggaagataaaatggaggaagtatagtgaagaggtttttgcaacattctgggaagaggagagaacactaaaaaagaaaatggcaatggaagtgaaggaacagacatttaggaaatacaactggcaagactggggaagccccacagaaaactacgggcaggagaaaaataaaacagcctgaaggctaaacggagaaaaggggtgactaaaccctaagaccattcaatactaaaaaatgtctctttccctcaaattccactcacatctaatcctttcttcttaatccaggctcgaagcccatccacattccaagagcagatcttgagtgtggcaggtttgccactgggtgaggttttctgatctggggggtcctcatacagggctgggccctctcctgctgcctctttgtcatttttctttgcggccgtcttactcttcttggcctctggctctataaaatgagtaatatatactgacaaaaagctggtggtttccaactgcgatccggcgttaactatagacccaacgaaagcctacggttcctgcgacttcttcacaaacccctgcaaaaatgagtcggcccgtacttaccgtacatcaagggaatgacaaacacccccgccgcagcttctaggaagaagggctgatttcattcccttacctgtcctgagctcatccccgtcttccgccaccgctccctttttcccacgcttcggcattcccgttacgaacgcccttgggcagctgtaccgcgtcacccaccgaagcaatatttttaccgcgttgcctacagacgcaaagaaatcatgaaaccagctaaggctggggagaagactcctcccaagagcgtccccgcaccaggtcccgcctttcaaaccacgttatctctaaatcctttccccgcctccgtgcatcataggcccttcagcccctcacccacgaaactagatcatttcatagtgccttgtaccctactcgcgagatctgccctccagccaattgaggatcttaattaagggtcctgactcaagcttgccgttcagactgccagcgaagcccctcttatgagcaaaagagcaaccccgtatctgcaccggcccgatggcagcctagctcctcctaacccgagcacaaagaagggtgcacgctgagcccccacgtgggtagcggacctggtcacgtgatcagaggcgcgcttgtcgtggccgaagaatgcgcgtgattggtctgtctgacaccacgtgacggagacgcttagcctcgcctccctcctctaattctctaggacacttaggtccccaaccctccctcgggctgtttatcgttgtgccagatgcacagcacattgtgtgacactgacttaagattctaactatgtgcaagagggaaaaaaacagtggagaaggctgggctggaccacgggaaagagataggaaaacggatacgaatgtaaggcacagagttggctcggcgtccctggcagttaggaagacaggtccctggaggggccttggcgggtctccgctcgcgggagttccgcggtgtctttcccagtgctatctgcaggctggccagcttcctctgcgctccggaaagctgcggcccagcgcggactagtgaggacctccacagctcctgacattgccaggagtcctgtcggcgttttctcccagcctccgccatgccggcggtgctgggttttgaaggcagcgccaataagattggcgtgggcgtggtgcgggatggcaaggtgctggcgaacccgcggcggacttacgtcacgcctcctggcacaggttggtgagtaggggacttaagagttttccgcgcacttccccgcacagaatcagccttccatcttcctaaatactagtgaggtgcagctttcgatccgagtctcattgaaattatgtgacattattaacgtcacaaggctgatgactagaagagttacaggcacttggacgtggatctgatgagttcatttaccttttactgagcgcattttatgtgctaagtattcagaaatagatgttatactgctgtggagtcagacatataaatagatgtttatactacagcatgataaacagtataatagagatggactcgaaatattctgtttaaaaaacgcttagcaggagtatagattccagttgccctgaatatacactccctttttaaaaaaaaattattttttgaaatattctaggatgagtagagagatgagagtggaaagactcccggcttacatgtcagacagaactggctggctttgctatattcatattaaatatttttgttttggacatttggtctttattttttattttattttatttttttgagacagagtcttgctctgtcgcccaggctggaatgcagtggcacgatctcggctcactgcaatctctgccttccaggttcaagcgattcttctaccccagcctcccaagtagctaggactataggtgtgcgccaccacatccagctaaattttgtatttttagtagagtcggggtttccaccaggccaagctggtctcgaactcctgacctcagatgatccgcccaccccagcctcccaaagtgtggaaattacaggcatgagccaccgctcgggcctggtctttgtttttaaaatgggaataatacctgtatcattaggtcttgaagattagatgaaagtaccaaacacggctgggcgtggtggctcacgcctgtaatcccagcactttgggaggccaaggcaggcagatcacctgaggtcggggttcgagaccagcctgaccaacatggagaaaccatgtttccactaaaaaatacaaaaaattaactgggcgtggtggcgcatgcctgtaaacccagctacttgggaggctgaggcaggagaattgcgtgaacccgggagacagaggttgcagtgagccgagatggtgccattgcactccagcctgggcatcaagagtgaaactctgtctcaaaaaaaaaaaaagtacaaaacacattacaacttttaattgatattttaaataagctattatatcttgctactctcccctcaaacacttgcatacataggagagggcagctgacttgcatgtatctgaaaagcctccctgaacaggtgatgttgtgacagatactcactagaaatatatatgtatgtttagcattcactcctctgggcacttgggcactgggaatacaaagataaataaaatactcaatgctttgagatattcatgattaagctgagcaaaccacagaaaattataatgctgtaattgttatgttaaataaatgacatcatcatgcatagagttctgtagggtcacagagaaagaagatcaccaaaggccaggcacggtggctcaggcctgtaatcccagcactttgggaggccgaggcagacggatcacgaggtcaggagttcgagaccagcctggccaatatggtgaaaccccgtctctactaaaaatacaaaagttagctgagcgtggtggtgtcgcctgtagtcccagctactcaggaggctgaggcagaagaatctcttgaactcaggaggtggaggttgcagtgagccgagatcgtgccactgcactccagcctgggtgacagagctgagactgtctcaaaagaaaaaaaaaaaaaaaagatcacgaaagggtatgaggtagatactacttgcattgagacctgaaggctgagtagggtaagaagaagagcatttctgaaagttgaatagcctatatagaagccggaaagagtagatgtgaaaatgtggaagataggatgcttggggaaagtgaaaggactcttactacatcactaaaactcctgttgctttctttaacttcctacctacctttgctacagaaaatccctgtgatctctgacctatgttcattttctaggattccttccaggtgatacagccaggcatcaccgagctgttatcctagacctgctgcaggaggcactaacagagtctggattaacctcccaggatatcgactgcattgcatacaccaagggtatggctgggagagtggtcaacgatggaggaatatacctgcaacctggctaggtcaaaatagccaacaccttacctctgccaccatcactacccctaccccacctcacatcccttatgtcccccactattgtttttttccaatctctaggattataacttccatttctatctccctaggccctggcatgggtgccccactggtttctgtggctgttgtggcccgtactgtggcccaactgtggaataagccattggtgggtgtgaaccactgtataggccacattgagatgggccgcctcatcactggagccaccagcccaaccgtgttgtatgtgagtggaggaaatacgcaggtatttagagggctctacccactccatctcaatttctgaggcactgaaccagtattttctttgttctatctgagtcatgggaatgtcaggaacaaagatggacttatctgaacctaaaa

SEQ ID NO: 98172 - DNA, 21069 bp, Homo sapiens
  misc_feature (1)...(21069): n = A,T,C or G
cctgcaccgggtgtgggcagctgggcggtgggcacaccaccgggtcacagatcaccgttcgtctctgcagagaggagcagaggcattgacgggagtgtccaggccccttgctccagatcccaggacccagtgtgcccttccaggacctcctacctggcaggtgcagagtgagcagagcgggtcgtagttgggcgcccagcgagccccgtgggggcgctgctgcccctcgaagaagcatgtgttggggtctcggggccgcccaggaccaccaggtttggcgggcgctagggccgggagaccaggcaccacaggcggcgcagcagaggctgtatccggagcccccagcgcccgcaccccctcggccccggccgcctccaggcgcagtccgccaacctcacattggttggctatgtgcacctgggaggagaggccaactgaggcagcgctggggctccccctcgcgtctttaccagcggcagctggccagccagcaggagacacctcggccccctgagcgctgcagtggcccaggaggatgccattcgctccacaatcatctcagctgccagggatagggtgccgggctgccagcctcctcatgtagctcatcctccccaccagccgggggggcgctgtgatacgaccacccccaggactcagagacagcaagtgactagtgcaatggcacacagtgcccctccaactctgcaccctccccactgcccccactgcccacactcgccacctacctgccctcggagctcccctctggggctacccttggtggtgatcatcagggaggccatgccttttgccaggtgccgcagcagttccggctccaggtccttcaccacaccctgggcctgcacatagacaggacaatggataggaataaggcactttagggctgagcctactgtccccagttcacagatgaagaaactgagagccagggaggttaaataaagtcttcatggtagcaaagcccattggcaatagtgtggagcttggaagccaggtctctctgaccaagtccatgagaactcaccccacttgaagggcttagtccatcccacctacccccctgaggtccaggatattacatactatccaagacaccccaccaaaaaaagacttagaaaggagaatgaataataaaaagccagtcagagtcatgcccaggtctatctgactcccaagcccatgccagctctttttttttttttttttttttttttttgagacggatttttgctctttctgtccaggctggagtgcaatggcgccatctcggctcactgcaacctccacctcccaggttcaagcgattctcctgcctcagcctctggagtagctgggattataggcatgtgccaccacgcccagctaattttgtatttttagtagagatggggtttctccatgttggtcaggctagtcttgagcttcctacctcaggtgatccacccacctggcctcccaaagtgctgggattacaggcttgagccactgcacccagcctacaaatcactgtttaatttattttatttatgccagctcttctataccaggctgcctgctctctgctttccccaacacaggcccacacagcccttcaagctaaaaaacagaaatgttccaagctgccgcctaccatcacatccttacctctgagccatagaatcccttcagcagccgccgaggccctggcgttccaggaggcccaaggaggtgggcagtgacagtgccttgttctgagccaccaagcccagccagcagcacttcatagtgcaggtgacagtgggtatccaaggaaagccaggcgtgccctgctgcttggctcttcacagggggtagcaccagggctcctgctaggggcacgggcagcgctgggtccagacagaggagagatgacaggtgagaaggtggcctagggcaagccctcaaacccagcattcccagctccccagcacacattccacgagctggaagacactgtccataggtccagggcctggagagcagcaagttttagacccttgaacctcagcaacaggaagagtccgccagcagggccaccctatatgtccccaccttcagatggcaaccggagcttaggcacaaagaaagacacaccaggctccggctgtctgccaccatccctcaaatgttctaggaaaccaaagggcagacagacccctaaggacactcactgtcatggcgggcgctatgcccacagtagggcagggcagccacgtgcccccgaagctctccgtctgggaagtccttggtgcccacgttcaggaagagctcattctgcagcagcatatgagcccctcgggcacccagcccagggcagatacccacggcctgggggcaggggaggataggccttctcagctctcacacgagtccaaggttctgaagtcttggaccattttgtgcccccactccacccacacacacttccacacaccagaaacacaggataaggacctggcaggcccagtttcaaggccctcccctgctgcttcctagctatgtaacaaccttcaagagtaacttaacttctccaagtcttcacttcctcatctctcaaatggatactgtgaaagccaaaaactatgtaaggccaccaatgcagcacctagcacatggaaaggccctataagtagcaaccattgccattacatttactaatatgtggcctgtggcactgttctccaggtccaatgctcccatttgactgtgagcttgctaagcacaggggccacatatgatttgctttgtactctagtccctagtctggggctcactaaaaatgtcaaatcatgccgggcacggtggctctcgcctgtaatcccagcactttgggaggccgaagtgggcggaccatgaggtcaagagatcaagaccatcctggccaacacggtgaaaccccgtctctactaaaaatacagaaattagctgggtgtggtggtgcacacctgtggtcccagctacttgggaggctgaggcaggagaatcgcttgaacccaggaggcagaggttgcagtaagccaagatcacaccactgcactccagcctggtgacagagccagactccatctcaaaaaaaaaaaaaaaaaaaagtcaaatgaataaatgaatgagtgggagaacccatgagtgagtggatgataatgaacatccctgctcatccaacctggcttcccacagcccatgcattgggccctggggtccagctccacctggagccctcaccgtgtgtcctcctggctggagtccagccatgtggcacaggacagtgcgctgatccctccgctgaggcttggtctccagtgtcatggccaccacctcactgcttgtccctaccacttgcacctgatgggcagggatggaggagggcaaagtggagaggcagtaaaggcctggggcctgctgcccacgccacccctcccccaccttctgcagcccctggctcttacctgatagatcagggagccatttcctagcagcgtgaggctggctgagccggcagcacccgtctggactgggatcagggcatcagccccacaaaggacactttgcaggactacggaggggcaagacaggtgaggctaggtttaccccatggccgcttacacccccagtccacaggatctctcccacacccaccctggcacttgtctgtgtctctcagttgtgcatgcccggcgcaccaggccccccccccgcctcaccgtcgcagctcttcctggcagcaatgtgtccactgatgcgcagccctggcctgcctgcccactccagggccatctgcagctcccccagcaccagccagtccatctcctggactgtcaggttgggcagcacctcagcaaagcctggttcctggggacagagcagggtgtgatgggcaatagcaagaggccaagacaggtggcagcgagagccagatccccactcacctgggctgagacattggcctgaagttctcgcagtagctgcccctggtgtagaatctggagcctcaagggaacctgggttagtcctgcaaggccgcacatgtgggcctttctgagacaggtgctctccctaaccttctcacgtgttttgcccccatcccacttacccccactcctgggttccagcagccctcggaagagcagcaaaaaatgcaaggagtcctctgtgtcactgagagtgagcagggtgatgccccctacgccctgctgtggggggccttctagagtcaggatggcactgaaggtctctggggaagggacgatgatgagagcccgtcagaaaccctccccccctttcctgggtgatagagaagactcagaacttcacgcccggggctctttgctccctacctgcagccagggcccggtgccggatgagaggcccccagacctcccctgaagggtgagtgagtgtcacaagtgccacatgcagctgttctgccctaaggagccgcagagacaaccgaggcactgcccgccacaccccacagacctggagcagagagacaagaaggccctacgctcagacactgtgcaggctaggccaattaggatgcccaggcagggcttatgaaaaaggaacatggaaaggaacctccagggtgccctaggaagcttaagaaagaacgctggagccagatgcttgggttccaatcctggctgcaccacttactagctgtgtgaccttgaacaaatcacattatcctactgagcctcagttcccccttctgtaaaatgggcatcataatgtcagtgccttcctcccactgggctgtggtgaggaccacgggaggcaatgcagagcatgctctcggcacagtgcccagactgggcaagtgctcataaatggcatcatctcaccaggccatcttgggtgggggctgcagggtgctcaaacaggacactgccattggagtctgagaagcggatcctggtagggcggtccagcctgggaatgagaggtcgggtgaggccggactgagccaaaagcagcccctcccagctctcccagtttccctcccgggccccggcagctgacccctccttgctccttcccctttctcaccgcctgtaggagatagagaagcggaggctagagcgcagcagcgagactcgggctcgtgccaccgcctgcgacctcggccctgtcagcagcgccacgaagtctgggacgggaggaagatggcctgagcactgtcaaacgccgctttggtggcccagcctcaaccacaaccccgctgttcgccagccccctacccgtgtggccgtcaccacgggcccgctcctcagcgcctggctccccgcggtcgctataactgcgatgctccgggtcccgcggatactcgaaggacaggccgctcggctgccgctccgaactgctgcgctctgcgggcgggggggtaagaacacgggcttcagctggccatgggaaaggccagtccgacgccccatccaagtggcccgggacctagtatcgtggccctgcctccctccccgcagggcggagcaagacttaccctgggggcaggtctggcagcagtgtcccggcagctggcgcggctgcccacaggccggggttgggcactctggtttgatgttcttgcagctgaccctgccagggcccctggtacggcgaccccactgaggctgctcccggaaaaggcgggaaacccaagtgagtgcaagatgccaactgatgagacccccccaggcaaggatgtcccgcagagtcagccagctctgccacttacaagctgcgtgaccctagacaagctacttcatctctctgggcctcaaggtccctgtctggaaaatggggataataatactctctatctagcaaggctgccatgagagttagatgagcagggaacgaaacggagttggcacagagcctcacacagagtgggcgatcagtaacagcacctaagaattggaggggctgattccccttcctccaccagaaaaatatccccaacatctgccgactgggctccttctcagcagctccgagtccactccracgcccgcgcgacccggcgctccccacccgccagggcccgggccggccgcggggtgcactcaccgcctcgcaggcgcacagcacgcagcgcatcaccccgaatggctcccctaggtccgggtgccacgtctcgtccaaggcatagaccttcccgccgaaggtgcagcctgcggggacgggcttggctggaggccgctgcccagctcgcgccgtgtgccgccccgggggctgcccgcgggtcccgggtcccaggcaccgcgcccttctgcccccgcccaccctccgggccgcccgccgcgccgagccacctgcgccccgcgccccctccgggctggcgctgactcgccccgagcccgactccccgcccgcgcctcccccgggcgcccacctacctgccgctccccgaacgggcagcggctccttctcagaacggatgggcagcacggggggctckgggccggcgccgcgggccggccgggagccgagcagcagcagcccgaggagcagcagcggggccggcggggccgggaggctcggcatgacgcgaacgggacagctggggaggagggagggaggagggcgcgggagcgggcggagggagggaggcgggagtgcggagggcggagggccgggccgggggcggtgcggcgggagggggccggggccggggccggggccggggcagtgccgcgaggggctcgtcgggcggccgcagagtcggcgccggcccgggcggggcgggaggagcggccgggaggagcgcgggcgggcctcaaatgcgcgtcagtttccgnnnnnnnnnnnnnnnnnnnnnnnnnnnnnnnnnnnnnnnnnnnnnnnnnnnnnnnnnnnnnnnnnnnnnnnnnnnnnnnnnnnnnnnnnnnnnnnnnnnnnnnnnnnnnnnnnnnnnnnnnnnnnnnnnnnnnnnnnnnnnnnnnnnnnnnnnnnnnnnnnnnnnnnnnnnnnnnnnnnnnnnnnnnnnnnnnnnnnnnnnnnnnnnnnnnnnnnnnnnnnnnnnnnnnnnnnnnnnnnnnnnnnnnnnnnnnnnnnnnnnnnnnnnnnnngggctgggaccgggcaggggaggagggaggggcgggaggggaagggggagcgggggagggggaggggagggaccagggggcgcgaagagggggaggagaggcgggcccggagccccccgctgctggcggccacagggcggctggaccaggaggtcggtgtccagcccaggaagggagcctcaggctagggaggggcagaggctaggcctgaggcctggaccgctctgtgagcgaggacccggttccgcccgaaggatgaagacttgtctttaaagatgacaacgtacaggaaaggtccatcagccgatctccccctgcctgggcccacagcgccccccaaaccctcaccaccctctctcactgcctagcctgcctccctaccttctctctgaggtcgctcctcattcttgtgttacccaggacagggacctagccagaaaccggcagcattcccccttctgtggagtgacagtatctccctctcattgtaacttatcctcaggcgcattcgacagtcccctcttgctttctcacccccttccttcacccaagggaccctctgcctctccagcccactcccagcctccyttctcttggttccctggtcatgcctgcctccctgtctcctgtctctccctcccacacacacccactatcctcccagctatcccagcaccctccttcctaatcttgggagacatctcgtctggctggacgggaaaattccaggatctaggccacacttctcagcagacatgcccatccttggggaggaggaacaggagagagcctgaggaagttctgggggacagggggatgatgggatcaaggtcaggccaggaagcccctgaggacagagactgtggggagactgggactgggaagaaagcaaaggagctagagccagggccaaaggaaaaggggggccagcagggaggtatttgcgggggaggtccagcagctgtctttcctaagacagggacacatgggcctggttattcctcttgtcacatgtggaacggtaggagatggaagacggagacagaacaagcaaaggagggccctgggcacagaggtctgtgtgtgtagccatcyaagccactggaccccagcagacgagcacctaagctcaggcttaacccagtgcacgtgtgcgcacatacatgtgccccgcacctgacagtccactcaacccgtccaaaccctttccccataacaccaacccataacaggagatttctctcatgtgggcaatatccgtgttcccacttcgaaagggggaatgacaagataggactccctaggggattacagaaagaaaagcaggaaagcaagcatcctgttggatttcagcagcaggtatgatgtccagggaaaagaaatttggatagccagggagtgaaaaccccaccaatcttaaacaagacctctgtgcttcttccccagcaacacaaatgtcctgccagattcctcctggaaaaaaacttctgctcctgtccccctccaggtcccaggttgcccatgtccaggaaaagatggatccccctatccaaatcttctccgtggtgtgtgtgggtggaggagtggaccctggtccaggcaggggctccagggaagagaaggcgtcacttccgggggccttcaccagtgtctggtggctcccttctctgattgggcagaagtggcccaggcaggcgtatgacctgctgctgtggaggggctgtgccccaccgccacatgtcttcctacccatctgctccccagagggctgcctgctgtgcacttgggtcctggagcccttctccacccggtgagtggccagcagggtgtggggttatgtgagggtagaaaggacagcaaagagaaatgggctcccagctgggggaggggcaggcaaactggaacctacaggcactgacctttgtcgagaagagtgtagccttcccagaatgggaggagcagggcagagcaggggtagggggtggggtgctggtttctgagggactgatcacttacttggtggaatacagcacagccctggctggccctaaggaaaggggacatgagcccagggagaaaataagagagggagctgcacttagggcttagcaaacacagtagtaagatggacacagccccaatccccattcttagctggtcattcctcgttagcttaaggttctgaatctggtgctggggaagctgggccaggcaagccagggcgcaaggagagggtaatgggaggagggcccactcatgttgacagacctacaggaaatcccaatattgaatcaggtgcaagcctctttgcacaacttgtgaaaggaggaggaagccatgtggggggtcctgtgaaggaaccggaaggggttctgccaagggggcagggaggcaggtgtgagctatgagacagatatgttagtgggcgcctaagacaaggtaagcccctaaggtgggcatcacccagcaggtgcccgttcctgggcagctggtctcaggaaggaagtcccagaactgttagcccatctcttggcctcagataatggagtatttcaggacttggagtccaragaaaagctccagtggctttatgtgtgggggtagatagggaaagaatagaggttaatttctcccataccgccttttaatcctgacctctagtggtcccagttacagctttgtgcagttcccctccccagccccactccccaccgcagaagttacccctcaacatattgcgcccgtttgccagttcctcacccaggccctgcatcccattttccactctcttctccaggctgaagccacaatactttccttctctatccccatcccagattttctctgacctaacaaccaaggttgctcagaatttaaggctaattaagatatgtgtgtatacatatcatgtcctgctgctctcagcaggggtaggtggcaccaaatccatgtccgattcactgaggagtcctgacaaaaaggagacaccatatgctttcttgctttctttctttctttctttctttcttttttttttttgagacggagtttcactcttattgcccaggctggagtgcaatggtgcgatctcggctcaccacaacctccgcctcccaggtacaagcgattctcctgtctcagcctcccaagtagcttggattacaggcatgaaccaccacaccctgctagtttttttgtatttcgtagagccggggtttcaccatgttagtgaggctggtggcgaactcctgacctcaggtgatccacccgccttggactcccaaagtgctgggattacaggcatgagccactgcacccggcacaccatatgctttcatcacaagaaaatgtgagagaattcagggctttggcagttccaggctggtcagcatctcaagccctccccagcatctgttcaccctgccaggcagtctcttcctagaaacttggttaaatgttcactcttcttgctactttcaggatagattcytcacccttggcccgcctttgccccaccctactctgcccagaagtgcaagagcctaagccgcctccatggccccaggaaggattcaggggagaggccccaaacagggagccacgccagccagacaccccggccagaatggagctgactggtgagaacacacctgaggggctagggccatatggaaacatgacagaaggggagagagaaaggagacacgcygcagggggcaggaagctgggggaacccattctcccaaaaataaggggtctgaggggtggattccctgggtttcaggtctgggtcctgaatgggaattcctggaataccagctgacaatgatttcctcctcatctttcaacctcacctctcctcatctaagaattgctcctcgtggtcatgcttctcctaactgcaaggctaacgctgtccagcccggctcctcctgcttgtgacctccgagtcctcagtaaactgcttcgtgactcccatgtccttcacagcagactggtgagaactcccaacattatcccctttatccgcgtaactggtaagacacccatactcccaggaagacaccatcacttcctctaactccttgacccaatgactattcttcccatattgtccccacctactgatcacactctctgacaagrattattcttcacaatacagcccgcatttaaaagctctcgtctagagatagtactcatggaggactagcctgcttattaggctaccatagctctctctatttcagctcccttctccccccaccaatctttttcaacagagccagtgcccagaggttcaccctttgcctacacctgtcctgctgcctgctgtggactttagcttgggagaatggaaaacccagatggtaagaaagccatccctaaccttggcttccctaagtcctgtcttcagtttcccactgcttcccatggattctccaacattcttgagctttttaaaaatatctcaccttcagcttggccaccctaacccaatctacattcacctatgatgatagcctgtggataagatgatggcttgcaggtccaatatgtgaatagatttgmagctgaacaccatgaaaagctggagagaaatcgctcatggccatgcctttgacctattccygttcagtcttcttaaattggcatgaagaagcaagactcatatgtcatccacagatgacacaaagctgggaagtaccactaaaataacaaaagactgaatcaagattcaaatcactgaaagactaggtcaaaaacaaggtgaaacaacagagatataaacttctacatgtgggccgggggctcacgcctgtaatcccagcactttgggaggccgaggcaggcagatcacctgagggcaggagtttgagagcagcctggccaacatggcgaaaccccgtctctactaagaatacaaaattagccgggcatggtagtgcatgcctgtaatcccagctacttggaaggctgaagcaggagaatcccttgaacccaggaggtggaggttgtagtgagctgagatcatgccaatgcactccagcctgggtgacaagagcaaaactccgtctcaaaaagaaaaaaaaattctacatgtgtaaattaatgagtaaagtcctattccagctttcaggccacaatgccctgcttccatcatttaagcctctggccctagcacttcctacgaaaaggatctgagagaattaaattgcccccaaacttaccatgtaacattactgaagctgctattcttaaagctagtaattcttgtctgtttgatgtttagcatccccattgtggaaatgctcgtacagaactctattccgagtggactacacttaaatatactggcctgaacaccggacatccccctgaagacatatgctaatttattaagagggaccatattaaactaacatgtgtctagaaagcagcagcctgaacagaaagagactagaagcatgttttatgggcaatagtttaaaaaactaaaatctatcctcaagaaccctagcgtcccttcttccttcaggactgagtcagggaagaagggcagttcckatgggtcccttctagtcctttcttttcatccttatgatcattatggtagagtctcatacctacatttagtttatttattattattatttgagacggagtctcactctatcccccaggctggagtgcagtggcatgatctcaactcactgcaacctcagcctcccggattcaagcgattctcctgcctcagtctcccaagtagctgggattacaggtgcccaccaccatgcccagctaatttttgtatttttggtagagatggggtttcaccatgttggccaggctgatcttgaactcctgacctcaggtgatccacctgcctcagcctcccaaagtgctgggattacaggcgtgagccactgcacccagccttcattcagtttaaaaatcaaatgatcctaaggttttgcagcagaaagagtaaatttgcagcactagaaccaagaggtaaaagctgtaacagggcagatttcagcaacgtaagaaaaaaggagctcttctcactgaaaccaagtgtaagaccaggctggactagaggacacgggagtttttgaagcagaggctgatgaccagctgtcgggagactgtgaaggaattcctgccctgggtgggaccttggtcctgtccagttctcagcctgwatgattcactctgctggctactcctaaggctccccacccgcttttagtgtgccctttgaggcagtgcgcttctctcttccatctctttctcaggaggagaccaaggcacaggacattctgggagcagtgacccttctgctggagggagtgatggcagcacggggacaactgggacccacttgcctctcatccctcctggggcagctttctgracaggtccgtctcctccttggggccctgcagagcctccttggaacccaggtaagtccccagtcaagggatctgtagaaactgttcttttctgactcagtcccmctagaagacctgagggaagaagggctcttccagggagctcaagggcmgaagagctgatctactaagagtgctccctgccagccacaatgcctgggtactggcatcctgtctttcctacttagacaagggaggcctgagatctggccctggtgtttggcctcaggaccatcctctgccctcagcttcctccacagggcaggaccacagctcacaaggatcccaatgccatcttcctgagcttccaacacctgctccgaggaaaggtgcgtttcctgatgcttgtaggagggtccaccctctgcgtcaggcgggccccacccaccacagctgtccccagcagaacctctctagtcctcacactgaacgagctcccaaacaggacttctggattgttggagacaaacttcactgcctcagccagaacwactggctctgggcttctgaagtggcagcagggattcagagccaagattcctggtctgctgaaccaaacctccaggtccctggaccaaatccccggatacctgaacaggatacacgaactcttgaatggaactcgtggactctttcctggaccctcacgcaggaccctaggagccccggacatttcctcaggaacatcagacacaggctccctgccacccaacctccagcctggatattctccttccccaacccatcctcctactggacagtatacgctcttccctcttccacccaccttgcccacccctgtggtccagctccaccccctgcttcctgacccttctgctccaacgcccacccctaccagccctcttctaaacacatcctacrcccactcccagaatctgtctcaggaagggtaaggttctcagacactgccgacatcagcattgtctcrtgtacagctcccttccctgcaggrcgcccctgggagacaactggacaagatttcctactttctcctgaaacccaaagccctggtaaaagggatacacaggactgaaaagggaatcatttttcactgtacattataaaccttcagaagctatttttttaagctatcagcaatactcatcagagcagctagctctttggtctattttctgcagaaatttgcaactcactgattctctacatgctctttttctgtgataactctgcaaaggcctgggctggcctggcagttgaacagagggagagactaaccttgagtcagaaaacagagaaagggtaatttcctttgcttcaaattcaaggccttccaacgcccccatcccctttactatcattctcagtgggactctgatcccatattcttaacagatctttactcttgagaaatgawtaagctttctctcagaaatgctgtccctatacactagacaaaactgagcctgtataaggaataaatgggagcgccgaaaagctccctaaaaagcaagggaaagatgttcttcgagggtggcaatagatccccctcaccctgccaccccaaacaaaaaagctaacaggaagccttggagagcctcacaccccaggtaaggctgtgtagacagttcagtaaagacaggacctggatgtgacagctgagcaaacagctagagctttggcagctcagcaggaggctttgccaggcatggacgcctgcctccctcctgtggaggtcaggaggaagtgcaggaagtggcatgagtcaggctccttgagctcacacagcaggagaacaagtacaagtcaagtacaagttgaaggctcatttcccagttcccgcaaatgcatctaaaaagcagctctgtgtgaccaccataaactctgctaggggatctctaaaaaggagtcaggcttatggggctttgcaaataagtgctgccttggtgctcaggaaaaggtttgtgttgcacaaaaacacaaattccactgcaaaaatcaacctgctacctccagaggttcctgtaggaaaactagtggaagcttcttcctctccccgacccctgaggaaggaaaggctaccacggaggtagaggagccaggaacccagaaacccaaacactgccacaaataccccagggtcaccaaaggcattccaaagcagcagaatgaaaggcaatgtgctaggaacctcgtgtactttaccttttgtaacattcacacaactctgtaaggtaggtattatcttttctgttttagagatgaggaaactgaggctcagagaagccaggtgagttatcagtggttacacgccctgtgggcaggagaagaaacaccctagtctgacctcactctagggtccatactctctccagtgtggtacactgtcctatatgtcatttaatgattctgtttactgggaaagacatacaagtccttaaggagtaacagttagagttttgaggccgggcgcggtggctcacgcctgtaatcccagcactttgggaggccaaggcaggcggatcacaaggtcaggagatcaaggccatcctggccaacacggtgaaaccctgcctttactaaaaatatgaaaaattagccgagtgtggtggcaagcgcctgtagtcttgaacccgggagatggaggttgcagtgagccaagatcgcgccactgcactccagcctgggcaacagagtgagactccatctcaaaaaaaaaaaagagttctgagtagaaaaccaaagttcttagtggaggtgaccaatttagacatcttcccatgtccctctctcccttcacggacagaatagttttcctagagaaggaatcaacaaatgcacaaagctcaaaaatgttgtccaaatctcaaatgctgtcagtttctgcatggaagagaagtagttcattcatactacaaattccagcatgcagtcaagggaatgttaagtggaaactaacttactgacatattgagctgggttaaatttaataatcaaatgaaacactttatagcacatgaaagtgccagcacctaggacacgatacaccaatagaaccagagaatgatgggttcccagcacagacagatgagagacaagaatggcaaaactttagggccaggtatggtggctcacacccagcactttgggaggccgaggcaggcggatcacctgaggtcgggagttcgagaccagcctgaccaacatggagaaactccatctctactaaaaaatacaaaattagctgggcatggtggtgcatcacctgaggttgggagtttgagactggcctgaccaacatggagaaacctcgtctctactaaaaatacaaaattagctgagcatggtggcacatgcctgtaatcccagctactcggaaggctggggcaggagaatcgcttgaacccgggaggcagaagttgtggtgagccgagatcgcgccattgcactccagcctggacaacaagagcgaaactccatttcaaaaaaaagaaaaaaagaaatagaatgtcaaaactgcaaatgtcaccagaaacttccaggcatctggtattggtatgtgacttactccacttgtgggcaaatgcgagtaactcatgggcttctccagtgtgaacttacctgccctattacaaatctaacccattcccaaatcagtctggttggtcccatcccttcttcccactaacacaaaaaaacaattacaaccagaacactcctatccctattcaatgctctaccagttctctttcttctgctaccccaagaccgccaggacagtctatgataacctacacactattacttgtaattcgtttgtctcactctcatttgtcgttctccaaccccacaaaaaaacccaccccatggaaaggttctaggatttcataaaaattcatcccaactccctccccctactctacccatagtaaggtaaaagaaacacctcttcctcctccctgctgaggccattcattttcaacccatttccctaaatactatttctaacacctcacatgaagatccgaaaatgatggggaaggaaataccccaggtatcccagcaggggaccagctcccaggcaaaaccagatcaaacagacaactgtttaatgcacagagaatctttttggattgttaccctaaacttcctaggggaaaacagaaccccatatgctttcctagagacctctaatgccaagctgaagagccagctcacatgctggagcccttatcatagccatttccttaatgttttttcttcccctactcataagttagtgactgtagtcaggccgctacatggtcctggcactggccctggctctggcctgccaacttcattggtattgctgccctgtccacttccacttaccctccctcccaggtcaccactggaatgtagagcagagagccagctcctccagctgcttccagaaccaccaagtcctctcgtcctactctcttcatagtcatctcccatgcctgtagctaaaagcctctacccaaagcttccataaaaataatgaacatttctagactatgcaagtgactcattcaagtcagcatgaactgacttcctaagagactgaaagtgttggaaggacatgagcagggctccttgccaattcaaaattctgcgccaaatgggtggtatcttctgggcctggggtaccctcaggagccaaaagcacaactctctcccagactgaaaaccacactggaggataaatgttgagaacagtcagccaggagactgagataaccctgaacccagataccaaaaggctggaatagatcctacattgacaagtgatcagctggctgtgggccagaaacaatacaccacagacaaactggaaaaaacgattttacagtaaatggactttttacaaaaaggggaggggcagtctgaaaaagtaaagtttaatttaaaaatcatatacataaagcttctgattcattttcagctctcccactgtgtctttcacaggcgagtcagtttcccattgagtggaggccagttaaagatgccgccacggtggacagtgagccagcccttcctcaacaggtgagcaagagcggctgccactcaggcttgaacaatgcccatgacctgagtgacttggcagagaggctggcttcaggcgaggttcagaaggctagcttcttcatcaggagataaactctggagtccacctcgaatccatgcaggttgttggcatccccctgcagcctcatgagcaggcccccataggacacgtacgcagagctgaaacagaaggccccatcccgtgattctggagcactgccactcagcagctctcaatctcagcctaagaaagagaagaggcatcttcctactgttgtgtcactaggaaccaaaattctgacaaagatcaatgcacaggtatgtgcaaggcactgttccatctcagcctaagaaacagaagaggcatcttcctactgttttgtcactaggaaccaaaattctgacaaacatcaatgcacagatatgtgcaaggcactgttctttatattatcgagggtggaaaacacctagatgccccaaatcaggggaatgttcaaatgaatcaagacatatccacttactgaaatgttatgcaactattgaaacgtttaagaaaagctttacaccggccgggcacggtggctcacacctgtaatcccagcactttgggaggctgaggcgggcggatcacgaggtcaggagatcaagaccatcctggctaacatggtgaaaccctgtctctactaaaaatacaaaaaaaaaattagccaggcatggtggtgggtgcctgtagtcccagctactcaggaggctgaggcaggagaatggcgtgaacccgggaggcggagcttgcagtgagccgagatcgcgccactgcactccaggctgggcaacacagcaagactccatctcaaaaaaaaaaaagaaaagaaaagaaaagaaaagctttacactaacatggggaaacatgttttacataatgttaagcaaaaagagcagaagaaaacataataaacaccacagtctccaagaaaaaaacagaacaccaggatatgcaaaaaagtctatgtaaaaggttctctctggatatggaattacaggtgacttttttttccttcttcacattactcttctgcatttcaaattacttacaaaaagcacatattgttttaataagactttaaagaaaagaaaaaatagctggacaggaaaaccaaggaactagggattgggttacagagtagccacacacacacacacacacacacacagccttttacagagtagcaaaacacacacacacacacacacacacacacacacaaagcctaacagtctaatcacttaatgctgcatttattcctggggaagcaagtctcctttgcactttacacagtgagataatcagtttctcatgtggaccactgggccaggagggcctgacaaagggcagtctacatttcagactggaaactgctcccagaactatttctttctagttcccacctcggtctgaggtgcctgaggagagggactcaacagaggaagcaggagcatagctcaaagtctcagaacatggaagaggaaaagaatcctcacaagattacgtaacttacaggcgtgttgctgcttcagtagaagtttcatctccctcaatcctgtacacttttccatacattacatactcaaactggtcagccctatggagcaatagcagcaaagttattcttaacagtaattaacaatataaaagatcccatttaaaaatggttactggtcagccgggcgtggtggctcaagcctgtaaccccagcactttgggaggccaaggcgggcagatcacgaggtcaggagatcgagaccatcctggctaacacagtgaaaccccatctctactaaaaatacaaaaaaattagccgggcgtggtagtgggctcctgtagtcccagctactcaggaggctgaggtaggagaatggcgtgaacccgggaggcggagcttgcagtgaactgagatcgcgccactgcactccagcctgggccacagagcaagactccgtctcaaaaaaaaaaaaaaaaatggttactggtaactaaatgccagcattataacaacaggcacattacaaacatgatgtcatttagtcctcatggcaaccccatgagctaggcatgaccatctctattttattgatgaggaaacaggctgaaggagattaaggttactcaacaaataagtggtagagctgagaaatgaactcaagtggggtgccaaagtctttccatcacaccaagctccctcccaagacacaagacccacatggcctaggtcactcagcagttacctcctcagccttcaaaaggctgcaactcacaagcatgtaatcactgttatagataaatacctggttgtttgaatttttttctttttttttttttttttgagacggagtctcgctctgtcgcccaggctggagtgcagtggcgggat

SEQ ID NO: 98173 - DNA, 41794 bp, Homo sapiens
tcctcccccttccctcaggggtagacaagggacctttgattatttttagctttgtttttttataagcctttttgggggttaaaatagagtttcttacatttttgggacttttttaataggcatttcctcttttatatgaagaattcccatccattgggccccttctaaccccagaatgtgacctcctcctccagttacccacagccctgccctttgcagggttgggggtggtcagcggtaccccggggttaggcatcctagacagcagcctgaggaagctgggagatttgggccatgtagctgcctttgttactctatttattttagtcacttgtataaaacaccaaataaagcaatagaggcaaactccccacgcctctggctcctttctttgggagggaggcaggcagcagggggaaagaaccgtcacacaggagcaaagcatgactggctagaaatttttattatttgcgaggcagtaagtgctcttgagagcaggcacagtgctgggaacactaggccccttcgggacaaaccagggccttaaggaaaggggcttcggctttggcttgagggaaggcacataactgggacaggccctggccgggagtattcagaagccaagtgggttgctggtgaccacaccaccccgctccaccaaggccttggagatgcttttgaagttgcggtagagctcttgctgccaggggtcagactgcagggcggccatgccctctcggatccgagctgcagcctggggagagggaaggaggggttgggcctgcacctccagccctcacctgagcttggcagccccgagtctcacctcgatacaccaggtgtcacagagcattttctcatgctgggccgtggggtggccctcactcagggatcttgaggccctggcaggaagcaggagatgaaaataaatctgggccggctgggatccaggcccaggccccctgcggctcaggcattccctgcctgcctcctcacctcgagagaaccaccaccatggcatagaggtcgatggccccgtctgccagccgctgcagcagaaactgttcatctgtccggtaggtggggtgggggtgggggtgggggcattagtctcaaggagaggaaagggaggggcggaatggtgtagagctcacttactgacaatccccttcttgtgttttatcagcttggcctccaccacagtggcaaactgctccagagcccgtactgccttaagagatggggacagtgcggggctcagaggggccatcggctgcagtccctgatgcaggctctcctggacccctggccgcttaccagctcgccactccgactcaactccgggtggacaagtccgctgagactcaggccgctgcccagccctgcccgcctgagaggaagagggagaatgactggttagttgccatacaccaccctgccctcccctggctctggccctaagcctaccgcctcagctgtttgcctgcctctcctagcaggaggccagcattcccaaagggattctttagagcactgccaagcccagagagctcctttcctttgtcctatgggggaagagggtccagcagtcaggactcactgtcctccccacctctacccccacccaattctctgtcttaccatacagccctgcagagccacaaacagccgaagaatgtcatttgtcccctcaaagatccggaagatgcgaagatctcggagcacacgctctactccaggttcctagcacagggccacacaaattatatgcccgtgctgagatgtgcctacccacccctggcccagccgaggctctgcagaagaccgtcctgtaccttcatgaagcccataccccccatgatttggatgcattcatctgtcaccttccaggctgcctcctagggacaaagaacagatgagactggttttgggagctgagcacccaaactggactccctcccagcatgcctgggacctcaccgagccaaagattttgctgatggcggcctctatctggaagtccgtggctccctggtccatgttagcactcaccatgtaagccatggactgaggttgcatagttgggacatgggaaggaaaattgcaaagggctttgtcagacttggcctcatcacccagatctccaagataagggctgacctagcttgtcaggtcaggcagatacttgttctgggtcagttcatcaggtgcttccaggtatttgttttcttaaaaggggtggatgtaagggatgaggtagaattaacttctggtactgctggcaggcacctgagcagaacatcattgctgtctctcttcgcagaagctgagctgactatgcctccccgcatcccctagggcattggtgtaaagctggagacccactgccccaggtgctgctgggggttgtagtctgacccgactgggaagaaagccccagggctccagggagaggggcttgggaggccctcacctcagttacatactgcagcataaccatccgtgccagcttctcctggatcagcccaaagttgtgaattttctccccaaactgggtacgattagtggcatgatctacctggaagagggtccacacatcccgctgtggttcagtgtggttctgcagtctccctaggagaggggctgggcttgcgccagagggatgggttttgcatacaaccagagttcagtctacgctggatggagacctaagctagcaagtcgggctgctggtaggggaggagtttctagtgtagggagtgcctgcaagtgatcagggacacatggcaagggggacagtgagacttctgtttgggttacctagggactcgggcagggtactcaccgccttagcaatgatgcctctcatggtacctgccagggccgcagccatgccaaaccttccattgttgaggatgtgcatggcaaccttgaagccactcccaacctcacccagcacgttctccgatggcacccgtactccatcaaagaacacctctgctgtgtttgaagccttgatgcccatcttcttctcagggggcccactgtgtcagggcagtgtgggaaagcagaggtgtgttcaacaggttgtcactgggggaaaaactgctccttcgctccttatgcaccagggaggaatgacgaccactagactattagaggctacagccaccacttcccctcaggccctgagggctaaggaggcctggctatgtcctattttgtgttggacttggttgctggagccaaaactttagctcagttgcatacatattagtcccaaaggccacattcagtccacctgctttggcttttgcacacgtccccagggtgacttgcaacagccatctgcccaggagcccagtcctgcccctcagtcctaagctcccccaacccaaattcactcactgggtaatgcccccgaagcccctctccaccacaaaagctgtgatcttctccttcacggctcctgtggctggatctgtaactggtgtcttggcaaagaccgtgaagatgtctgctaggcccccattactgtggaagaatgggatattcagggcgtggaggacggggagcagtggggcctggaattgggcggaggagaaggggagaaatgggaggcaggttgcctgatccaaagcttgcttccattgagggtatagtattttccacaggggctgggcacagcagaggttcggatggaggctgcatctgacccgcttgagggctcggttagacagaaagcggccacagtctcccctgttggggagagagctactttaccccaagttctgatgagcttcaaagtcccctcggcccacttccccatccctccagcaggcagttcccccttaacacctgggagtatccagttcttttgcatgtcccaaccagcacactgtgatgcctccccaaaaccttcccccaactgaaatgctcagccatctgataatctaagtgccaactggcctaatctgtgccaagcccagtgtgccccccaatccctggctctcctagggttgcctcaccagatgccagcttggggaggtatttttctttctgggcctttgtgccaaagagcaggatgcctttgaaaccgatgctctgatgggcccccagggtaatgcccacgccaaggtcatgcatgcccacgatctccaccaaacgggcgtactggaggggaagcaggaatctggggttgtcactggctgcagggggacctgaccttaacaggagagtgtgggcaacagggcagttcctgacctagggcagttcctgacctagggcagtgcctgacctgggccatccccagtgtgtagaaaagaagtggggtgtgcaaagggcacagcagagaatgctggtctgtcttaggtctaggtaggagggtgacttgctactagtcagtctattgttaggcaatccccaacttagagatttgtaaggacttgggaaccagggtgaggcccatggctcaggcctaggggactgcatgtaaattgtgttatgtttggacagttaacatccatcccacaggcacccagggcaggtgcttagaagagaccttagccctagtctctaggtctatggcaaaagagctgagtctgccaagctggggtatggcatactgggatgtggcgatagggcgccctcacctgggtgttgcaaaggcccacaccacccagctcactgggcacttgcagaccaaaggcccccagctccttgaggccctgccaagtggtctcctccaccatctccagagcgtcattcttggcgggatcgttcacttcctggggaaggcacaggatcccacatccaggctccttttgagcttaacatctccaaacacctcaccagggaccaagccccgagtcattccttacctcgaagaaacgggacacaggctccaccagctctttaagaaactgtgtctgctcttcgttgagcactgcagagggtgggggacaggctggtcaggccaggctggcaggggaaaccaccctggccccacccagctctgattatcccttcccttaccggacgggtatgggaacacctgatctgtggtgagctggcctttgaacattcccacagcaaaggacttagattcctgggcagagagaggcaaatttcagggctctggttgggtctggctaaggtccacctggcctcggggctacctaccgccttggccggttttttcctggtcagagcgtcagaggggtgggaatctgacttgtccagagccagctgggaaaagagacggttagcaagttcagggaagggacttccgctgtgtcaaggggagaacaggcgagagccgcgcggggaggcggcgcgaagcggtgacctttcccctagtttcgccctagggcaccctggcttgccctttcccctactttcggcgactgagcagtaggcaggtacctggcaccaagagggagatccctgccgatggcgggcgccgaagcggaccgccgctcccacacccccttgccaaggctgcggtgacttacctgagcggcacccccggcatagggccgccgggcagggccgggccggggctgccccaggagcgccgtgagccgcgagctgtggggagtgggggttcagtgccggcccggtgcccagggccgctgcccaccgtccctcttgtcacacacagaccttccgcccccgagcctcagcagctgccgccccaagctcgcggccatccgagccgcctgcatctccgaatctctccgggcgccgctggctcgagctctgacccagctctggcgtcctgcacgcccacgtcctggcgcccctaaccctgactcatcgtccacagtgcaccgggcggcggacggttgcgggccccggggcatgctgggagctgtagttccctggagcccggccctgcgttccgctgacttagagggatctccaagcgtccctcgtctcccccaaactccttaatcccgcccgtccgacctagagtctagtcctccgacggggtgatgggataggatgggacagaagaggaaggggcttaagtcactgcagccagagggatggaggtggactgaagggagggcttctccggtggggttagaagggaaaagtagggaaagagaagtgtaaggtagatggcagaggcagagacatggaaagacagactctagggttcctgatgawatctatctcggccaacacaaaagggagggtacagtggtggggggcacccaagctagggtgtgagtaccctaagtgtattcttctgagatgtaggccattcactaactcttggaacagctacagtttcacagtaggaagacccccccagattcactgcccctcccttagtaaagcctctgagaccttcctgaacattcccttctgtctttgccctctgttccttccagagacyatgtgcccaggcagatggattcctcccgggcctgagaggaactgcaggaattctcctgcctyttacccgtaaaaccccaacttctctagccctagggcaggaagtcccaaacaatttctacccctttttctgcaattctcattggggtgagaggaggcccaggaggagagagagctgggctcagcttctttttgagctgctggagccctctgtgaggaggccctctttgctggcttctcaggagagygtggctaggttctgcctgcctatgggaagagggggcyagggtgtgyggagcaagatggtggcggtgctggtgccttgggacctgggggaatgggacagctggtcggctcagagacggcctactttactcacagctggaatttagtggggagaagcagctcaactccaatcctggaggattagggagattaaagtgagagaagagagagatgtcccagagaccaagaggtgaaaaacagggctccttgtggaggggaggtctgggagcgaagtggggggctggggctcggagatccttctccccaaatctttccgtaggggctggggtgaagggcacagtctggggagatgaagtgacagtgtgttcatcttcctgtgttggcatcttccctgtcccaattctccttgcatctcactagctcccaggtcagccctctggctcctggcacccccactgctgcggtgggcacccccactcctcacagtgctgcatagcgacctcttccaggccttgctgggtgagtagcccgttttctgagggacctgggcctccaagggccattactgaacttcgggggctgtttgggagcccrgagatcatttggtccaagctggagcaccatgcagggtcctgcctatggtgtcctccatgagtgtggaccagccttggctgaaagggctcctcccttgccagccagccagcagcggtgatgacaggggtgatgtgcctggagaggcctggggtggggaggtaactcagttctgttcctgtgacagacatcctggactattatgwggcttccctctcagagagtcaggtaaggaggtgggggcgagcrcctaacttcctgaggggcaggcagggctggaggggtgagccaaatatcactaatattacctggaatcttgggggccctgctgacaaaagcctgagtcagtggcccagggacttggggcaccgagaatgcactctctgtggtcctgtacccactctccctttcttcctcgttttctttggctgccccagtttcaggcactaaagagtctagggcttaactttttaggtttccccctgagaaacctgagggagaactaggcccccagggattgcctccttcagctcctccctcacacccgaccccctaccgcctgccgagaggcctccctcccgtattcaaataaccgtgggtgctcccagcccaactatagatgcttccttctctaagaaatgaaatccagcctcatcgtctttgctgtcatcgctggtggctggccaggtctccatgtttgcctcaggggcctctgtgcttctgcttctatctcctttcccattatccgggttcctgccagcacagaaggagttaactctgccaaggcaccccccccattctggctcctagctccctccctccctccccctgcttcctctctcctcctctctccccttccctcttcggctccacggctccctcggccgctgccgtttccaacccccccaccccactcccccgccacggcccctagcccctggccgtttggcaagacccccccctacccsggggctccccgaaatccagttcccctcccccaccccagctcatgccccagcccccgaactccggggctgccagcccccggtgcccccgcccctcctgagaatcggggtgtgctccccaagccccctcccctccactggggagccccttttagggcccccttcccctccctcccacgctcccctccccttcccttctccaaccccctccttcccctctcacccctccccccatcctggccccccctgcaaaagtggggtgcggaggggggaggggtgagaacccacggaggggaggaacgaaactccgatgaagtcagagccccttacccgccgccgcggccaggccccccaacatggactgtctctgtatagtgacaaccaaggtaagcatgatggggggrctataaactggggggagggtatgagtttgtggggaggggttagtaggccttatctgggactggcgcccctggagtggcagcatcagaagtaagatgtatttgggggtcttaatttagttttggggttcacatctgagaaaatgcaggatttggccacaggtgccccctggagtgatccctttgtacctgtagggatatggaaaatttaggatattccatggttcggggggcctggcgggtttgggggttcatcagcgctgtttgagggagacttatttaaggagaagcctggctcataagggagtcctgctggtgtatgtgggaaggtgggctatgttggggggttcctctttcctccccagggaaaagctggcttccaagggccttgtccagttttggggggctcctggcatggggtaaaggttattggttgtgagtgcctgactgatctgggggtgtcagctggcagggaaggggtgggccttcagactctagaacaagcatctcgtggtggctgcatttagggatgctctctcaatttgagggaactgttaatttagggttcagtcatatagaatggaggtagttggaagttgtcagagggctggggccctggcatggkatcacctgagggaatggaccaggtgaggcaaggatttgggggtactcccataggaggcagaagattgcagcagccgagcttgccagcccctgaggaggaggatgagaggcttagggagagaggggatttgaggagggggaccgggtgggtggtgcacaatttgggggtggcccaaaggcaggtgcccaatatccccatctcctcccacactgtatctagccctgatcaagagagagggagaagagcagatgtggggactgttccagatacccctgacgcttgggatcaaggtgggggaggacacctggatttaagggtccctgagggcttatgaccgaagttactgaggttactggggtgaaaaggtgtaggaggagggcagggctggcagcgatggggatctgtgcaagagtgtccctctggttggagcctggcaaaggcaggagatctcggatggagcacaggcgagctcctggtgggatgcagatacctaggctctccttggagactctgggactggagagctggatgcctggtgtgtggagggaggcttgggcgggtggcaggcagctgggggctggggggtgggacaggaagtgggggccgggggaggcggggtccgggtgagtcacaggctggggagggggttatatttagtgggaactgcagcttttcatgggagggagctgaggacacacatgttccctgccacaaactcacacatgtgtgtacacatgcattgtgcacgtgtgaggatggttggaagagattgggggctgaggacctttakatctggagcccccaccctctctccaccagggcgactttcttgtccttcattctgtgggtttcgggctttctcccaggctgcctcttccccacatcccctgtagtttcggtggatttttatgcctcagtttctctggcctggtttcctctgctcccgctgtctcctgcccttaggcctgtcacttggccttaggctccatggctgtggtcccctgcattccaggtgtaaatagaaagcccgctggaatgtgtgggctctgcttccaacacgtgaacacacaaatgggagcgagggtgaggggcttgccagcaggcagctattctgggtgggtgggtggccttattcattacccactccagactcctacttcttccatggagcccagggttgagcatccctgaaggaaggaggcttacagagcagatcatgcatttggggtttacagaggcgtggagacccaggcttgccacattccttggctggaaaacttgtcagcctcggtatggtggggactccaactcccataaggccccgaggcaccagatccctcaatgttagagggttgctgcccatggcgctgttgggagttgtggttcatctctatccagggcagccagcggagggtagcccaagaggagcctgcagggggcacatggctcctgcttccccaaatgctggatggggyagggagtgctcaggctttgcggtcgttgagctccccagctctgcctgagtcttccatctttcattgcctatatttagactcctgccgcagtaatttaaggaacatttattgaaagcctactgcgtgctaggccctgtgttgtgtgcaaactccactctacagcgatcactttgtctttcttggtgcctttatctctgccagaatctctcgtctctgagcatctctttctcccactccgcccccgtccctccccctttccccgcgctgctgccgccgttgccatggtaaccggcgacgactgaagctgcgtggcggactggagggccgggcgagggtggcggaaggcggagcagaacaagtgggggtggggatacagtgggggaaagactgaggytatttgccagagccccaggagcgaagcgkttaaaccctccgggtggtccttattgggcaaagccgagatgccgggggcggggcagtgtgkccgacggcctcattcattggccgtcaggggcgtggcggagggacagtgtgggcgaggcagggggagcgaacgggcgggaagtggacggaggcgtggcctcccgggcaggtgggtggggtctggcttactctatcgagggaggcagcaamcttcggaaaggggaggaaccttggggctgggttacctgaccgaaatgagggcggggctgacctgggatgggcgtggcgtggccccccgtgcgtaaaggagacagggtttgaggagctattgtccaagtaacttcagggcgcgggggtctttggaaaggagaatccgggggttgggaagtctgacgtctcaattttcctaagatggaggtctgttcagatttcatcagagcacccctcctacctcagctctgtgttcccaggagacggttgctaggcgacggcaaagtccttgattgctgcgttgccaggcaacagagaaacggaaaatggagggaaaagggaaatgggggatggggaagggtctttatgggccatggcgcccactggtggataagcagggcctgcaggttttctattctagaaggaaatttgagtccagccccttccgcactgactccttggatcctctggtgatccaagccttcctaccagatatgaaactaggacattgggggtcatcttgggggcgcatgtaacagatgccgatcaacggggtcaatctcgcttgggtgagattctagggaagtcgtcatttctaccatgtatgggcattttatagaagtcagccgatttgaggagacccctcactgggttttaagagctggaagggtgggcgttcaatgggagaatatttggaagagaggctttcaggttaagttgtttgggagaaaatggaaatctctgaagagacctgaaggaggcggttgggagtgttctggacgatttgtgggtcattgcagattgccggccgtatctttggtgtgtattttttgagkcctgagtgtggagaagatatatttgggagcaatcttccgacaaagttggaattcagaatcgtggaggggatgttctgggcagacagaaaagggtgtaatctatgaacctcaggggtaaagaaaaggagaggaggtgccgggtgcggtggctcacacctgtaatcccagcactttgggagcccgaggcgcgcggatcatgtgaggtcacgagttcgagaccagcctggccaacatggcgataccccgtctctactaaaaatacaaaaaaattagccgggcgtagtggcgggcgcctgtaatgccagatatccgggaggttgaggtaggagaatcactcgaacccgggagccggatgttgcagtaagccgagatcgcgccattgcactccagcatgagcaacagagcgagaatctgtctcaaaaaaaaaaaaaaaaaaagaaagaaagaaaagaaaaggaaaaggaaaatacttttaattaattaattattaatttttgagaccgagtctcactctgtcgcctaggctagagtgcagtggcacgatctcggctcactgcaatctctgctgcccagattcaagccatcctcctgcctcagcctccctagtagctaggattacaggcgcctgccaccgcgcccggctaatttttgtagttttagtagagatggggtttcaccatcttggccaggctgatctggaacgcctgacctcatgatccaaccgcctcggcctcccaaagtgctgggattacaggtgtgagccaccgtgccaggccaaaatttttttttttagagatgggatctcactatgttgcccaagctggtgttgggcacctggcctccagcgatcttcccgtctacatttctttttataagagttttggaaaaaattgacgagattgctatttaatttggagggtctgctttaaagtagattaaatatttcctgaaattgggttctggtgtggatttggagactggcatattaggaagtcatgagtatcttattagattcgggggtttggacaggggatccccaacaaattagaggacttgttatttggatgtttatattagagcaagagtaatatttgcactaattgcaacatccctgttagtggattgggagatagatgtgatatagaaagggatgatttagcatatattaatttggggggccaacaaggctctgtggttccttaaactcttgaagaaacatgggctgcctatcaggtggggctggactgcaggggagaactatgctggttagagtaggagatgccttggaatctgaggagatgctatccacagcaccaatcttgcgggggtttggtgggagaggcagtgtagatcccttgggggttcttgtgagagaagtgctgtttgtttccctggactctgggaggccagtagtgacgagatgtccagtgaggttttggaatggtttggggtctcgcgatgttggggttgggggattagatgggatggaataaggggtccctgagaactagagagataaactggtaaatttaagtctgtctttaattgtagaggggtcggaatagaagtatactgtggaaagtgaagttcacagagaaacagcgtgaaccagggaagttggtggctaagagggtctcccctcacccctctctcccaacgtgacgctcttccttactgcgcaggcgccgtccccccccccgccgcagcctccagttgccgcggccgccgcagcccccgcccctctgcccctccccctcccccaacccccgggacccttgatatcccacctacccccttccctcagtccccctccccttctccatgtcggctcggaacagattcgcctccatgtgtctctgcgtggtacgtgccgcggtatkggctccggcccgctcccccttcccggacccccgcaaatatcagggtgcaagcttcaagcgctgtcgctcttccttctgcttggtgcggggtctmtgggttgcaacttctcgtggacaggcgccgtgggtcgcccctcttatcattcactttgactcacacccctatgttttgggggtgcaagcctcagttccaggtcattctgtgcaactggggctctggtgaggagggggccaaaggggaaggaacaacagcgactccgtccgtgtcccccattccccaggccttttacttgttttaagccctaatatattgggggtgcagatatgtcccagtagcatctgagttgtctgggttagggccctgagtcccagtaggataaaggatggggggggtcctcctttcccgtcctgctttagttgccctgtaatccaagactgagaggtgctgatcccccacckycccagccccccagtctgcagtttcagaattactctcccccgcccccacccccacccctcccgacgtttctccccgcccccctacatgtacgtcgaaaatttccagagactgaacctagtccctaacctcttccagccacattctggaaaccctggcacccatttcttgttccccattttctccatgttgcctcccaatcctgaggagccttttcttcagtgccagacaccaccctccctccatgggggtggggcagggagaggtattgggggctcgctgagataaaagtttaccttcatttcctccctagaataaatgatgaaatggccctcctcatgtttccattttctttgggtgcacgctgacatttcctcctcagattcaggaattttctctctgaggtggagtgaagatggagaggcamtggactcaaaccctcccccagactccaaaacttggagctttggtcctaatttaccttgcagggaattggaggccttgtgaaggaagagtggatagyggagagcggcttccaccccttcccccaggtctcaattmtggggcttgcccctcagcttgtgcactgcccaggtagaagaccaccttctcaggatgtggaatgaacagtctctgttggttcatagaactcctttattcaagacagctcagccttggaggagggctattttgtgtgttctcctattttccttctctactttttgtgcccatcggattgaaatctggagttcaggattctctccaagtctgtggcccagagaatagactcaatcttgctgagcccgttttccttctttaagactctttaaatgtatcagggtgcttcttgatttgagttgtctctgtgttctgggtttgagagttttcgtgctgacaggaccacttcccttctcccattctcttactgtacccttactctacagccaaagttgtgttatattctcagccttgattcatcatctttaacattttcagaatcctactcaaggattggccattgaccttgataagcttcctcccatttgatctcgcagctgctgccctctaagtattagggcactctcagcctctcagaaacttttgggagggaaattctgctcgccctctctcttttttgttttggagatggagtctcactctgtcgccaggctagagtgcagtggcatgatctcggctcactgcaacctccgcttcccaggttcaagcaattctcctgcctcagcctcccatgtagctaggattacagccatgtgccaccaygcccagctaatttttgtatttttagtagagatgggatttcaccatgttggccaggctggtctctgacctcaggtgatgtacccacctcggcattataagcatcagccactgctcctggcctctctctctttttgagacagggtcttactctgttgcccaggctggagtgcggtggcgtgatcatggctcactgcagcctccacctcttgggctcaagcaatcctcccacctcagcctccttagcagttgggactacaggtgtgcaccaccatgcctggctaatttttgtattttttgtagacagggtttcactgtgttgcccaggctggtctccaactccarctcctgggctcaagctgtctgcctgcctcagcctcccaaagtgctgggattgccgtgccttctctttttacccatgtgtactgggcggtgcattctgtcttcttcagttcctgagggagccctgcgtatgataccttccccttcctgaacctggagcttggagggtcagtctctgtggaggcccgttccagaggagaggagcaggcgagggcagaggcggacacggaaggacccaggcagaaacgctgtcttcttctgctgtctccatctgcccttttcctccttctctggcccccagttaatctcattttactgttgtccctattaagctagcacaggaggcccttgggatggcagctgattaactgggcagggagtcaggggtcatgttgggcctttcaccccaaaagagcagagggagaccagaaattcactctgaggctcagcatgctaccctcctccccaaccagggaggctggcacccattcttgcccctgtcctgagccctgctgtctctgttcttccccttcctcccccagcccatgcccttatagcataaccggattagctggctgggctgtgggctgttgcaggggtagggccagactcccggggcccctctgttgactgcttggaaaccagcaagggcagtgaactggacaggcttagccttgtcctgtctcgggggctgataccaagtaccttctggtggaaggggtgacttcagtccttgcctaaggagtgcaaggtaaaggagagccaatcacctgtggggtagaggctgcaatggggagactgaggccatggaggtggggcgcggggaggatgccatgcagagtaggagcagccagaggggtaggggaggggaggctagaacaagagtgagtctgagatggtgagagaagcaaggaagttggggactggaggcagagaatggagatgtgagtgtcggggctagagctctgagaagctggagggactcgaagatgaaggtggtggggaaaggggtgaagacacagatgccagaggggctatgcccaccagaaggccagtgtcccaggatgtgaggagtaggagttgggggatgggattgggacctggggattgatgagaggtgctgaggccctggcgggagagggggctgttgggagagtggagagaggggagccaatgggctagaggagagggagggggaggagctggtcaggccccagggccttccgcactgcactggctgggggaagaggcggcggccrgggcggccagcctggagcmtgaggcaccgggctggccccagtgacacctccgtccccatccccagaaataccgctaccaagatgaagacacgccccctctggagcacagcccggcccacctccccaaccaggtaaacgcccccgagctggtgcacgtggcggagaggaacttgtcccacctcgaggctggccacggggtcgtgggccacgcccacctctcccccttcaaggtaggagaccctggtggccccctccccagtgcggccctcggagcctcggagctgcagcaatccctaagggccggtagggtgagagagagccgtggggagggggatgctgggactgggggcgggggtttggggcttgggctcctggggtctgggggagggggcgtttgtggggctggaaacaccttggtcccacagaggagaaacaggccaggccaatgggagtggatgtaaagcctaaagcaagaatgtgtgtgtgcgcgcgtgcctgtgcgcgtgtgctgtgtgtgtgcctgtgcgtgtgtgcatgcatgcgtgcctgtgtgtgtgctgtgtgtgtgtgtgcgtgcgtgcgccgtttgtgtgcctgtgcgtgtgctgtatgcgtgtgtgttgaggtgtgtgcatcccccaagaggcccccacgcctgggacctcttcattccttcacacccccaacctccatttccattttctgtgtccagagctctgttccaagcgcctgctgccctcatttgctcttgtcccttccccgcctcctccccctacctccgcctctgggcctggctcgccctgtccccaagtctccagctctttccatctgtctggcctgagacttcacatggtggggccttgctgcctcgtcccctgccccagctttgctccactcctgagttctcttccccctctgcagcctttcctccctgctggctggctggctggctggctcttgatgctgtctctctcttcctcccacgcattctcctctccctctccctgatccccagcccaggccgctggggcctgatcagtcctttccctcatcagtcctctccctccatcagccagctcccctttcccatgttccctcttgcctattcatcttcaccttccctcttttcctcctcccctctctcatcctcttgggttckcacctctgccatatcttctttctatccccctctgccccctccatcatccccyaccacctgtttccctttctcctctctgctcacagcgtcctcctctctccagtcccgggaggcctggtttctgggaccttccattctccagtccactttccatcttccccttcctccatctcctcttctggggacacaggatggggaggactggagagcaccaggcaagctgtgagattgaggggacactgtggggtcagggtggggattctaggatgttgtgggatgctctgggaagggggaggttgctgacatttcaccaagaagatggggaggaggtctctgagcctagggagcgggcaagcaggttctggagttagaactggcaagagaggagttgggggataggaagggtaagaggtcctgggtcaggggccagatagggataagactgtgagatcagggcagtgaatgaggcygacagagcaaggaaaggaaggccctggagacagggatggtacagagtgtttgtgcgaattctgtggatgctaggagtgagggaaagaagactagagatgctttgtgcaaggcagggccattaaatccctgagcagggggaagaggaggtagggagcctgaggggtggtagttagtacagagctgctgctgatcagagctcaggagcagaagggggtggagggagagagtgttggaggccataagcatggggtggaggtctcaggacaaggcctcacctggggaacaggagaagccccaattttcagaagagaggggagttgattgagaagtgtaagattgttacttgagaataatcttgagggtatgaaggtagggtaagggagaatggtgataaactctctggggaatcagaaattgagatggagtagctgggtggggtggcatgtgcctgtagctactcaggaggctgaggtgggaggactgcttgagcccaggagttcaaggccgcagtgagctatgatcacaccactgcactccagcctgggtgacacagcgagaccttgtctctggaaaaaaagaaattgggatggaggatgaggccacattggtaagggatggggctggagggtgcgacagggccagggaagcggatggagaatggaggctggggttggaagatggatgttgaagggcgagacagggatggagatggagcatgtgggatgcgggcagagatagggatgggaagcaaatgaatgtcgtagtggatgaaggtgggtgtgctgggaaggaggttccaggatagggatggggatggggattgaggatgggctatgggatggaggacgggctatgggatggaggacgggctgcgggatgggggacgggctgcgggatgggggacgggctgcgggatgggggacgggctgtgggatgggggacgggctgtgggatgggggatgaacacgtggatgagattttggcagtcagtgactgttggttggacaacagcatttgctgatatgtgaaagggttggagggtggtgttaatagatttatgggtgtgaaatctgtgatacagcttgaaaatggtcggtagtttgtaggcttgagaaatagcagtaggagaggggagggacccctttggacggggagagcgggaaggagactrgggaatccttgcgcttgggcgactgcaaatacatgtttctttaaggaggaagtaggttggggaccccggaaggaggctcttggcggcctccccccattgccatagagacgtggcttcggttgccctggcaattggggaagcccctaggaccgggctaaagcgggccccgcctgggagtctagagaccaggcgaytgacgtcagggacctgggcacgccccactttaaccctttcccgaatgaagtggggggagggagtagatgagcgggataggacccggatgtctttcaccactcccmgttcctgacgtcctttgcactgcgtagggtgaggggcgtaggggagcgaggaaggcaggttattcaggatgcgctgcgcccacaaacctcttcagcccggcctcctctcggcctggctaacgtggggcggggcccagggcaggagaggcggggctagcggatcccttctgcgctcaggagtttggtcggccccaggscacgccccacccccctgttgtcctgacgacagggcctcctggaggtgggtctccccgggtcttgactggtcctagataccgttgctaggcaacacggtccttagaggaaggggtggattggacggctggttggtgagaccgagggaggggcctgcagctggggaaccccggattcccggggtgcagggtttagggcaaatgtctgtgaaagtgaggggcaagtctaggggagggttatgaaaatatctgggtagatatggggggttggggggatggggcaggaaatggggaccaggacccggtggacatgatccctggggtgtccatgtgtagcacataaggcatgtaacaccctgtggtgttacatccggtgagaagctcccttcccccaagcctacccccctctccccactctttgccatctgctgctcccctctccgtctggctgtctcccttcccgcttctcctacacctccttccacatgcagggggccccgggctgggcagagttagatccttgcgcgtgtgcatctgtgcgtgtgtgtgcgcgtgcgcatgtgcacgcgtgtgcgtgtgtgtgatgtggattgaggctgggcccttgagcagctctcagggtggcggagtgggcttggctaagaggctgaaagggtagccacgctgatgggaccctccgttatgggctccctctcgagtcaaggctcaggctgctttttgtctcttgttttcccaaacaggccaattctcccccagtgattgtcaacacagataccctagaagccccaggatatgtgagttgtttagattttggggctggggccattgcagaaggaaggagggagtaagggagggcagcagatgacgggcaggtggtcagacaggaatgtctgtctcactgcttttgtgtttctgtcccgtgctggagttgcaggtgaacgggaccgagggggagatggaatacgaggaaatcacattggaaagggtgagcaggctcctccatcggcagtccccgtggcctcccrtctgtacctttctttctgccatgtggtctgggtggctagcccctcaccctgtgccttcctcctctggctgctccaagccatttcccaccccacttgccttgccagacttgggcagtgaggggagctgaccctcttcccctccttcacccagggtaactcaggtctgggcttcagcatcgcaggtggcactgacaacccacacatcggtgacgacccatccattttcatcaccaagatcattcctggtggggctgcggcccaggatggccgcctcaggtggggagaggagacaggggttargttgcttggtccctggagagggagggccagggcagcaggaagctcttggctcaggcccaccttgctgctcccagggtcaacgacagcatcctgtttgtaaatgaagtggacgtgcgcgaggtgacccactcagcggcggtggaagccctcaaagaggcaggctccatcgttcgcctctatgtcatgcgccggaagcccccggctgagaaggtcatggagatcaagctcatcaaggggcctaaaggtagtaactcattttgttcccacccccatcccaactgtcctgtgcccccaagcctgcttcctgggcacccacctctggcctcccctccatccaggtcttggcttcagcatcgcagggggcgtagggaaccagcacatcccaggagataatagcatctatgtaacaaagatcatcgaagggggtgctgcccacaaggatgggaggttgcagattggagacaagatcctggcggtgaggactccatctagcccattttctagcccagatytgggtctcacctactagccctggcaggcccaagttcatcacttcaccccagtgcttctgtcttgggccatttgtggctttgtctgagctttgctttccttgactccaggtcaacagtgtggggctagaggacgtcatgcatgaagatgctgtggcagccctgaagaacacgtatgatgttgtctacctaaaggtggccaagcccagcaatgcctacctgagtgacagctatgctcccccagacatcacaacctgtgagagcccttcaaacaccaaagttccccatgacccatcccgtttaacccatkacatgcagtcccacgacatccctgtagctgtccctcttcagatattccctatgaaatagccacaacctctgatccttgctgttgttggagaagagatggaaaatcaattaccataaaagaactagaaaaratcgtcaacgatctctctcctggaaggcacaaagcctggttggttttatggctaattttgtgaaattctcaaggaatagataattcttctgctcttccagagtacaggaaaagataaaagatttcacatttcattttataaggccagttcgaatggtcacaaggatagtgtaaaataaggagagtatagacccgttttgcttctgaatagagatacaagagtttacaataatatagtagcaaagcaaacatggcagcatgttaagggaataacatagggtttgtttcagaaaactaaagatggctcaatattaggaaatctcttaatatgattcatatattaaaacgttacgggaggctaagtgtggtggctcatgcttgtaatcccagcacttgggaggccaaagtgggaggatttgagaccagctagggatttgagaccagcctaggcaacaaagcgagatcctgtctctaaaaaaattaaaaaaattagcacgtgcctatactccttgctacttgggaggctgaggctggaggatcgcttgagccgaggagttggaagctgcagtaagccaatgattgcgccactgcccaccagactgggtgacagagcgagagragaaaacgatgtgattatctyaaatagacgtgaaaaaggcatttggtgaaattcaccatctcttttggatgaaagcttttagtaaactaggaacacagaaattttccttaagatggtgaagactagttatcaggaaccagtaacaaacattttataatgatacaattttagcagtgtgtccattaacttattttttaatttaattttaatttttttcttgaaatggagtttcgctcttcttgcccaggctggagtgcagtggtgtgatctcagctgactgcaacctctgcctcccaggttcaagtgattctgctgccccggcctcccgagtagctgggattacaggtgcccaccatcacgcctggctaatttttgtagttttagtggagacagggtttcaccatgttggccaggctggtctcgaatgcctgacctcaggtgatctgccctcctcggcctcccaaagtgctgagattacaggcgtgagccaccgcgcccggcctccgttaacttacaaagagggcagggatgcctcttcccactgctattattcttcattgctttagagcagggtttctcagtgttactcctgacatttttggacccaataactcttcattgtggggggttgttctgtgccttgtgggatattaagcagcatccctggcctctgtctatcagatgacaatggtactcctccccctcagtcataacaattaaaaaatgttatgacagaattgccccagcgaaattatggtggttgagaatcactgctttagagatttcagacagtgtaacaagacaaggagaatagttacatttggaagggaaaaacaaaagttatctctatttgtaaattatactactgtgcatctagatcaaaatctaagtgaattaactggaaaaatatgcaaagttaagaatgtggctatttgttggctgggcgaggtggctcatgcctgtaatcccaacactttgggaggccaaggcgggcggatcacctgaggtcaggagtttgagaacagcctggccaacatggagaaacgctgtctctactaaaaatacaaaaaaaaattagctgggtgtggtggcsagcgcctgtaataccagctaatcctgaggctgagacaggagaattccttgaccctgggaggcggagcttgcagtgagccaagatctcaccactgcactccagcctgggcgatagagcgagactccatctcaaaaaaaaaaaaaaaaaaaaaccaaaacaggctgggcgcgccggtggctcatgcctgtaatcccagcactttgggaggccgagatgggtgagtcacctgaggttgggagttcgagaccagcctaaccaacatggagaaaccccatctctactaaaaatacaaaattagccgggcatggtggtgcatgcctgcaatcccagctactcaggaggctgaggcaggagaattgcttgaacctgggaggcggaggttgcggcgagctgagatcgcgccattgcactccagcctgggcaacaagagtgaaactctgtctcaaaaaacgacaaaaaaaaaaaggaatgtggctatttgtaagataaataacaggaattagtaacttcccagcaataagaaaatgtagtgaataaaaagcccccttttgccatagaaaaaatttctataaaattattagaaatagaaacttgacaagaaatgtaagatttgtatgaagaaaatgacaaaactttactgaaagacataaaacaagactggaaggggtgaggagtcacaccgtgtctctggatggaaaaacttaatatgctaaagatctcaaccggctccaaattaatctacattccattcaatcctaatcagaattttaatgttgtttccctactgggaacttggaaggttgacactaaagtttgactggaaaaatttgtgtggaaaagctaagacattttggaaacaaataatgaggtgtggcagcccctacaaaatatgaaataatactgtaaaaccatattaaaatcatgtggtactattcctaaataccataacctaacaaaaggaacctgggctccttggaagaagggtcaatttaaaatctttttttttcttttcttttttttttttttttgagacggagtctcgctctgtcgcccaggctggagtgcagtggcacgatcttggctcactgcaagctccgcctcccgggttcatgccattctcctgcctcagcctcccgagtagctgggactacaggtgcccaccaccacgcctggctaatttttttgtatattttagtagagatggggtttcaccgtgatagccaggatggtcttgatctcctgacctcatgatycccccacctcggcctcccaaagtgctgggattacaggcctgagccaccgtgcccagccaatttaaaatctttggcaataaatctgtaagatgagcttctaacttctttcatactagagagcaaggaaggtatccaggactaatagggtctcagcaaagacacaggatccaaactgaaggtgcttctactgtccagtgaaaactcgttaaatatattaaaatctttaagatcataataatacttaaaaatattttggctgggcgcggtggctcatgcctgtaatctcagcactttgggaggttgaggcaggcggatcacctgaggtcaggagttcgagaccagcccgcccaacatggcgaaaccccgtctctactaaaaatacaaaaaattagccaggcgtggtggtgggtgcctgtaatcctagctgctggagaggttgaggtgggagaatcccttgaacctgggaggcagaggttgcagtgagccaagatcgcaccactgcacaccagcctgggcgacaagagtgaaactccatcccaaaaaaataaataattaaaaaaaaaattggaggatgctaggcaatctcattcattctgaaattggtgaatgaatggaaagaggcatgcagagagaggcatgcatttatcctccctttcatgtaccagctacctcagagagtaaccaacaggttgacatagggctgtttttttgtttttgtttttgctttttttttgttggaggcaggtcttgctttgtcacccagcaggctggagtgcagtggtgtgatcttggctcactgcaacttccgcctcctgggctcaagcgatcctcccacctcagcctcccgagtagctgggattacaggcgagtgccatcatgctcagctaacttttttttttttttttttgagatggagtctcactctgtcacccaggctggagtgcagtggcacgatcttggctcactgcaacctctgccgcccgggttccagcaattctcctgcctcagcctcccgagtagctgggattacagggccctgccactgcgcccagctaatttttgtacttttagtacagatgggatttcaccatcttggccaggctggttttgaactcctgaccttgtgatccacctgcctcggcctcccaaagtgctgggattacaggcgtgagccactgcgcccagcctcagctaactttcaacttttgtcttttgtagagatagggtttcaccatgttacccaagctggaggaattttttttttttttttttgagagggagtctcgctctgtcacccaggctggagtgcagtggcacaatcttggctccttgcaacctccgcctcctgggttcaagcaattctcctgcctcagcctcccgagtacctgagattatagacgtaagccagcacgcccagcctatttttgtatttttagtagagacgggatttcaccatgttagccaggctggtctcaaagtcttaacctcaagtgatctgcctgccttggcctccacagtgctgggattacaggcatgagccatcgtgcctggtcgagatttttcttttttacagaagaattcccactagtaaatgacaatcaccaccattttgcagtccttgatacttatcagaaccaggcggtgattgtcagtgtggctaaaacttacctgaaaggctgatggggcgctagataatggatggactgggctgatgaccctgaacctaccattaatcttacctgacagaaagacaaccaggcattattgcatcctgtggtgatgctgtaggaagaacgtagcgctacctatgaagtatacaggagttactaaaaaaaactctgaattgaacttgaaactgatcaagcctccagaatgaactgccagtttacaggagatacaggggcagaggcataggctaaacaaaccacaggagggtaagcagtaatwtccctgttagaatttccctcataggctggtcaaggtggctcatgcctgtaatcccagcactttgggaggcataagcgggtggatcatttgagttcagaagttccagaccagcctggacaacatggtgaaacactgtctctactaaaaatacaaaaattagctgggcatggtggcgcgcgcctgtaatcccagctacttgggaggctgaggcatgagaatcacttgaacctgggaggcagaggctgcagtgagccaagatcacggcactgcactccagcctgagactccttctcaaaaaaaccccmaaaaaacaaaagaatttccctcatagaatgtgggaaattcttttagacaaatgacctagttttttcaacgaatggatggcagagaggtggggggaaaaaagagggagaagaattttatggattaagagattcgagtgacacaggaacccagagaaaacccccaaagcgtaatattaatgctccctttgacttccccatccctggcatactgaggacatataacgttcaaatcctttatcccctaggacaaccagcctctgatgtcacctataaattcctgacccctgatgtcactgtgatctgatatccccttaccaccccaccctggcatctctggcagaatatcttcccttccacctaactttggctcttctggcaccctggggagaaggttgggtggcgggtgctgtttccctccaggcactttcatctctgccctgtcttcctcagcttattcccagcacctggacaatgagatcagtcacagcagctacctgggcaccgactaccccacagccatgacccccacttcccctcggcgctactctccagtggccaaggacctgctcggggaggaagacattccccgagaaccgaggcgaattgtgatccaccggggctccacgggcctgggcttcaacatcgtgggtggcgaggacggtgaaggcatcttcatctcctttatcctggccgggggccctgcagacctcagtggggagctgcggaagggggaccagatcctgtcggtgagggaaggcctgcccctacctgcaccaccccctccccacagggcagagcgcagagctcttggggaggggcctggatgggctgcagccgagtcctcttgcgggaccactccctgctccacctggacccagaagtgctgcctcctgtctctggtgacacagcctgtcgtcctctctctaggtcaacggtgtggacctccgaaatgccagccatgagcaggctgccattgccctgaagaatgcgggtcagacggtcacgatcatygctcagtataaaccagaaggtaccaggcyggaagttccttgtcttgtgagctgaaatggcccttagaactcttcctcagctgatggcttcagtaggggaggacaggggtgacagtaggatggggacagagctcagaaacctccctgtccttcctcagagtacagccgattcgaggccaagatccacgaccttcgggaacagctcatgaacagcagcctgggctcagggactgcgtccytgcggagcaaccccaaaaggggtttctacatcaggtcagaggcttcccgggctggactcctcagcccctctgygttcctgggcactctgtgcctggcccgggcctcagccgctcctcttctccaccctgcctgctctagctccccaccccaggcctgaggcgcagccagggttcatgggcttggctgcacaggttaacatttgaaatactccctgtcgatgggaaaatagcctctgccccaagtatcccaattgccttctagcccctggtcatcccagcacttccccgggactcccaggccaccccacaatttggcgtctcgaaggttaatgcttggtgaagcagggtcctctagggtatttggagtgttgccccagccttcacgtccctgtgggcagtcccggakacgtgggccgcagctctgtggtgcctgcccccgtctctccagcggcattttgctcccctcttagggctcgtctccattgactctttttgtggcttaggtttctgccaaaacacacctctctcccgcccccgggggtcacccctccacttctgtccctgtctggccctgtggcttgcatggcctcgtctgccgctgcgctstgcagatgtctctcggaggtgctggccctggctgacctatttccagaggtcaagacctgcacttctggccattggctttctggccatctccactgggatgtcccacaggcgtcccacactcaacatgtcccacgctgagctcatcatcctgctgtgggcctgggttccatcttgctgtgccagcagtttccctcttgttggatggcatcaccagccacccagacactggctcccacctgagcccttgctctgcccttcctccctgctcgggtccggttggtccccaaggttgttctgactcccagtgaccacagaggttgtgtagtggctcccaggcggaatgtcatctggttgtcacacttccagggggcccggggtctcctccctcctctccaggcccattgctttcttctgtgtcttcattacttccctggttctgaccccaggggttgtgacttactgatagaaatttgatactggtaagggtaaccattatttggaaacacgggacattttctttttcttatgaattygggcagattcagggttacccctgtgactttatgatgtgcgtgtgtactgcacactgctttctgtttttctttttctttttctttttttttttttttgagacggtgtctcgctccgttgcccaggctggagtgcagtggcgtgatctctgctcactgcaagctccgcctcctgggttcatgccattttcctgcctcagcctcccgagaagctgggaatacaggcacccgccaccgtgcccggctaatattttgtatttttagtagagacggggtttcaccatggtctcaatctcctgaccttgtgatccgcccgccttggcctcccaaagtcagctgggattccaggtgggagccaccacgcctggcccaaactgctttcttgagagggtcaagttcaagccctgcctctggaaactgtgctcagtgtggactgagtgatggctaatagttgttatgagttatagtcagcgtttggtccccacacagttttgggttcctcggcatccatagctcccatgggagtgccatctgcagacctctgggccgggtctttgggtgactggggcatccttcctggagtcctcagctgggctctgaccgatagccacttgccctccagggccctgtttgattacgacaagaccaaggactgcggcttcctgagccaggccctgagcttccgctttggggatgtgctgcatgtcatcgatgctagtgatgaggagtggtggcaggcacggcgggtccactctgacagtgagaccgacgacattgggttcatccccagcaaacggcggtgaggctcctgggctctgtagccttcctgccacaggcactgaagttcccaaggtcccccggggtgggcagccaacaggggatgggtttgccctctgaactcctaggggtttgtctgttgggccctcctggggtccgtggctcccatgagcctttgggaaggacaactccttattgaggagcacagtgtccagggctgcaggagaaggggtgtcagctggcccagagtatggagaaggggttgtcagctggctcagagcatgggggtggcakggggtaggcattcccctacccgcgtatccctccatgtatcccacagggttgagcgacgagagtggtcaaggttaaaggccaaggtaggtggaggagggtgtgagcctgggtgraagtgtgagggctcatggagctgagctcataactaacccygtggcctgctttttcttcttaggactggggctccagctctggatcgcagggtaggtagggttagttcgggaagatgtgggtgagaggagcactgagttgcttttgatatcctcaagggggagacagggctccaggtcccctgtttcagagccccttgcagatgccccacctcccaccaggtcgagaagactcggttctgagctacgagacagtgacgcagatggaaggtgagccctggcccctgccttggccycagcacttgctgctcccccaaccctgcgctcggcctaagccaggctctctctgcagtgcactatgctcgccccatcatcatccttgggcccaccaaggaccgcgccaacgatgatcttctctccgagttccccgacaagtttggatcctgtgttccccgtgagtgctggggccttggatggaggagaaggtggaagtgggggtggggcakgggakgcccatccctggggccataggcagagcctcctgggggatcggtgtgtagggagatacagggtttctccgagaaggggtgcttctcagccaccctctcattccatagtacccatgcccaggccagagacttggaggccctggagggtgctaggggaagcggttctggccctctgcagtcttggtctccctggcagctccctttcaccaaaggaccagctgggcactatggggatttgattgaagtaggcaggatttaagctagagggatggtggttagatctttggggggtggggtgacttcctggcagatacgacacggcccaagcgggagtatgagatagatggccgggattaycactttgtgtcgtcccgggagaaaatggagaaggacattcaggcgcacaagttcattgaggccggccagtacaacagccacctctatgggaccagcgtccagtccgtgcgagaggtggcagagcaggtaggacctggcgggcacccggtcctcttccttctcccctctccccaccccactgcctccctccagctttctctaactctctctctctctgtctctttccctgctgggtctccactccgctcctccacctccttctcctcttgggcaactctgtctgactgcctgctctctgcccctgctctctctcccacctccctcacttcctgaccccaaattccccaccaccatctggcctctttctctccccactcccttctccttgccccatttctcctctcttcccatggccttgtctttggtggcttggccttccccactgggtccctccctttttcctgactccccgctggccctctcccctgcctcacccttttctggggcccggctcccctctcccactcctctgctaactcctttcctttccccgctgctcctcaccctgccctccctccctccctccacggttcctttctccatctgcctcactccctcccatctgtctccttgttccttccatctgtctgtcctctgtccgtcctcccctccctcctccctctatcctacttcctttctcctttttcttggctttccttcccgcctgtgtcacctctgccttgcacaccccgccccactcgctgctgccccggctctgccaccatctcttgggtccctgcctgcctggtgctcctcccttcctccattctgtcctgtccctgccctctcccgtgctctccatcttccctttcctttccctctrtcttttactctgtccatacccgcttcctgcctgactctctgcccccstgtttcttsacatccatgtcactccccttcggccaacttcccattccccacctctccccgtccgtgtccctccggcactgctctctgtcctttctcgccacccgctggcccccctccgcccaccctgcctgcccccaggggaagcactgcatcctcgatgtctcggccaatgccgtgcggcggctgcaggcggcccacctgcaccccatcgccatcttcatccgcccccgctccctggagaatgtgctgtgagtatggtcckgggggcctcccctttgctcccccaacacctgtggccctgggcctcacaaggcgtctgcgttcaactctcccttcagaaccctggacagcggtttcagcagcccctgasggggatccctggaacccagaggatgtgggggaatcgggtctttcccctcctctcctgccttggctagacaggactacatttcccagcagcccctggggcataccagctggggcgagtcagggcctctagggctgttgggaattggagtccgaatcccatctctggggctgaaggctggaaggatgaagctccgtagatgtccctggagtagccacacctggctggggcggttgcgggtggcaggggggtggggggtggttctcatctgtggccccagaggatattgggaattgtatttttttttttgctatgtgctccaaatagaagaatacttaacattcctggatagaggagataaaaggcagggtcaggtgggtccagtctcaggcctgctctccctccctcttcacagagagattaacaagcggatcacagaggagcaagcccgcaaagccttcgacagagccaccaagctggagcaggagttcacagagtgcttctcaggtgaggccacagcaaggctgttgccagcatgtagggtgcccttgctcggattagaaagagctcccccgccacccccagtggatggcttagaaagaggtgcccctgtgggcgcggcatggtggctcacgcctgtaatcccagcactggcgggcacctgtaatcccagctactcggtaggccgaggcaggagaatcgcttgaacctgggaggcagaggttgcagtgagccgagatcgcaccactgcactccagcctggcgctaagagcaaaactcaatctcaaaaaaaaaaaaaaaaaaaaaaaagaggtgcccctgtgggmgggtgcagccccaggacttatggcttggagagttggaaagaggtgccccttcctctgggctggtgcaacccccttggccaggtgtcctctggcccttccttggcctcactccctgctmcaccccactcccagccatcgtggagggtgacagctttgaggagatctaccacaaggtgaagcgtgtcatcgaggacctctcaggcccctacatctgggttccagcccgagagagactctgattcctgccctggcttggcctggactcgccctgcctccatcacctgggcccttggtctggactgaattgcccaagcccttggctccccccggcctccctcccaccccttcttatttatttcctttctaactggatccagcctgttggaggggggacactcctctgcatgtatccccgcaccccagaactgggctcctgaacgccaggaacctggggtctgggggggagctgggctccttgttccgagcccttgctccttaggatccccgcccccacctgcccccaatgcacacacagacccaccgggggccacctgccctcccccatcctctcccacacacattccagaagtcagggccccctcgaggagcacccgctgcagggatgcagggccacaggcctccgctctctcctaaggcagggtctggggtcacccctgccctcatcgtaattccccatgttccttgatttctcatttattttttccmctttttttcttctcaaaggtggttttttggggggagaagcaggggactccgcagcgggcccctgccttccacaygcccccaccatttttctttgccggtttgcatgagtggaaggtctaaatgtggctttttttttttttttcctgggaatttttttggggaaaagggagggatgggtctagggagtgggaaatgcgggagggagggtggggggcaggggtcgggggtcgggtgtccgggagccagggaagactggaaatgctgccgccttctgcaatttatttatttttttcttttgagagagtgaaaggaagagacagatacttgaaacttggtgtgtggcctggttatttgggacctgggtgtggagggagatgggcgcagcagagtcagatccttcttcactccaagccagagaggttagtggcctggaaaatgggccagggaggtaactggcaaatcaaggaacccgagttggtgaagactgagcctgggaaggtctggagctctgtccaaagtcatgacaggccagaaaggggaggctggaacttgtctggggccctgcagacttagtccagctctgatccctgccgggctgtctcagtcctgttgggaagcacaacagtccttaaaggaaaatagagaggaaacttcgttcattcatgttcatggagttgtggacagagctaggatctggaaatgattttttttgtttttttgtttttttttttgagacagagtcttgctctgtcgcacaggctggagtgcagtggctcgatctcggctcactgtgatctctgccaccctggttcaagtgattctcctgcctcagccccctgagtagctgggattacagattactgccaccatgcctggctaattttgtatttttagtagagatggggtttcaccatgttggtcaggctggtcttgaactcctgaccttgttatccacccgcctcagcctcccaaagtgctgggattacaggcgtgagccaccgcgcctggcctggaaatgatctttacagagttctgctgataagaactgctgtgtgaatatacgctaggtttctttatgcgccccccccacccttttttttttttttttgagacagagtttcgctctttcgctcaggctggagtgctgtggtgcgatcttggctcactgcaacctctgcctgctgggttcacacggttctcctgcctcagcctctcgaatagctgggattacaggcgcctgccaccactcctggctaatttttgtatttttagtagagatggggttttgctttgttggccaggctggtctcgaactcctgacctcaggtgatccgcccagcttggcctcccacagtgttaagattacaggcatgagccactacgcccagcctttatgtcctatctctatgggaaagatctgaggcagctttgtaaataatgagggtaggaaaataagaatctaaatgccaaagatgaaaactggagaaatgtatatgaactgtgagggtaaatgtgatctctgagcttcctgatagccatggcaaaaaaggaaattgtcaattacctacttctttattataagggagaaataattttagttcttttagggagtcatattttcctggccctaagtcctaactgaagctcctgagatcctgctatgtagaatggtgactctcagccttctgccttcttcatgtgtttggcacagatgaacctttgggggcacctgctggggtactattcctttctctgattctcaggtgctccagtgggtaaggctgaggcagagggccctaagagttatggtggttaaatcccaaacagtgcaaaagggcattttttgtagccactcctgactaaagttgagagtttcatgcaaaagaccgacccaggggtagtgattctgtggatggcatggccgtccaagcctaaagtagtccaagaatagaggcagagattgctgaaggggtgtcacttcaaccagtagccacgtattgccctgcaggattttctatgcaggaccgagtccatcaggatcctggggatagggaccaggggtctgcatttctggaaagctcccgggtgattttgatgtctcactgggtggagaagcactgcttcagaggatttttttttttttttttgaggtcgagtttcacttttgttgcccaagctggagtgcaatggcgcgatctcggctcactgcaacctccaactccagggttcaagtgattctcctgcctcagcttcccaagtagctgggattacagatgcgtgccataacacacagctattttttaatatttttagtagaaacggggtttcaccatgttagccaagctggtctcaaactcttgacctcaggtgatctgcccgccttggcctcccaaagtgctgggattacaggcgtgagccactgcacctggccctgatgtttttcaaataatccttctcttagcttggttctgtgtaatagcagatggcttgaggctgtgataacgttctctatcgtgagctgaagggagaaatctaggagctgaggaaggtgtgtgcaggtaatgcgtctgcgtgttaaactagaaggggcagaatcacatatttgacctggatggggtagaatcacataattttgcatgtattattattattattattattattattattggagacagagtttcgctcttgttgcccaggctggagtgcagtggtgcgatctctgctcactgcaacctctgccttccggattcaagctattctcctgcctcagcctcccgagtagctgggattacaggtgcatgccaccacgcccagctaattttttgtatttagtagagatggggatttcaccatattgatcaggctggtctcgaactcctgacctcgggtgatccacccccccccccctcggcctcccaaagtgctaggattacaggcatgagccaccgcgcctggcctgcatgcattattttgtaaattataatcagtacacgtacctgacaacaattcaaataaatatagaaatacatactgtttttaaaaagtttccttcctgtttccctccaggcattattcctcaggggaagcacggttgccgctggggctgtattcttccaaggccatggcctggccgcttgagaaggcaatgtaattaatgcattggagccctgggctcccaaacaacataggttcaaatcctggttcctcttctccccacactttttacttctttcagtaaatacttccttggatgttccttggaaccaggcagtgttctagatgctgggaaggcaacatccctgtccttagggaactttgggtgcatccagtggagatgacagactatagggagtaagtgaacacagagtgtttagacaatgatgggtgctactatgaaagagagtgatggcccttgctggtttagaccgggcggtcagggaggccccttgcagcatcatttgggtggaggcctgaaggacaacaaagactggggtggtgagagtgtgccaagtagggagacgaacagtctggaaggaataaatttgaaaggttggaggacagaaggaggccactggagtggagtagggtgggggacagagagaaataggtgtgtcagagaagtcagagaggcgtggcacacaggacttcccgtggatttttcagagtggtgtagaagctgctggagggctgtggagggaaccgtgagccagttactctgggtgtgaaggggaatacacagcagggggcaatggagagccagctaggctgttgctggcgttaggatgagggacgatggtggagtcactgtcactctggggagagcttaacctctctaagcctcagtatacctagctgtaaaatggaaataactacctaccttggtggatacttgggaggaataaactggaaagtacacgtaaagccctcagcacagtgcctgacgcatggtagaaaatggtagcaattattgtcattggcctcttggtctattttcagatatgcataagcccaaaagttaaagcctggaatcatttggagttttaacaagttttaccctcaaaaagtaggaaagaggcaggcctggcatggtggctcacgcctgtaatcccagcactttgggaggctgaggtgggcagatcacgaggtcaggagttcaagaccagcctggccaacatggtgaaaccctgtctctactaaaaaaacaaacaaacaaaaaaagctgggggtggtggcgggcgcctgtaatcccagctactggggaggctgaggcaggagaatcccttgaacccgggaggcggagtttacagtcagctgagattgcgccactgcactccagcttgggcgacagggcaagactctgtctcaaaaaaaaagtaggaaagaggtatagagagggtcctgggtcagagaatcctggctgtcccaaggttgaaaaggtgtgcctggggtggacagagtggcattgaggaggagagagctggggggagagagaccctactggagacagggagcttgggcccccattcctgcaggccggcttcttgtcaactgcagagatgggatattgaagcccttggggtgggttgtgtcagctcagatttaaacttgtgtgcagaggcccgtctgctcctttcagcactggtggtccccctcttcccttgccctggcgcacagccctccagcccgaaaggttggaggatagccttccttttcctcaacctcccctgcttcatctcaacccaattcctgctcagcctcttctagatatgggaccataggccgccctctttgggaagttcgtgaagagcctctgctttgcccctcctgcctgtttgttcaggtgcctcttttcagatctgcgggtattagactccctgcaggcctgggaggaggtctagctccagcccttgggtgcacaggcccatcccaaacatgaggctggaaagtgctctgagagggttggcaaggactgagggagctcagaatccttctccatagcaggggaagggactgtctcaactcagataacccccgggcctccagctctgtcccagcgaagttgctataaccaccctctggggtgtggggacagacatcctctgccatcctgatcccaatcttctcccttttctcctcctcccaaactggaagaggccttggaggtctaatgcaactcatggctgtgttgctagtgagaataataaaaataaaatcagctagcacgtgctgagcacctggtgtgtgccagcactgcgctaagtgcttttcactcattatcccatttaaccttgatgagcactctgagcggggcatgaacccattttccagatgagggcaaggtggagcaggtctggctgatggagggcctcaggctggttttgcagcatgagcatcttcctggagcctccggccttcggcaagcttcttgctcagcagccacaagccctcttgcttccagccccttctcctctgttcaccagcggctcaggcctcccccaatctgaaaatactccagtcttcctgacttacccttatgggaagttcattccattatctctcctcagcaaaatatatatatatatatatatatatacactttttttttttttttgagatggaggctcgctctgccacccaggctggagtgcagtggtgcaatctcggctcactgcaagctccgcctcctgggttcaagcaattctcctgcctcaacctccagactacctgggactacaggcgcacgctgccatgcccggctaattgttttgtattttagtagagacgtggtttcaccgtgttgcccaggctggtctccaactcctgagctcacgaaatctgcccgcctcggcctcctaaagtgctaggattacaggcatgagccaccgcgcgtggcctccctagcaatatttaacttggtgcttatggtccccagagctggccctgaagcttggatgactgccaggcctgggtacttccttctgcttctcccactggcagggactgtcctgggctgctttctttccaccatgccctctcacggagcagggtcgccacagggcactttgccacacctggacctcgcccacaactctgctttcagaggctcctgctcataagtctcttcagactccagacccatctacagtagcctctggaccctgggcaggtgtgccactgtcccccacctccctggtcccctcctgactgcacattcagtagctacaggtccacttcattcccctgctaaagttctgctcatctggccttccctgtctggcctccagcctcacagtttctcactgagaccaacgcagcagcctcctgatctcatc

SEQ ID NO: 98174 - DNA, 19346 bp, Homo sapiens
tatagagtgcgtttactgaccataatgcaatcacgcctgcaattgataaaaagttacctaaaaatacccatatgtttagaaattaagaaatatattttggtctggcacaatagctcgcgcctgtaattccagcactttgggaggccaaggtgggaggatcacgtgagcccaggaagagaccagccaggacaacatggcaagaccccatctctaccaaaagaaatacaaaaattagccaactgtggtggcatgtgcctgtagtcccaactacttgggaggctggggtgggaggatcgcttgagcccaggaggcagaggctgcagtgagctgagattgtgccagtacaccccagcctgggagaaaagccagaccctatctcaaaaaatatatatgtgtgtgtgtgtatatatgtgtgtgtgtgtgtctgtatgtgtgtgtgtgtatttcaaaaaatcccatgggtcaaataattcatatggaaattagaaaacatttgaactaaaaaactacatgtcaaaacttgtggcagtgtaaagctaaagcagtactaaaaggaacacttataaccataaaatgcaaataactagaagaaaggctgaataaaaataaataaatataatttttgtttgtttgtttgtgttttgtttttttgagatggagccttgctctatcgcccaggctggagtgcagtggcacaagctcagctcgctgaaacctccgtctcccaggttcaagcaattcgcctgcctcagcctcccaagtagctgggattacaggcaccagccaccacatctggctaatttttgtattttagtagagatggggtttcaccatattagccaggttggtctcgaactcctgacctcaggtgatctacccacctcagcctcccaaagtgctgggattaacaggcatgagccaccgcgcccagccagcttttttttttgtttttttgttttgttttgtttttgagacagagtctcactctgtcacccaggctggagtgcaatggcgcgatctcggctcactgcaacctccacctcccgggttcaagcaattctcctgcctcagcctctcaagtagctgggattacaggcgcccgccaccatgcccagctaatttttgtatttttagtagagacagggtttcgcctccttggccaggctagtctcaaactcctaaactcaggtaatccgcccacctcggcctcccaaagtgctaagattacaggcatgagccatcgcacccggccaaatataattttttaacatctcaagaatactttcaaatcttagagttaagaaacttgtattttgttttttgagacagggtctcactttgtcacccaggctggagtgctggggcacaatcatagctcactggagcctccatctcctgggctcaagcaatcttcccacctcagcctcctgagtagctgagacgacagatatgcaccaccatgcccggctaatttttttattttttgttcagacaggatctccctatattgcccaggttggtctcaaattcctggcctcaagtgatcctccctcctcggcctcccaaagtgctaggattgcagctatgagccatcctgcccagccagaatgattttttttaaaaaaacacaaaaagaattaaccataaagggaaaaaatataaataggattacatttaaattaaggacttctttcattaatactgtttaaaaactgaaacgtccacaaagtaggagaaaatattgtaacacatataactgacaaagagccattacaagactatataaatatattcgacaggccgggctcagtggtgcaagcctgtaatcccagcactttgggaggccgaggcgggtggatcacaaggtcaggagttcaagaccagcctggccaacatggtgaaacccagtctctactaaaaatacaaaaaattagccaggcaggtggtgcgtgcctgtgatcccagctactcgggaggctggggcagagagttgcttgaacccgggaggtggaggttgcagtgagccaagatctcgccactgcactccagactgggcaacagagcgagactctatctcaaaaaaatttaatttaatttaatttaatttaatttaaaaaaaaatatatatatatatatatatatacacagtcaacaagccagcaagtaaatgaccactccataagaagattttttttttttttgagatggaattttgctctgtcacccaggctggagtgcagtggagcaatctcagctcactgcaacctctgcctcccaggtttaagcgattctcctgcctcagcctcctgagtagttgggattacagtcccatgccaccgtgcctggctaatttttgtatttttagtagagacggggttacaccatgttggtcaggccagtctcaaaatcctggcttcaagtgatccatctgcctcggcctcccagagttctgggattataggcatgagccaccacctagccacaataggaagatttaaacaggatcaactgtagtaggccaggcaataataataataatagtggctttagggtgataacagtaagctagagagatgtgaatagattcaagagatatttacataattggatatttataatcataaaacatttgctttattttatatttaataatatacatatataaaataattattcaaccaaagttttgaatatatatgtatttttttggcagagagctctgaagcaattgtgtgggggtgtgtgtgtgtgtgtacatatatatatatatttttttttttttaacctgagacaaggtctctatcgcacaggctggagtgcagtggcgtgatctcggttcactgcaatctctgcctctcgggttcaagtgattctcatgtctcagcctcctgagtacctggtattacaggcattcgccaccacgcccagctaatttttgtattcttagtagaggcggggtttcgccatgttggccaggctggtctcgaactcctggcctcaagtgatccacccgccttggcctcccaaagtgctgggaatacaggcgtgagtcatcatgcccggccagcaattgaatatatttttaaaaagtacttgtgacttccaaaaagttgactgaattcttcattctgcagaagacagtgttctttgcttgtgagttttcttttccccagcaaggcatcataatcgaccaaggagtgtcatgactagagagtgataacacttcaatctcattcttgttggcattaatttaaaaacaagtgataacatgagaattgctttctaaattatcagtttgattgataaagtttcatctggaagtctttaaccaaggttggccatagctgggtttctggctaccacccattgctaacctgagggttagaaaaggtagcagcatctagcaaaattcacttcctcccctcatcccgggcctcctggcccccatttatctcacccacatcctgaacatgagaaaataggaaagagccctagtccctcttgtgccaccatttgtctctggcactgcggggcctgcgttcacaggatggcatgcaggagaggtgggaaaggaatcaagatgacagaactgactacccaggatcctgaaagagctgtgacttgtttccagtgagtcagcccaggcttgagccagataatcctgaaacctcatttcccaccctcaaagcaccagggtaatagcacagacaggtatctgagcttcctaacatgagattaaactctgcttccaccatgactcccatgggatttccacagccaactaactggaagtcaggaatcatttttcttttttttttttctgggtttttttttttctgtttttttgtttttttgtttttttttttgagggagagtctcgctctgtcacccatgctggagtgcagtggcaccatctcagctcactgcaacctccacctcctgagttcaagtgattctcccacctcagcctctgagtagctgtgattgcaggtgtgtgccgctatgcccagctaatgttttcatatttttagtagagatgggggtttcaccacgttggccaggctggtctcaagctcccagccccaagtgatctgcccgcctcggcctcccaatgtgctggaattacagatgtgagccaccgccccagccaagaatcatttttcgtaaatactaaaagtaccattcaatttgtgtatagaaactaacaaggctgcattactcaaggacttttaaactcattttagcatgattaacttggctcctacaagtaggagctgttggagaggttctgtctggcattttaggaataagagggagaagtgagtagtttcagattgtgctataaagaagaaagaaagaactttctgtggaatatgggacataagtataaacattaagtcagtcacaatagagatttcctactttttctagtctggagttagcccatcaggattggaattccagctccaccagtttataaatgtgcaatctctggcaagtggtttcatctccctaggcctcagttttctgccctgagtgagagaagagaggagagtaaagtacccacctcatagggtgctttgtcatggaaattaaatgagatcatcccgtggaaggcacttaaaacactgtctggcacattatttaatagttggtgtcgccctgattccagctgctgctgggagccacttgtagtcgagcttgaagtgaacaggctgtctcaagaccctgaactgtgatttatggggagatactcacacttgtactcactagagagggcctggcgctggaagaacacagcttgtttggttgcttgcttgcttgcttgcttgcttgcttgcttgcttttattttttattttattttttttgagacagagtctcactttgttgcccaagctggagtgcagtgacgtgatctcagctcgctgcaacctctacctcccggattcaagcgattctcctgtctcagcctcccaaagtagccaagactacaagtgcctgccaccacgcccggctaatttttgtgcttttagtagagatggggtttcaccatgttggccaggctggtctcaaactcctgaactcctgacctcaggtgatccacctgcctcagctccccaaagtgctgggattacaggcgtgagccaccgtgcccaatcaaaacatagctttcttcaaagaagcttgggttgagtcaaactccccactgccctaaactagagttctcctgccatctagcgcccaatggcagaaaatcgttaaattctaatgacggccccattcctttgttcctcccccacccccaccttgcacccccatgcctgacatggctttctcttcagccccatatgccaagcaaacacccactcatttcaattcaattcaaagcctcaattcaagccttatctcctctaagaaaactttcctgaggaacccggatggctcactccctccttgccagcctggaccacctcctccagcacacctcttccaacactgccccttccccttctccacggagtgtgtttcccttctccactgacactcccctctggacccgcacccctagctaatgtattcgataaatgaatgcacacgacagtactgttatgggtgggacagtgaggcattccaaaaaaaaaactgctccaggaattcagaaacagtttcatgttgctggcatgtaagtgcttcattgatgactgcttcattgatgatctgtagcccctgctttgtctctgaagttcattttttatgagaaataaatgcataaacatacatctaccctgtgatccaacaatcccatttctagatatttacccaaaagaaaagaaaatctgtgtctacaaaagacttggtccaggactgggtggtggtgcatacccgtaatccctttgataggcagaggcaggaggatagcttgaggcctggagtttgagaccagcctggacaacatagcaagatcccatctccaaaagaaaaaaaaaatggtcaaggatgttcatagtcaccactttattcataatagctactaagtggaaaagacccaaacacccatcagcaggggaatggatcaacaaatgtgggccgggaccgatgcctcatgcctgcaatctcagcactttgggaggccgaggtgtgtggatcccttgagctcaggagttggagaccagcttggctaacatggtgaaaccccgtgtctacaaaaaaaaaaaaaaaaaattagccagacgtggtggcacatgcctgtaatcccagctactcgrgaggctgaggcatgagaatcacttgaaccagggaggtggaggctgcatgagccgagaccacatcactgcactccagcctgggtgacagagtaagaccctgtctcaaaaaacaacaacgacaaatgtggtatgtccattcaatagaatactactcagcagcaaaaaagaaccaacaacacagctcaatctcgaaagcattaggctaagtatttttcagcaatatgctaaaaaagccagacagaaaaggagtacttattggataataacatacatatgacattctagaaagagaaaatgtaatctacagtgacagaagcagaccagttagggcaggggtggggagatggggtagaaaggacggagattgggacaagacagagtttgggtttttattgttgtttagagacagagtctcactctgtcgtccaggctggagtgcaatggcgtgatttcggctcactgcaacctctccctcccgggttcaagcaattctcctgcctcagcctcccaaatagctgggactacaggcatgtgccaccacacccggctaatttttgtatttttrgtagggacggggtttcgccaggttggccaggctggtctcaaattcctgagctcaggtcatccacctgcccacggcctcccaaagtgctgggattacaggcgtaagccactgcgcccggcggacagggtttgttaaaactcatcaagcagcacgcctaagatctgggcatttatctgtatgtaaattacattaaataattttaaagaatgtaaagggagggacatgggagggaggaggaaaggcaggcagcagccgcagggcaggtgtcccagtgaccggttcccaagcgggaggagggcggtgggctcgcggacaccagcatgcagtggctccgttcggccgccaggggggggcgtgggccctggaagggcrggcggcgaagggcggcgaagggcggtgagggggcgggcccgtacgccgattccatatgggcgccggcgcggagcgccgcggggcagcgcggggtcgccatggctgagctgcagcagctccgggtgcaggaggcggtggagtccatggtgaagagtctggaaagagagaacatccggaagatgcaggtagcggggctggggccgaaccaggacccccttctcagcgggtgggttccgggcccttccctcagccaccacgcgacgccttgcactgcagccgcgtccccgcagaccgggtgtgggcggccctggggtcgccggggcggcctcggacaggacttcggaagctttggcggatcggatgaaatccgtgtgcccttgccgtgcgcgaggctgttttccgccccttccagccyggggcaggagcgtcctcggcggcaggtgggaagcccctggtggcaggcgctcgccccaccaccttcccctcttacgcggccccttccgcaggtgagcggcccgaggcccagcagaggcgctgccaacgtgaaagaccagaaaggcgaggacttccggcctccccgttggccaggtcatgcctgcttctcttgcgcccaacctcgcttcacacagcgcgggtttctrcactgttcttctctgagccccgcaatgcctctgtgtgtttcggtcctgcttctctcacggagtatgcgtttcccagatagtgccccttgagtcattgattagtgggtcggctgccctctggtggaatttgtattgctaggttgctgacctctgaaccccatggaagaggctcctggttttcagaatttggcttcgtcagaccaccctaccctcacccactcgggcgaacctctgttcacccaaccatcggtgcaacaggtgccgatgagctagcagcaaggacaccatgaaacactacactagacattgaggataattttccccagtggtggttttaaggtcctggtgtctattctcagggaaggtgaaagcagaaggtggagagagaggtgcaaatatccacgtggccttctaactcctgtagtgctccatagtcatctctgtccccagagactttcctacctaacctctctgccctttctccccagggtctcatgttccggtgcagcgccagctgttgtgaggacagccaggcctccatgaagcaggtgcaccagtgcatcgagcgctgccatgtgcctctggctcaagcccaggctttggtcaccagtgagctggagaagttccaggtgagaaatatcctagacagagcactgtagtccttgatacagacttttgcaggagatgacaagcatttgttcaaaactcttggctttagtgtcttggttctgttaacagttgtgatactgatggccaaccagttttcacagggtttgaaattttggaaaaagtcttggcggtcgagtgccttaagttgaacatcatttcctatagaaatgatgtaggccgagcgcggaggctcatgcctgtaatcccagcactttaggaggctgaggcaggtggatcatgagagcaggagatcaagaccatcctggccaacatggtgaaaccccgtctctactaaaatacaaaaaattagccaggcgtggtggcacgcacctgtagtcccagatactagggaggctgaggcaggggaatctcttgaacccaggaggtgtagttgcagtgagccaagatcgcgccactgcacttcagcctggcaacagagcgagactctgtctcaaaaaaaaagaaatgatgtaatggggagttaccaggggagttcatgaccaagagcccttatgcagtttgttggggaggaggcgtttgtttgttccttttgacataaccaccaaatacagaatgtatactgtgtagtataaagtttcctggctggacgcgtagctcgcgcctgtaatcccaacattttgggaggccgaggcgggtggatcacgaggtcaggagtttgagaccgtcctggccaacatggtgaaaccccatctctactaaaaatacagaaattatctgggcatggtggcaggtgcctgtaatcccagctactcgggaggctgaggcaggagaatcgcttgaaactggaaggcgcaggttgcagtgagccaagatcgcatgccattgcgctccagcctggacaacaagagcgaaactccgtctcaaaaaaaaataaataatgttcaggcacggtggctcacacctgtaatcccagcactttgggaggccgaggcaggcagatcacgaggtcaggagatccagaccatcctggctaacacagtgaaaccccgtctctactaaaaatacaaaaaattggccaggtgtggtggtgggcgcctgtagtcccagctactcgggaagctgaggcaggagaatggcgtgaatccgggaggcagagcttgcagtgagccaagatcacgtcactgcactccagcctgggtgacagagcgagactccgtctcaaaaaataaataaaataaaaataaaaaaataaagtttcctaaaacatatattatttttaaaacagcagaatctctagaaaggtaggatagccttgaaaaggtacagattcgaggaacacccttccaccattttgtggacttatacacccacccaggactgcccctagttgctatacccagagggcagcccctctgtcactaaggagcagtcatttatgtgaatcattattactgttgactcactgattcctggctcacaagcccctctgaggttaccaaaagagctccctgtttccctctctggagcaaagagtatccacaacttcattttactcccatcttctaagtatatttttctggaacctgggggaagcaagcctacttccaagccagcctttcatagcctgaggttccatccacatggaaacttatacataatgtgacacatctttacattcttccattcaaaacgcttcaaagttactgccattatgaaggaataacttcttcaagatcatggaaccccaaagggtttctttgtgttctttttgacagctaattttatagatggggtctttgaaaatgtgattcttggattgctctataacttcccttgcattatctttttagtcctctccaagtggactttcactcttcactgggccagaaccactcctgccactcacccccatggggccgaatccgggggtcatttctcagtcttcatcttactctgtctgcatcattgacacagtggatccctctccttcttaaagcactttattcagttggtcaccaggacatctcactctcctggttttctgcctccttccttggcctcctttgctctctcttccccactccagcctctgagcatcagagtgcctggggctgtccttgtttcttttctcctttctgcctacttctctagtctcctctagcctcatagctgtaaatataatctctatgctgacagctcctgcatttatatctgtaggccagagctcactgataaactccacattcacatatccaactaattcctccacatctccatttactttgtttgtctctttcctctcactggaatgtaagttctgtaagggtaagaactttgttttactcattgctatattccctaacattaaaagagtgcctggcacatagtagatgctcaataaatatttgttgaattgaatgttttcctgtagaaagaacagactttaaagaatcagtggctcacacctataatcccagcactttgggaggctgacgcgggtggatcacctgaggttgggagtttgagaccagcctgaccaacatggagaaaccccgtctctactaaaaatacaaaaaaagttagccaggcatggtggcgcatgcctgtaatcctagctactcaggaggctgaggcaggagaatcacttgaacccgggaggtggaggttgtggtgagccgagattgtgccattgcactccagcttaggcaacaagagcgaaactccgtctcaaaaaaaaaaaaagaatcaagatgtttgtacatcttacaataacctctagggacctctcatttcctggaagaatgttctgcccaatttattctgtcattcacctgctttctagtaatagtttgagccctcctggtgccatcttctgtttgagtcaagacagtcttggaaagccaaacacagtggctcacacctctaatcccaacactttgggaagccaaggagggaggatcacttgagcccaggagttcaagaccagcctgggcaacatagggagatcccatctctacaaaaataatttttaagaaagtattagccaagagtggtggcgtgtgcctgtggtcctagctacttgagagcagaggtggaaagatagcgtgagcctgggacgttgaggctgcagtaagccataattgtgccactgcagcgcagcgctccagcctgggcaacagagtgagactctgctcaaaaaaaaaaaaaaaaaaaaaaaacttggccaatcacactaccatgtccctttaattgaccaagataatacatattaaacctgtagcacagggcctaacacataatgagcacgcagtaaatggaggccttactctcagctttttctacgttcttccttcttgccacaggaccgcctggcccggtgcaccatgcattgcaaygacaaagccaaagattcaatagatgctgggagtaaggagcttcaggtgaagcagcagctggacagttgtgtgaccaagtgtgtggatgaccacatgcacctcatcccaactatgaccaagaagatgaaggaggctctcttatcaattggaaaataaaagtatttgccagtggccatcagggctgagggcaagaatatattttttataaggaattgggaattttagtcttttaagcaaagtttacgaatgaagaaatgaaggatggccacaagcgtaaggcatatgtcacttgcctctggacactggttattttatgtttcagtccctaaaaaatgaaatggaaaaaagtggtgctaaatcgagtcagagatattacaggagagttttagagcttattatttcctgtggccagtgcttgtcctggcagtaaggctytcccctgtaacaagccagagccctccaaggtaccagactcttcttactacacaggtactaacaggctggcaggttagagttggtggagtctgaggagagatattttctctttgttgccaacatcctgtttaccaaaagtgtcaccccaccatcttccataagctgtgaawcaaaatcaatgaggtcactaacttagaagggaaagaaagttttctgggtctttgttttcttgatttggggtaatttatacaagggcatacaagttgattttaagatgtggaactgggaggtagactagtttggataagaactttgaaatgttcctwgtggatccccatttctggtcatcaagatgtggatgtacatttcttaaaattattacatgctgcatctttcagcctggagactgtgcagaaacatgagaggtgatgacacactaattatgggaagcagaattactggctgatggcccctgaggctgtgtgtaacaaaatgacaggacaatcttgcagtaacactttccccttgaagagaagggggttttgattgtgatatatactagtatctaggaatgaacagtaaaagaggagcagttggctacttgattacaacagagtaaatgaagtactggatttgggaaaacctggttttattagaacatatggaatgaaagcctacacctagcattgcctacttagccccctgaattaacagagcccaattgagacaaacccctggcaamaggaaattcaagggagaaaaagtaagcaacttgggctaggatgagctgactcccttagagcaaaggagagacagcccccattaccaaataccatttttgcctggggcttgtgcagctggcagtgttcctgccccagcatggcaccttattgttttgatagcaacttcgttgaattttcaccaacttattacttgaaattataatatagcctgtccgtttgctgtttccaggctgtgatatattttcctagtggtttgaytttaaaaataaataaggtttaattttctccccactattgagtcttctttccttatatctgggtggtgaatatgtaactttctcaggatgcttctccttttaacaggttaaatgagttaaaatgtccagaagagtggaaattagttgttatggttcagatgcagaactggttcactgtaaatgggaaaaactttgagaggagactaggacattgtgacttgaagttcattaatgtagaaaagaaactgtctatgaggctaaaaagagaaattcattatctatgtcaggtctctagcttcaactaaacactaatagcaagtggtagtaaaggtacaaagctatgaccctgctagaaaaaattcagtgtctaggattttgagtactaagagagtgcaaaatatgtgatgagtttaagtctttactatcattgatatttatatagagccattccagaatatcaggaattaactgaatttttgagaactatcccctatttaaacacaaggtattctattttggtttagtcttctataattttggggtaacaactgggaacaagtccgagaccactttttacacatcttgacatgaaaaaagaacaccttatattagaaaatgtttgtgtgctgcacttcacattttatatacaggggcaatagcacatcagtgagttctggaggtagtgtttgaaaaatttcagaattcccaggcatgctggctaacccctgtaatctcagcactttgggagccggaggcaggcagatctcttgaggccaggaatttgagaacagcctgggcaacaaagcaagacctcgtctctacaaaaaaaaattagctgggtgcagtggcgtgcgcctgtagtctcaacaactcaggaggctgaggtggaaggattgcttgaggccaggagttcgaggttgcagtgagccatgatcacaccatgctccccagcctaggcgacagagcaagaactcatctcaaaaaaaattttttttgcaagacccctcagtcagaaatagattcaaattcttggagacagacccagtcaccttactctacaatggttcagaggctgctaatttacatgttacgggaaccctacttggtctgacagtatgctgtagggttacctgccaaaaaaatatagaggcccagccgggagcgggggctcacgcctgtaatcccagcactttgggaggccgaggccagcggatcacgaggtcaggagatcaagaccatcctggctaacacagtgaaatacggtgtctactaaaaatacaaaaaatcagcccggcgtggtggcgggcacctgttgtcccagctactcgggaggctgaggcaggagaatggcgtgaacccgggaggcagagcttgcagtgagccgagatcgcgccactgcactccagcctgggcgacagagcaagactccgtctcaaaaaaatatacatatatagagagaggcccattcctccagggatcattatcatttggtatattggtatatatgaagaaaataagcgatacgatccacagacatgcgggattggccgggtttgcccaggagctagagacgggaccgttatctcaatatctcaattttattttttaaatagagaaggggtctcgctatgttgcacaggctggtctcgaactcctgggctcaagagatccaaagttctgggatttacggcgcccggctttttttatttatttatttatttttatttattttggctgttccatagacaagagcagggataaccggctgggcgcggtagctcacgcctgtaatcctagcactttgggaggccgaggcgggcggataacgaggtcaggagatcgagaccatcctggctaacacggtgaaacccgtctctactaaaaaatacacaaaattagccgggcatggtggcgggcgcctgtagtcccagctattcgggtggctgaggcaggagaatggcgtgaggccgggaggcggagcttgcagtgagccgagatcgcgccactgcactccagcctgggcgatagagctagactccgtctcaaaaagaaaagaaaaagagcagggatacccaccggtggaatacccgttatctcaattttgtacaaggaaaacggaattcagaaaggtgcctagaggacgcacccctccgtcctggccaatcgctgaggacataaccggaagctcaacgatgaccgaggcgctgagatatcgcgaggtgaaatgtaaaaactgccaacaatccattggctaacgaggtcgatgacgccagacgcaagacgccgggcctacagcgggagcgtgaggaaagccgtgcgttgcgttccaaggcatctgtgagcccgcggagtatacaccatgagcaaagctcaccctcccgagttgaaaaagtaagtatgtgtgagagccaaaccgaagtggtcagttatttgcgtcctgcgagtcccttggttccctctccgttagccgaatgtcttgagccgcttcacttcatttcttcttccggtccgaggtcgccgggatcccggccaggctcccgcgcatgagacgtgaagcccgcgcagagctcgcgcgtcggtgtggttacagccggcagccacggcacctccttccggccgactagtctccaggtcccgcggtctggcccctggtcacccggcgctgtccctcgttccttgaagatctccagtgctaccttttgttgaacatctcgaatagtatcatgttctagatagacggctagagggggaaattctctgaaggaactaaggaggggctggaagggaaggaagtgtttttaaaactacgtgaggcatcagaatccgaaagccactttagtcttagcaaatgtgtttgtaggtgtttgagcttttacttagaaacctcattcctttttcttgccttcttttacgttaagcttgaatgtcatgtgttatcttgctctgatgttgaaactatataagaacattcatttttctttttttttaagaacattaattttttctagtcagagaaggctaattttttgaagttttttctacacacccagtaaagtcaaacaactttaagtaggagagccttactttaggtaggactcaacgtaaagctttgaattcctcaaatactttttgagtggacttaacaggttatgtgtttcctgactacgtttctgttttgcttatacttcctgatgctggaattctacatgtattagttggattgcacaaaggatgcaaaatttttacagggatcagttttttctggcgtagcatgtggttggctttgtgtatagttagttcatttattaccaggcccatggaagtcagacaaaaggtaaagttcctatttaataattttgcggccgggcacagtggctcacgcctgtaatcccagcactttgggaggctgaggcgggaggatcacctgaggtcaggagttcgagaccagcctggccaacatggtgaaacccccgtctctactaaaaatacaaaaaattagccaggcaggtggtgtgcgcctgtagtctcagctattccggaggttgaggcaggagaatcgcttgaacccgggaagcggaggttgcagtgagtcaagatcgcgccattgccctccagcctgggtaacaagaccgaaactctgtttcaaaaaataataatatttttgcatttaaaggtccatttgtatcaaagccatcttttgtatgaaaactacttctatgtatattttagttaggtctgttaaggaattaattattaaaacataagcccaacgcggtggctcacgcctgtaatcccagcactttgggaggccgaggcgggcggatcacgaggtcaggagatggagatcatcatggctaaaacggtgaaaccccgtgtctataaaaatacaaaaaattacgtgggcttggtggcgggcgcttgtagtcccagctactcgggaggctgaggcaggagaatggcgtgaacccgggaggcggagcttgcagtgagccgagatcgcgccactgcactccagcctgggcaacagagcgagactccgtctcaaaaaaaaaaaaaaaaatagaagttactcagaaattattgtgaaaattactctttttatctgaaagttatttttggtgatgtaagtatcctctggattcatcagggactggtgaaatggtgatttttttttttttaacaaaaagaccattctctacttgtaatctaagattttctttctgattcataacatagtttttgaaaatttcagagaaggaagctagttttaatacctttctcttcctcgtaggtttcatgaattgtgaaatccggtcagatctgccgccaaaatgacttaaaaattttttcttcctctgctttctcacagatagcatcttcttttacaccattatgccctccttctggtgtagcataactcaggtgttcttaaatggggagtagggaatctggtgctaccggcttctagtgagtagacaccagggtgctgctaaacatcctactgcttattcgactgcccccaacaatacaaaattaactggtcccaaatgtcagtagtatagaagttgagatacactggcttaactgaattcttccttccacttcttaaaatttgctgccacggtagtcttgccagtgactgctttaataatttatcacagtatgcaaaatcgagtctgtacttaacccagcattcaagcaccaaaccttctagctgctaatactcaggtattccgttctccagtcacactgaactatttgtgtttgctctcacttgctgtgtgactttgaaaaattgctttagcttttccaagcctagttctccatctgtaaaaacggtggaaatgatagaccataattgcaaagtcgttgtaaagattgtataagatcttgtgtgttatatttgatacgttttatgtatcttattaaaatatagtttacttcatatatgtgtgtgtgtgtgtgtgtgtgtgtgtgtgtgtgtgtgtgtgtgttttgagatggagtttcactcttattgcccaggctggagtgcagtggcgcgatcttggctcaccgcaacctgtgcctcccgggttcaagcgattctcctgcctcagcctcccgagtagctgggattacaagcatgcaccaacacacccgactaattttttttttttttttttttttttttttttttttttttagtagagacgggttttctccatgttgatcaggctggtctcgaactcccgacctcaggtgatccgcccgccttggcctcccaaagtgctgggattacaagcatgagccaccgcgcccagcccataaatatatttttacttgtaaatgtatctactccctccttcagtcatgctccttgttttatatttacattttcccatgataatcctatacattaaaattgaataagtgccccacttcgtggcccatatactaaacatctttttttcatttttttatattttaaaatttgaatgaaatttttaaaattgaatgaaattttatgttttctggcctatatggaagaaattaaaaactgatttgactgcatggcttaatctcgtattccactaaaatggaatttttttttaattcatatcgtttgaagtttcaaatgtgcatttattattctaaaatatacttaaatgttgaggactaccctgaacatttatgcttgatgctttaatattaaataaaagaacactacttatttcaaatataaaatacctattgaattggatatgatttgattactgtttgctgtctttacaacttagttttggaaataaccaaacataggcaagtctttgtttttctcttgtgactataaaatccagtcattgaaaattaggtcaatgagaccagatgtggtagctcatgcctgtgtaatcccagcggcactttgggaggctgagggggagtatatttttcgaggccaggaattcaggaccagcctgggcaacataatgagactcccatctcttaaaaaaaaaaaaaaaaagaaagaaatttaggtcaatgaaacaacgtagtattg

SEQ ID NO: 98175 - DNA, 55473 bp, Homo sapiens
gggccaaatctttttcccctaaaaaatggaagttgggctgggcacagtggctcacatctgtaatcccagcactttgggaggccatggcaggagaattgcttgagcccaggagtttgagaccagtctgggcaacgtaaggtgttgtcactataaaaaaagaaatagaagtgggagttccaaacatctcactcactcagagttcactggtaagaacttaatcacacagccttatctggctgcaaagaagtctgggaaatgtggttccttgctaggaaaccaacctcagctacatctctataggtgagaaatgcagttcttcgctgggcaacctatctgtaactatggaagaagaggagaacagtttttttctgaggcctcaataaaaagaaaaaagaggaaaaaaagataatctttaaggtaatggtggtagaagatcctaggaagacgattttggaccagaagtaaaaggcagcaagtccagattggaataggtcaaaagactctggaaaagaggtccaagaaaatgaagtagtgtgtctaaatatctgatgtgtctaaatatctagagatgatatttaggcagtttatagaaagtgggcattattcattcagcaactattcattgagcatcttttataaatcaggtactattctaggtgctgggaaacaaaacatacaaataccaaaatcattgcttcagggatcttataacctagtggaaaatctagttgggattgcatttttgataagtacacagaaaactagcaaatgtttaccccatttagcgcaacctggaggcaactacttttacctctttaagctgattctttcagtattgctatatttctaaattaacatgattccattgctacttgtaatttttccttttttcctccattgtattatctgttaatttttcagaagaaagattaggatttttctcttttttatcttcttggtcatcatcacatatgtgagtccttcgcatccccccagcctcccaatatagttaactataaagttggttagatcaatgttcaaattttaactttattgtgactatgtaaacacttttaatagcaagtcatatactaaattgtaactattttagttttcctgtacaagtttttgtttttgcagtcttaaagcttaaaaatctttcccccacaattttcacctaatttactgttatttatctttcaaattctagtgtaagtgtcacattttcagagaagccctgaagcatccttttctcctaccccacaattcttccccattctcttgttttagagcattttgtgctgccataacattgccacagactgggtaatttataaagaaaatttattggctgggcgcggtggctcacgcctctaatcccagcactttgggaggctgaggcaggcggatcacctgggattaggagtttgagaccagcctaaccaacatggagaaaccccgtctctactgaaaacacaaaattagccggccatggtggcacatgcctgtaatcccacctactcaggaggctgaggcaggagaatcgcttgaacctgggaggcggaggttgcggtgagccaagatcgcgccattgcactccagcctgggcaataagagccaaactctgtctcaaaaatatatataataataataaataaataaatttatttctcacagttctggaggctgggaagttcaatatcaacatgctggcatctgacaagggctttcttgctgcatcatcataaggcaaagggaaaaagggtgagagaaggtgaaagagcataagcaagagcacgcatgtgtgtgagtgtgtgtctgtgcgtgcctgcacacacgcggaagaaagagccaaactcacttttataaccaacccactcctgcaatagtgacattaatcccttcataagggccctgcccctgccccttaaagttcctacctctcaacactgttgcattggggattaagtttccaacacccaaactctgggggacacattcaacccttagcattccctcactagaacatatacacatctgtttattcctcttataaatattcatctattcttgcctagcacctctcgtgagtaattagtaataagtcttctgctagactgtatgttccatgagggcagagatggaatctcttttttcaccccatatttccagtgctctctcagtaatttttttgtttgtttttgtttttttgtttgtttttgagacgtagtttcactctgtcgcccaggctagagtgcagtggcacgctctcggctcaatgcaacctccacccccagggttcccccaattctcccgcctcagcctcccaagtatctgggactaccagcacgtgccaccacgcccagctaattttttgtatttttttttagtagagacggggtttcaccatgttagccaggatggtctcgatctcctgacttcgtgatccgcccgcctcggcctcctaaagtgctgggattacaggcgtgagccaccgcgcctggctgctctctcagtaattttttatagacagagttacttaatgccctccataaaaatacaggctcgcggtcggggcagaagtgtggttactgatagtgggaaaaaagaaatcttgccatagaaacagaccttcatgaacactcccctggccttttacattttcatgactacttattattattgtcattgttattatttttagaaatggagtgttcctctgtctcccaggctggagtgcagtggtgcgatcatagttcactgtaacctcgaactcctgggctcaagtgatcctcccacctcagtctcccaagtatctgagactacaagtgcacactacctcccccagctccataactacttagtatcaaaacgtcttgccacagaaaaatcagagggttaaattattcacattataaaataattacatttcagaaggatcacagtgtctccttaagtaaaatccgagcaattttttttttataaatcactaaatactctaccaaggaagaaaccaaaagaagttttcacagagatgggattcacgacttgctaccccaaaatatggcaccttggcatattaagtattttaagctgaaggaatttgagaaatagcacatgcaggaaaggctccctggccttcccctgaagcagattataagaccctgacatgagagctgccctccctcttcctggaggacaggagcatcctatcttaaagatgaagggacacggaaaggaatctaatgcacaggccttgctaaatttcccctagtttgctggacttagctcacaacctttgtcctatcacattcttctatgactctcttcatcaaacctagcataaaaacacttggttttaacgcttctttggatcttcatttccttatgaaggctcccatttcttgtaaaacgtgtatgaaataaagtgcatgcttttctcttgttaatctatcttttgttacagggggtccaacgtagaatctagaagggtagacggaaaagatatttttcctcccttacactagccactgctgaattggtatcaagctgcaatttagataaagtaaatttgaatttacagggatttaagagcagacatttccatatcatacatttaatttgcctgttactggccatgaagcgaaaatatgggatttccccttttgatgccagggtcttggcaaccctgtctcttaaatgaatgaatggaatggtggtaatgacctggatttgaaactcaagttttctcaacgtacccaaactcacaggaaccagatgtacaattgagtgtgtcaattaattaccttacactaagaaatacaaactattcgtttttgccctgaagtaaaccagaatgtcaccccaaaatgtgccactttggcataaggattattttcatattattaatttaattataatattattatcttggtaactgaaaagtagatccagacagtccccaacttaacggtggtttgacaagattttttgactttatgatggtgtgaaagcaacacccattcagtagaaaccatacttcaattacccacacagccattctgtttttaaatttcagtacagtattcaataaattgcatgagatattcaacattttattataaaacgggctttgtgttagatgcttttgcccaaccgtaggctaatgtaagtgttctgagcatgtttgcagtagcctactgatgtttgataggttccgtgtattaaacacattttcaactaatgacattttatttttttgagacggagtctcgctctgtcaccaggccggagtgcagtggcatgatcttggctcactgcaacctccgcctcccgggttcaagtgattctcctgcctcagcctccagagtagctgggactacaggcgtgcgccaccaggcccagctaatttttgtatttttagtagagatggggattcaccatgttggccaggatggtctccatttcttgacctcatgatccgcccgccttggcctcccagagtattgggattacaggagtgaggctccacgctgggcctcaactaatgatattttcaatttacaatgggtttattgggatgtaactccatcctaagtagagtaagtagaggagcatctgtacaaaacaagctccctacccttccactatgtacctaagagcaggacatacattttcaaaggtgtcccacctcctctttctaccagggacaaaagttagtcaccagagacaactttagacccttatcagccagcgatggcgctagaagaacctacataacacactttactcactacctgtaactaccattagtttctcgtatctctgccttcccactctgctgtttttggaaacttcaaactgctttcgccatttctccccagttattgttctttattgtaaatgctacgtaattcccccattctaagccacctgtttgagttactcttccttgagttttgcccatataagatgtacatgttactaaatttttcttttgccaatccgagctttgtgataagggccgcagtggagaacctagaaaggtagaaagattttccccccttcctacagccccaaggagggtttgagacacgggttccgtttttttccttcagctcctcactttgtagattccattcaggtcattccccttccgtcaccatgcccttttttcattgagtagatatatctgatgggcctggggttttcttaggtacatttcaggcccaggggagacacagtttcattctttttttcttttttatcggacagcctcctgaaccagaagaggttcagagcgactcccacagtttcactcttgaacttgggtattttccaaattgcctcagcaaaaggctgctgtagtcggtcttcgtagcttccttctccagggtatcctagcggcgcgcagtgcaggagcctcgcaccgctccccgacggcggctgccagcttccagacagacgccgacccggtgttcgcaaccagggcgcaggccgggcccggagcgtttagagcgcccgcccctcggtaaggaaccgtccctgagccacagggcctgacgcgactgcagaaggagcgtggggtcctccgaggttccccttctctaaatgtgcaccttcctcagggagaccttgtgcagctgagggaaaagtcaccactcagggtttcgggccggggacccaaataaaagtgctgccatcagcaaaaaaagaaaaaaaaggcacgaagaggaggtgggcggattcccaaggcggtttcgcccactaattttgcccagagatgactctgaggtctctgagcttaatgcttttcagctgttgtgcagactcgctttgccctcttataagcccactatgggagttcccgctacacgccggcccaggggtacaaacgacaacgcgccgcccttggagcgcgtcgccgggccccgcgctgcgcagcctccagcggcgctgcgtgcccttccttttgcccgtctccaaaatggcggcgccgccgccgcccctcctcctcgccgcgcagagccgcgctgcgccgcgcgctcccgccgcccctccccacgcgagctccacccaggtcgcaggcagcgcggtcggcggcggctatttcccgccattgtgcgaagtgaaggctaggggcccgtacgcgcccgcctgactgtcgccagcagctcctcggcggccccaccgcagccgccgctccctgaggcgcgggaggcccgcgccccgcggctcgctgtgcgtgggagggcgcgagcgaacgcgggcgaggagcggccgagccgctgaagaggagctgggcgccggccgcccggccgcgctcggcccgcggatcgcctccgcccggtcttcgccggccccggcccctggcgagatgccgtgtggggaggattggctcagccacccgctgggaatcgtgcagggattcttcggtgagtggcggcgccggggggcgggccgggcgggcagccgagtttgccgggccccggggcagggccccgccgcgcggcccccacgcggtaccatctcgagggctcgcgtggcccgagacggggccccggggcctgcaccggccccagctgggacagcctctcccccggtcgcagcaggcaggggcaggagccgggccgcaggtacctcccacctgcccgagtcgcagcttgggagccgccaaggtgaagtcgtggggcgcgggctgtgattcgcgggctgtgattgacggcctcgctcccagcctgtggcagggccagggccccggccccgggcgcagcaaactcggaggtcctcgaaccctggggagggcccgcagagccgcggggagggaaaaccactttgcctgtgggaagcccacaggatatttcaaaacttccggtgcgtcggggagtgctcgcttgcacagaagttggttctaactcctgtgctaccctyattctctctttcagagataagatttaatgttcatagcttagttttcctgttgggatgactttagaacccatctagtctggatctgctcctgtgccagagccagcaagaaatattgagctacttgagtttgtacacagggctgagaatcctgcaggcgagcttagtaaattttggttgcgattgctgttgctactttactgcgaagggtatacgaagaaaagtttatatttgttgtcgttaactgggcattttgacaaccgttccattccccagtgtctttttacacgtaatgagtggcggagtcagatccagctagaaatcactgtagatggcaacacctgacttgtctggagttaacttagagttgtagagcggccttagctcattgaaaaaaacatcttggggtactagagagaaaaggcagtgggaagmtaaatcatcctcagcagccaaaatcgacggcaaacaatgtatggtatttcttataggagggcctctagtgcttactcaggaagtccttattaatttacctgtaattctaattagtttagttacctggcttcccaggctgtaactaatggcattatattagaaaaaagcctggatagacgtccgaacttagccagtgaacactgacagcctgatgaagaaatttaaaactaccttcatacttgaaaaaaaaaaaaattcactatatagcagtcaagggtgctttgaggaaggggcatatatttctccactaaatcctagtaatttatgttcataagaattctagaamtgataatcgatggtcaacacaatggccccaaaatgtcaagtgaagattcaattgtagcattggtttaagagggtgcagatgcatagatactttttaggaaaaatccctccaaagtaaaaaggtttggtgcttaaagggttaaatttcagttactaatattagaaagtttatttattagaaataccccatactctgattttgctggataaatgagatgatttcatatttgatagagatttgaatgtatttgtgtcaaattttgtcttctaaatgtatgatcctaagggacacatctcatcatagtacaggaaggatgtaacttagatataaaataatagcttcagagtattttataaattatgtggattgttgtgggaacctgagaagtttcttgatgtgtttctccccagaatgtcttgttcccgtgtacgttgtgtcttatagaaaagtcataatgtgttcgtagaagctgttgctatattttcgtatcactgtgattgtattgcatatctttattataacagcattacaagtatgtttgtgtgataacttataggcactttttggtttagtaggaaattgttttccccccagataggtaatgcatatgcattgtacaraaagaaaaaagcagttcagcaacatatagcagaaaaggaaagatctttgaagatccttcaccttcaagataaccactggttcgtggttgtgtagtttattttctctgcatatatttagacagtttttttaaactgaaaagttaagttttgttgtgtattttattttgaaatatgcattttttttttttgagacagtctcgcactgtcacccaggctggagtgcagtagcgcaatctcggctcactgcaacctccgcctcctgggttgaagcgattctcctgccccagcctccggagtagctgagactataggcccgcgccaccacgcccggctaatttttgtatttttagtagagacggggtttcacagtgttggccaggatggtctagatctcttgacctcgtgatccgcccgcctcggcctctcaaagtgctgggattacaggcgtgagccactgcatccagcagcctgaatttttccctttcttactgtccttgtcatatagtattgtataaacttwttaaccctgtcatatattttaagttaggtgtcacaataatctagagtgtgctgtccagggcagtagccatgtgtggctatttaaatgtaaattaattaaaattacacaaaattaaaaattcacctcctcggtgttagcacatttcaagtgctcagtagctacatgtggataggggctattatattagcacagatctagcatattcctaacatcaggaagttctctgtacagcactgatctagaggacaccgctttttagtatgtgatgctagtttttttggataaccagctactcactgactctctttcaggatctgaatttggtcactgtatcttatccgttctaggggttttgtttttgtttttgctttttttgtttttgagatggagtttcgttcttgtcacccaggctggagtgcaacagtgtgatctcggctcactgcaacctcctcctcccaggttcaagcaattctgcctcagcctctggagtagctgggattacaagtgcctgccaccatgcccagctaatttttttttttttttgagactgagtcttgctctgtcactcaggctagggcgcagtgttacaatcttggctcactgcagcctctgcctcttgggttcaagtgattctcctgcctcagccccctgagtagctgggattacaggtgcatgccaccatgcccagctaatttttgtatttttagtaaagacagggtttcaccatgttggccaggctggtcttgaactcctgacctagtgatccgcccaccttggcctcccaaagtgctgggattgtaggcgtgagccaccacaccgagccgctaatttttgtatttttagtagagacaggatttcaccatgttagcaaggctggtctcgaacaggtgatctgcctgcctcggcctctcaaagtgctgggattataggcgtgagccaccgcgcccgacccagaccctcatctccaatgctactgtcaaaattaaagccatcgtagtctctttcctggacgctggaacagccctctaactggtttcttgcctccagtcttgcttctcttccacctgccatactggaaccaagtccttcagtgacttcttgttacccttactatctgatccaggacttttaaagtggtttatgaggcccttgttggctccacccttgccttgctctgagactttatcactgcgtaccccctcctcatactccatcccagccgcactgaaccttttttcagttctttaattttgaacctgtgtctaggcctttttgcatctgctgatttcttgtgcctgmttccccctcccatcccatgtccacttttctggctaagtcttacttttcctttgggaacttaagttaggtaccaaagtagggtacccctgctccatgttactgcaggatcctattatatatgtctttgaaaaatagtgtgtaaagtgcattgttgaaattccttgtttcggaagttcctttgctggattttgaccccgcgaattcagggcccctgtatctgcattattcaccactgtatcctaatttcttagaatttgccttgtacattgaaagtgctcagtggacacttgttgaacaaaagcagtgaaaagactgattaatcagaaatgttgttaattgaaatggctagtgagatcacaaatctcaaaatttttcttttctttttttctggaktcagtgtcttgctctgttgcccagggtggagtgcagtggcgtgatctcggctcactgcaacctccgccttctgggttcaagccattctcatgcctcagcctctcgagtagctgggattaaaagtgtgcaccaccatgcctggctaatttttctatttttaatagagacagggttttgccatgttggccaggctggtcttgaactcctggcctcaagtgatctgcccccacttggcctcccagagtgctgagatctcaggtgtgagctgctgcgcccagcctctttagctgttttcccttcaactattggttagaccaagatcattattctcgttatatttaagsttctttggttgtatctaacagaactagactagctcatgcaaaaaagagcagggttgggtgaagaggggcagagcagactattttatcactagcattttagagaatttaaagcaataataaaatgaactaaaagttagttggtctgctttttattatcaccatgaatctaaacagacaatctgtgcccttattgtctgtacccagcttggacctcttctaccactctgtccttggtaggccactgaaaaaagttaatttatattaaggctataaaacccaagaacaggggaagtggttgggtattcgaagagactgagtggaatcaggaactggaaagctagcaggaatccaagcaactcagtatttcttctcttgggatacattaatctctgcacactttctctttctctactccatgtctcccaaatttacttgttctcggttccaacccacgctagctagcatctttattttcaggcatagaaaatctgattggcacaacatggagtcaggaatccattcactcagggatcagtcatctgtggccatggcacagagttaggtaggacaatcgtgactgttatccacacctcaacattgggggcgttctcaaagaagaagaatagctccggcagccatggcagatggcatacgtaggagtttttaagttataataacttacacatggttttaaaaaaaatcaacatgatggtatgaactgagtgaaagtacgtgctccctccattgaagtaaccacttttttttttttttttttttttttttttgagatggagtctcgctctgtygcccaggctggagggcagtggtgcgatttcggctcactgcaacctccccctcccaggttcaagcgattctcatgcctcagcctcttgagtagctgggactacaggcgaccaccaccacacctggctaatttttgcatttttagtagagtcggggcttcaccgtgttggccaggatggtctcgacctcctctgccctcgtgatccaccaccctcggcctcccaaagtgctgggattagaggcatgagccaccgtgccctgcctgaagtaaccgcttttaactgtttttgcttttagaggtttttttctttgagacagagtctcgctctgtcacccaggctagagtgcagtggcacgatctctgctcactgcaacctctacctcccaggttcaagcagttctactgcctcagcctcccgagtagttgggactacaggcgcctgccaccacacccagctaactttttgtattttcgtagagatggtgtttcactatgttgctcaggctggtccaaaaaawttttttttctttgaaataaaattcacataacaaaatttaacattttaaaatgtacaattgaattttttttactgtattcataatgatgttgtgcaaccatcaccaccactatctttttctcttttttttgagacggagtctcactctgttgcccaggctggagtgcagtggtgcaaacttggctcactgcaacctctgcttaccgggttcaagcgattctcttgcctcagcctcccaagtagctgggatcacaagcatgcaccaccattcctggctaatttttgtatttttagtagagacggagttttaccatgttggtcaggctgctcttgaactcctgatctcaggtgatccacacgcctcggcctcccaaagtgttgggattacaggcatgagccaccacgcccggccacccctatcattttcatcactccaaaaagaaaccccatacctttagtagtctctcccatttcttctgtcttccatctctggcaacaactatacttctgcccatggatttacctattctggacgtttcgtgtaggtggaattatacaacatgtggcctttgaggtctggcttcttttcatttaccatgatattttcatggttcatccatgtcatagtatgcatcagtactgcattccttttttttttttttttaagagatagagcctggctctgtcgtccaggctggaatgctgtgtggcaagatcatggttcaccgcagccttgaacttycagtytcaagtgatcytgcagcctcagcttcytgagtagctgggactacaggcatgtattacctgtattaccacacccagctaatttttaaatcattttttgtagatttggggtctcactatgttgcccaggctacactcaaactcctggcctcaagtgaccctcccgcctcggcctcccaaagtgctgggattacagatgtgagccactgtacccagtctgcattcctttttatggctgaaaataacattccattgtatgtctatactgcattttgtttatccatatatttgctgatggacacttaggttatttcctggctgttataaatactgctactataaacattcatgtacaagtttttgtgtgaatgtaagctttttggttctttcccagatatacctagggatggaattgcaaggtcatatgataattttatatttaactttttgaggaattgccaaacttttccacagtggctgcaccattttacttcccaggttcaagcaattctcctgcctcagcctcccaagtagctgggattacaggtaccaccagcaagcccagctaacttttgtatttttagtagagatgaggtttcaccatgttggccaggctggtctcaaactactgatctcaggtaatctgcctgccttggcctccctaagtgctgggattacgggcataagccactacgcctggcctaaaatgtttttaagaaaggttgtgtgagaagagaacaagaggcacattatataatgttaaaacagtcagttcaccaagaagacctaactatatatgcaccaagcaacagagcttcaaaatgtatgatgcaaaaaccagcagaaataaaagaagaaataggcaaatctgcaattgtagttmgatattttactactcctctctcagtacttgacagaatagtgggtagaaaatcaaaaagaatactgaacaacacaaaactacacaacactgtcaaccaagtagatctaattgacatttgtttacctaatgacagcagaatacacattcttttcaagtgcacatgtaaattcaccaagataaaccacattctgggtcataaaccaaatagtaaactttatatataagaagaacacttctaaayaatccatggattaaaaactctcaaaggaaagctttgaatattgtgaactaaaccaaaatgaaaactcaacawaccaaaatttgtgggatacagccaaagacrtgcttagatgcattagctgccttaattagaagagaaggtctcaagtgaataatttaagcttccacctatgaaactagaaatgaagagcaaaataaacccaaattaaacagaagaaagaaataatagagaacaaaaatccatgaaatagaaaacagaaaaaaaagaaaaaatcagtgaaactcaaagctctttaaaaaaaaaatcaataaaattgtaaacctctagccatactggcaaaggaaaaaaaaaaaggaaaacaaattaccaatagtagaaaagaaaaaaaggaagacaaattaccaatattagaaaagaaagaggagataaccaccgtagactgtacaggcatgaaaaggatawtacaaacagctctacagatagaaattcatcaacttagatgaaatggaccagttcctcaaaaaccactgtattagctttctatttctcctgtaayaaattacaaatgtagtgactttaaaacaaaaggtttttatttacagtcctggagacagaagtctgacatgggtcttactgggataaaatcaaattgttgacaggacttgcattccattgtggaggctttaggagagaatctgttccttktcttttcctgcatctagagtctgcccacatttcttggcttgtggcccccttccgttttcaaagacaacaagtcragttgttctcacatcttactctaacttcctcttttgccacatccttccacatttaaggaccsttgtgattacattgaacccacccagattgtttttttttttaagttcaactgattattaaccttaattccatctgctaccttaattcctatgtaacatatctttacaagttctggggattagaacatcagtatcttggttgggtgggagggggtcattattctgctgatcacagccacaaactatccaaactcacccaagtagaataatatttcaccttttacgtctggcttatctcacttagcataatgttttcaaggtttattcctgtgtcttcgktgctttttttttttttttttttttttttttttttgagtctgagcctcactctgtctcccaggctggagtgcagtggtgcgatctcagctcactgaaacctccgcctcctgggttcaagcaattctcctgtctcaccctcccgagtagctgggattacaggcgtgtgccaccacgcccggctaatttttgtatttttagtagagacgggggtttgccatgttggccaggctggtcttgaactcctgacaggtgatccgcccgcctcggcctcccaaagtgctgggattacaggcgtgagccaccccgcctggccctcgctgcattttaataaagatacaaaagctaattcaaatggaaaaaggatattcttttcatcaaagacatgaacaatttaacatttacatggaaaaataaaatcctcaacctttacctcatattttatataaaattaactcaaaatggatcatacatctgagtataaaacctgaaactataaaacttttagaagaaaacagatctttgtgacctggggtttggcaatgagttcttaagacatgacaccraaggcacagtgcgtaaaacaaaaatttgataaattgggcttcatcaaaattaaaaacctttgttctgtaaaaaaaaattctattaggagcatgaaaagacaagctatacactgggagaatatatttgaaaatccggtatcagaaaaagaacttgaatccagaatatataagaaaacacagcagtaatttaaaaactcaattttaaaaggggcaaaagatttaagtaggcttaaatagacatttcaccagataggatacaaggatggcaaatatccccctgagaagagttcagcattgttagccattagggaaatgcaaatttaagccatgatattgcatattagaacagctaaaatttaaaaatacatagtgatagtactaagtactggcaaggatgggaacagctggatctcttagcaaaatggtgcagccactctggaagacaggtagaatcttaatcatacatttaccatgtactcaactgtgtcatatctagatacycattctagagaaatgaaagctcatgttcacatgaaaacctgcagacacgtgttttatagttttgtttatagttgtcaaacctgaagacaatctaaatgtccttcagcaagcaaatacataaacaaattggttgttattcagaggaataataggaataaaaagaaatgaagtattgatatacaaatgtgttggggagtcctataaccacccatatgcttgaagatttactaggacttatatgattcactgtatagttgtactcctcctaagatttattgcagcaatatggtaaggatacatagttggatcctaaggacacacatggagtctggaggaatccagtgtcttgataattttttctttttgcgtggtggaggaggtggtgtggggggggacgaagattcactctwgtcgcccaggctggagtgcaatggggcaatcttggcccactgcaacctccacctcccaggttcaagcgattctcctgcctcagcctcccaagtagctgggattacaggcgcacaccatcacgcctagctaatttttgtatttttagtagaaaaggggtttcatcatattgaccagacttgtctcgaactcctgacctcaggtgatccgcctgccttggcctcccaaagtgctggaattacaggtgtgagccaccgcacccagccaagaggattttttcattttaagtgcagaggcaggaggatcgatcacttgagcccaggagttccagaccaacctggacaacatagggagacctccatctctacaaaaagatttaaaaattagccaggcgtggtggcccgtgcctgtggtcccagctackcaggagactgaggccagaggatcacttgagcccaggaaattaaggttgcagtgagccaggatcacaccactgtactccatcctgggtgacaaagcaacacaacaccctgcctgaaaaaagaaaattgcatttatatacattcaagtaacttagaaataacttgctgctccccagtcactgcttgatgtagctttactatttgttatgtggtattctcacgtcttttacacaattgcaggcagaatagttggtgtggcagtcgtggctgtgtaatagtcttttctttaaacatccattttgaatacaagcgaaaatacccacttatcttttacccaattcactgtatctagtagagcagcgattcttaaacttcaatgtgcattatagtcagtcacatagagggctttttaaaatatgaattgctaggccccacccctaagagtttctgattctgtggttcggggttgggctgaataatttgcatttctaacaagtactcagatgatgctaatgatgctggtcagggaaccaactttgaggactagtttgttagtggatttaacgcctacacattagtatcacctgaggagtcccccatccctacttctttttcacaactggcccttgtccagttaagtaaacgtgtttggaagtcctgctcaaacatggtgttaggattttatggtccttttcaacagatgcagctccataacaagtgtagactttttattttttactccaaatcttcataacacttgtgtgatgaatataaacagcaggattggccagctgtgtggtttggtggttttagttcacataaatctgtattccgtcaatagctcactttttggtcttggccagttcccataagtgcctgctgtagatggcttgttaattgtaaggagtaaatagtaactacacagtagagtaattggctgtcactttgggtgatcaaaattaacatcaccaatgaagggaagatggacatcatgtcttttcagacatctggaaggataaacatcacttatacagtagtttgacaacattgtttaaacagcagttcggttatacttgattggaatctgatcataagggaaccaacagatccagattgagaagcattcaatttttaaaaaaggaccttattcttcttaaatagcaatgtcatgaaatataaagtttgcagaactattccatatgaaaggagattaaagagatctgatagctaaatgcaaaagtgatcctaagctgggtcctgtaactgaacggaaaaaagtgctatagaggggatagtattgggtcatatgataaataggaatatagatggtagattaaataaaaagtattgtgccaattttgaatttcctgaggttgataacagtactatggttagtactgttccttaggagacacgctgaaatatttgtaggcaaaaatacctgatactgcaacttaaatgagtcagaaaaaatatgagatggagcaaatggggcaaagcatacaggtgttctttccaacttttttgaatctggaattattcccaaatgaagttataaacaaaaaaacttaggctctttatttcaggatagttgtaaagataaaaaaactacataaaaatgtattgaaagaacagaatgctttacaagcagtgcttcatatgctgctgaatctaggtggccttgtagcacattctgtaggtgtccccagctacactgtgggtgctagagagcctgcaggaggtcagcatcctcctgatttgtaactgccccttcccctgctcagtacagcttcttgaatgtgtcttgtgcrgtacttcagacacactgaagcataaaatacaccctatctaaaaattcattctatcatagtagctaattttagtttgttttttgctgactaaactattgtgtgactcacctgatcatagtcttttattatatattgcatgtacattagctttgaaaagtatatttctctttcagcccaaaatggagttaatcctgactgggagaagaaagtaattgagtattttaaggaaaagctgaaggaaaataatgctcctaagtgggtaagcttattgctattttcgagggagagggttggacagactatacagtttctcttagtagagtaactaagtaacccacatgtaatttaaaaatatgtaaattaatgtacttctgcttcaagtacatttgtattaaaagattttggtcttttgctaattaagtttaagcatgtaaatacttatacattatgcctctaggtggcagtaactgactgttacttcctgagacaaatctttagttgcaagagtgtcagttacctttgttttattaccttcattttaaaagaattggcatgtgctagttttaagagaagagctcaacaaagtaaatgcctttttgatcattgaaaagtgttctgaatgaaaagcattttttagcattcttttacattgtggtcaaatgttatctaaaacttgaaagaaatggaagagaacttgggttccagcaattatattgaccattgagatcatttggctctctgatgtggcatgggtgtgtgtgtgtgtgtgtgtgtgtgtgtaacagtttgagtctggatataaagtttgtgtatatatgcttaatgttgtatagacaggatatttagttgactgacttgattattttcctttaaggtaccatcactgaacgaagttccccttcattatttgaaacctaatagttttgtgaaatttcgttgcatgattcaggatatgtttgaccctgagttttacatgggagtttatgaaacggttaaccaaaacacaaaagcacatgtaagtattgctgttttcatgaatttgtggtattaattttgtccttttactgttggtggtagttttggttcagatatattgatataattctgtttttctatgtttggggtcataggttcttcattttggaaaatatagagatgtagcagagtgtggggtatgtatctttawtatatatgaaacatttttagtaagaattttttcctaaacagagaatttgtttagctaatcttaaatttatttatcttgtgtataagttacaagaaatcatgtgaaatgttttccttatttggttttatttaggagtttgatgtgacttttttttaatcctctaaagatcttttgaaggggaaatactgttaatgccaaaattaattcctctctccaatatctgtatataatatatgtaaaacaaagaaccctaggttgcaaaattaaatcctttttaattccttcaaagacaaagccaatggtaatctcactgtttctttcatagaaagctgtcagaatcagcctataatacagaaatttaatgaaatattcattcctaggtagctcggagatgagattcaaaagtcatatattattccctaggaaaggcatgttctctttcagatatacttagaaaactctaagaagtggaaaggacccaggagacatcaaatttgagcctaatacatacaagcaaggatttttttgtttgcctttctttctaggcctaaggtacctttctcctagaatgagtcttttatttatgactcttgagcaacatgtgtaccaactctctgttagcctttggtagtgtcacacatggacagcctcatctattttattgacccatttccagatgctgggattaccgagttacattaatacacagctttttatggtatacagtaatgtaatatattagcctaatgtgttaggactccttaaacaagggatactgtaatcattaatacagttgatccattaggcttggcacagtgtttattttatggaaacactctaaaagaaaaacagacctgaagttcatcatgtgtaaggttacacaaatctatctttcaaatgagttcattactctaaataattgtcagaagttacatttttgtttaatataatctttgcagtaaccttccaaattagggcaatttttctgtccasatctgcctactgaactagaatatttaatgagcaacaacttctgttgtgaattaacggactgatattggggtttgataaatcagtttcctaaggtttggataagccaagagttagactctaagaatataaaaaggcctagataacatcataaaagtaaggttctagatccacaaagcagagaactagacccagattataagtcactccmgaggtcccatttttctggatttgagggaggaagtgtttgatgacagtatttgaagtgattttatatccattttcttttaaaaagtaatagtttggaattagttacttgttaattaatctgtaaaatatttgctgtggtgttataatgtgaaaatgtggttgctaattttaaaataaattttgggtkttttaaagtaaatttttaaaaacactttttatgtatatcacagcctcaacaagaacttgatttaaactctccacgaaataccactttggaaagacagactttctattgtgttccggtgcctggggaatctacgtgggtaaaagaaatatcctttatctgaactttcttactgtgttgatggtttctaaaaacttagcctttaattattcttcctttgcaaagcttggctttattttaataaagtgtgtttcatttgttctaattgagaaaacccataaaacgggctaagtatttgtcactgagtaatgctaaaataacagtacattcctatagtgaaatactgttaaaatgattgaagtaattttttttttttttttttttttttgagatagggactcactgtcacccaggctggagtgcagtggcacaaacatggctcattgctgcttcaacctcctgggctcaagcagtcctcttgcctcagcctcccaagtagctgggaccacaagcgtgtgccaccatccctggcgaattttttgatttcttgtaggaacagggttcactttgttgcccaagctggtcttgaactcctgggctcaagtgatcctctcacctcagcctaccagagtgcatgctccgcctaaggcacatttaaaggtactgaaaaaatatgataattaaagtaaaaaaatagtttcaaattggaattcattctaattaagggaaracaacrtgttggctcttttgagaggggattgtagaaacatttcctttttatttacgatagtaattttttaaggcatggcccacctacactgaaatgcacagattttaaggtaatgcacagtgatttggataaacrcatacacctatataatttataccccaaagtaaagaacttgtgcctaaaaattcctttctgcctttttctagtcactacctcctcccctgcaagcacaatcctgaattcttgactatggcttggtcttgyctgttgaatgacatctaaatggactcatataatatatagtctttgtgtctgacatcttgtgtttaacatcatgcatttgagtcatgtgtgtatcagtagttcttcatttctttcttgttttcttttgctaagtattatttgtttatacagtctccaattgagcatttaggttatttacggttttaagctgggcattttctttgtgagaacattttaaactaccaattcagttctttttgtttgttttttgtttgtttgtttttgttttcttgagatggagtcttgctctgctgctagtctgaagtgcagtagcgtgatcttggctcactgcaacctccatctcctgggttcaagtgattctcctgcctcagcctcccgagtagctgggactacaggcacacgccaccatgcccgccagtttttgtatttttagtagagacggggtttcaccatgctggccaggatggtctcgatctcttgacttcgtgatctgcctgcctcggcctctcaaagtgctggrattacaggagtgactaattcagttttttaacagatattttgagtcagttgtgataaattgtatctttcaaggactgttttgaagtcatttaaacccagttgttgaatttattgacataaaacttgtcagagtattttctttttaatgtctgtgggatatctagcattgatctctttcattcccaataatgttagtctatttttcacttcaattttctgttttctgcttcatccatttctgctttattttgttctttttggtttggttttaattggtctttttctagccttttttttttagacggggtcttgctggctctgtcacccaagctggagtgcagtggcacaatctcggctcactgcaacctcagcctgccaggttcaagcagttctctgcctcagcctcccaagtagctgggattgcaggtgcctgccaccatgcccggctaattgttttgtatttttgatagagacggggttttaccatgttggccaggctggtcttgaactcctgacctcgtgatccacctgcctcaacctcccaaagtgccgggattacaggcgtgagccaccgcgcctggccctttttctagctttttaaagtagatgctcagattattgatttcaaatttttcttattttctaatgttagcaactaaagctataaatttctccccagtcactgctttggttgcatcccacaagttttcatttgttaggtttttactgtcatttaattcaaaatattttctaatttcccttgtgatttcttctttgatccttcgcccttgcaacaatctgcttctgtgtagtctcattcttcgtgctatttttgtcatagatttcactcatccttagattatacagctcacaacatactatttttgtttttaacagtcgtttgtcttttatataaattaagaagcaagaagaattcatctttttttatatttggcatcatttcctttagcgatattattatgattatgattttattttattttwtttttttttttttttgaggcagagtcctgctctgtcaccaggctggagtgcagtggtgcaatttcggctcactgcaacctccgcttcccgggttcaagtgattctcctgcctcagcctccagagtagctgggactacaggtgtgtgccaccacgccagtttttttgtgtttttagtcgagacggggtttcaccatgttggccaggatggtcttaatctcctgacctcaggtgatccacccaccttagcctcccaaagtgctgggattacaggcataagccactatgcccggccagcaattattttttttttaaatacagatctgttggtgacgaattctgtcagtttctgttcaattgaaaatgtcttttattccaccttcattttgttttatttatttatttatttatttatttatttatttttttgagacagggtctctccctttgttgcccaggctggtctcgaactcctgagctcaagtgatctacccgcctcagcctcccaaagcactaggattccagatgtgagtcaccacacccggcctcaccttaatttttgaagaacattttcattggatatagaatttttattttttattttaataatttattttaaaaaaacagaccaggcacagtggctcatgcctataatcccagcactttgggaggcagaggcaggaggatcacttgaggccaggagtttgagaccaacctggccaacatggcaatactctgtctctacaaaaaatacaaaaactagccgggcttggtggtgggcacctgtggttccagctactcccatggcttgagacgggaggatcacctgaacccagaaggctgaggctgcagtgagctgaaattgtaccactgcactccaacctaggcaacagaacgagactgtctcaaaaaaaaaaaaaaagaaaaggaaaaaagagatgagttctcactgtgttgcccaggctactctcaacttcctgggctgagtggtcctcccacctgagcctcccaaagtgttggatttacagatgttagccactgcatccacctgggatttgttaggggtggtgtagaacagcccttgttgaacagtagatcatccttattcatgaggtctgctatttctgggtcttacccaaatgcctaggatgactagtagggtccattatagtattatactacttccagagtctccatttaactctctgccaactagcagctgttctctgctagtcctcagggagtcttgacttgtatatccacaatttagtgttttgtcagagatccaaatggaaccttcagggtcttttatccgtaactacttcctttctagtacttctctgcaaattccagttgcttcactagccctgaaccatgtgctctgtcttctccacccagtaagagagggcctctactgctctttgttgcagtttggagaacgtctccaggagagagctgggagaatttggagtttacctgctgtgtttctcctcattcaaggatcataaccttatgctccctgttgtccagtgactgaaaacagttgcttcacatattttgtccagttacattgttgtttacagcaaggatagcagcataaggttgatacctgttattctcatgaccagaactggaagtctagyctccttttatgaaaatgcattctattttaactgaattgccaaactagtaattttttataagtcatataattagcaaaactttaggatattcctcagtttatgatagtcttttcttaacttttcgtttaacgcctatgttaatgcaaaccaagctcgagtcagtccctcaacatcctacactcctagtcgccacaagaggagttatgaagatgatgacgatatggacctacagcccaataagcagaaagaccaacrtgcaggtgccagacaagcaggtagtgtgtgccaacaggttttctctagactttgctctcttacagtagattggttttcagagtgaattgttacataatatagctctatatttaggagctggcaatttatcagagttacagacatgttgagagtttttacagtactctgatgagactgtgcttcgcaaatgagcaattaggcatcactttgtgacaagtggctgctctgatgtatgtgtttggagtctcaagtgactatctggaaaggtcttttctatcttcatatttatttttaatacagaagcctggtactttaccctaaaaatgagttatttttatctgaaaacatgctttctcattttctttttaattttcttgtttgtttgtgttttgagacagggtttcactcccatcacccaggctagagtgcagtggcataatcatggcttattgtagccttgacctcctgggctcaagtgatcccctgtcacttcaacctgcctagtagctaaggctataggcgcatgccaccacatgcagctaactttttaaattttgtgtagagatgggatctcactatgttgcccaggctggtctcaaactcctgggctcaggtgatccttctatatcagcctcccaaagccattggcataacaggcgygagccaccacgcccaaccagtcttagcttttataagcagtggatttctttgttatggtgggtatataagtttgtctttatatttgtaatatattcgagtttgtaatatattcgagtatgtgctatccacttcccttcagcacctttaatcagaaggaaaaattaaaggacaaggaggcaaaacaaatcagtctggtcatttactatctgcaagattgggtagagaaggctttttttttttttttttttttgagacagagtttcgctcttgttgcagtggctggattgcagtggcacgatcttggctcactgcaagctccacctcttgggttcaagcaattctcctgcctcagcctcctgagtagctggaattacaggcatgcgccaccacgcctggctaattttgtatttttagtagagacggggtttctccatgttggtcaggctggtcttgagctcccgacatcagatgatccacttgcctcggcctcccaaagttctgggattacaggcatgagccactgtgcctggccaaggcaaatttaacagtcagtggtaaacagggatttactaatgaattttatttacccttatattactctactttataaattgatatttccagattttcttaatgctaagatatattttaatgtgtttaaaattggaatgttttactataaatacatataaatgtcgtagtattctttttctccaccgatccccagaatatattaaaattaatggtctatcatctagcctggacagcatggcgaaaccccatctctactaaaaatacaaaaattagccaggcatggtggcaggcgcctgtaatcccagctgtttgggaggctaaggcagtagaatcacttgaacccagaggggcggaggttgcagtgagctgagatcatgccattgcactccagccagagtgacagagagactccatctcaaataaatatcatagtaacttatatattgtaatatattcgagtgtgtatttaagtccaggaaatatgttaattctcttatcacttaagcagttgatgctactttttatttcttaccattcttgtttgaatgtcttaatgcaggctttttatgcatttgagtactttatttatataaagtaacacttgttggtgtttagtcaatgttttaggctatacatatttttaaactttttattttgacacagtatagacttacatgcagttgtaagaaataatacagagaggctggttgcggtggctcacacctataatcccagcccttcaggaggccgaggcaggcacatcacttgaggtcaggagttccagtctggcaaacatggtgaaaccccatctctactaaaaatacaaaaattagctgggcatggtggtgcacgcctgtaatcccagctacttgggagactgaggcaggagaattgcttgaacccgggaggcgaaggttgcagtgagcgctgatcgccaccatgctccagcctgggtgacagggtgagactctgtctcaaaaaaaaaaaaaaaaaacagatcttgtataccttttagcctctacttcccccagtggtaataccttacgtaattatagtagaatgtcataaccaggaagtggatattgatacaatcattttttttccttttttttttttttttttagacggagtcttgctctgtcacccagactggagtgcagtggtgcaatctctgctcactgcaagctccgcctcctgggttcacgccattctcctgcctcagcctcccgagtagctgggactacaggcccccatcaccacgcctggctaattttttgtatttttagtagagacggggtttcaccgtgttagccaggatggtctcaatctcctgacctcgtgatccacctgcctcagcctcccaaagtgctgggattacaggcttgagccactgcacctggcctgttctttgcagttttatcgcataggtagattcatgtgaccaccaccacagttaaaatcgggaatatttcattacccagatctctcatgttgcccttttatgctcctaactaccactctcctgcctcctccgtccccagaagtctctagaccctagcaaccactggtctcttctccatctcttataattttgtyattttaagaatggaattgtatattacataaactttggggattgtcttttcttcagcacaattcccttgagatccatcccaattgttgcatgtatcagtagtttgtccgttttattgctgagtggtgtttcgtggtatggcaggctataatttgattctcatgttatcagccctaaagtgtaactacttcaggagttggggttattcttttaatgacctgtatatccccaacaactggtttgattcctggtacatactggatattaataagtatttggtaaattaatttattgctgtatggttttattctgcttaattaatagaaaaagtatgttctaccaaggagttttgctgtcggtagaccatgtattccttaaatcaaagatgtcaaagtaaccatattgcaaatcaacttttgaaactggttatacatgagatttgatgggaggaatttgttgatatcttacagtaagggaaaaaaaagtaaaatttttagatcttcatgtttatctttgtcctcttacagatcaaacaaaagactttgttagtatgtgctgtttccttaaaaactgtaacaacttgaactttgcaagctcagaagcatcacgtatatcaaacttgaaaggcacttatggaatgttctttttctccaggaggccttagaaatgactaagtgcaatgctatcctttgaatttagggagtgttggtggtcttcaatggtgtggagagccaaaacgtttagaaactgaagcttctactgggcaacagctgaactctctgaacttgtcttctccttttgatttgaattttccattgccaggagagaagggccctgcatgccttgtgaaggtaataaaacctttcgtagatccaacactgaaatgttatgtgtctcagaaagtagcttagtgtctgagcatttgcatttgttcccttgtgctgggctagctatagcaaatcactgcaaatttaatagcctaaagcagcaaaagtttatcatcttacaggctttaggtcagaaatccaacatggtctcactggggtaaactcgaggtgccagcagggctacattcctttctcggagcccctaagggagaatttccttggccttgtggctccttcttccatattcatagccagcaacattgcatttgtctgaccatttttttcatgttgacatctcatctgaccacaaccaagaaagtttccccaattttaagaatccgtgtgattacatggggcccagccagttaatcgaggataatcccccccatttcaaggttattaatttaatcacacctgcacattccttttgcatgtaagctaacaagttaaaagaatcgaagaacatctcaaatgcagaagcagaacaacttttaaattatgtctgttcccttcctgtatcatttctaacataatatcttcttcatttttgtcttcttccttctctcagcaaaacctatttttcacttatatttaaaataaaacagaaggaagaaaacttttaatagtttgttcttccatcttacttattctagtgttttgatcctgataaatgagcaagtgatagaaggttcagaaatgattgttaaggatttctatccttattctttgtgcattttgggtttttttgtttttggggggtttttttgtttgtttttttgaggcagtctcactctcttgtccaggctggtgtgcagtggcacgatctcggctcactgcaacttctacctcctgggttcaggcaattctcgtgcctcagcctcctgagtagctgagattacaggcatgcaccaccacacccagctcgttctttatattttttgtagagatggggtttcactatgttggccaggctggtctcgaactcctgacctcaagtgacccacccacctcagcctcccaaagttctgggattccaggggtgagccactgcacmcagattctcagtggttttaactgaaatgacacttaagtcatatggcacagggaccaaaattaccattttttcccctgccttgcytctaccaggtctaatcagtaaatggccttgactattactaagtccatcatgacagacaattttgaaaggtttttttttttttttaaattgtgaaaaatcttctggccattccaagttttgtgttaatccgatgttgcagtttatgaataaatgcaaagttaatcatcttgtttttgttttttccttttcttggtgtggtttaataggttttgagatagtgcacagttctagttttaactgtcagcctttgggaaaaggctttttttaattttaggaaaagccttttttttttgtagtactgtggtatattgaaaacagacattagtctggaagttrggcatcctgtgttttggtttttcacttatttgctaactagcagaatgactcttggtctcaatttataaaaatttataaaataaaggacttgctttaaggtctrtttcctgatctaaaattccaagatattggtacttcaagactaatatcttaagctttgtgtctgttctaacagtgtgatttcatgtggtctcttgttaggtttatgaagattgggattgtttcaaagtaaatgacattcttgagctatatggcatactgtctgtggatcctgtgctgagtatactgaataatgatgaaaggtgagtctgtgtgctctttttttggtctcctttatttttatataatttcaagttttcaggagagttacaggatggttttaaagaactcccttttccctttytcccagatrtaccagttgtaaacacttgcaccccatgtgttttgtcattcatttgtgctctctrtgcacacatttttctgaaacacttgaaagtatgttgcagaaatcaagcccttttaccyctaactgyttgtcaacatttcctaagagtactgactttctcatatataattagagtacaggtatcaaaactaggaaatttgccacaaatatacaatacactaatccacaatctatacttaatttcactaattgtcttaatcatgttctttcttacacgtctcccttctgcatcccccagtccagggttcagaagctcgctcattctctatttctactgagttcatactgtatttctgattccagttcagcaccacaggtgtcgttctgcttgttctcctttctgtattagtgtaactctcttaaacttgattcccatttttcacaatcttatcatttgcacatttttacaacatagagaagggaatttcagaattgttaactcatacctttacaaaacataaacctaaataactagagttcaatctgaaacagtcctcagcctttgtctttcatggtcttgccactttttttttttccttaaacaacagaaatatatgtcttccagtagttctggaggctgggaagtccaaaatcaagttcccagcagatctggtttctagtgagggcccgcttcctggtttacagatggctgtcttctcacgtggtagagagcagacagccttgatgcttttgaagagtgtaagccagttaccagttacttgtttcctcatggttagactcaatgttttgcatttttggcaggaatattacagaattgatgtatcctcagtatgttacagcaggaggcatgcgatgtcagtttgtccctttactggtgaggttaattttcattagttggttaaggtggtgacttccagatgtctcttctgtaaagttacatttctcactttgtaattgacaagtaacttggaggaaggtacttggggacataaatatccagtttctcattaaactttcaccaatttattttagcattcattgatgattcttgcttgaatcagttattactttkttggcaattttctaacgcagtacatttatttattggcattctactataaaagatacctcttccatttgtttattcaagtaatgtatttacttatatttagtatagactaatagattctgattttattcaatgttaatatcattattttatttcgagacccaaattttcccagatttggctagtgggagccactttaagcaggtgccgggtcctttttttgagatgatgttatcattttttaacatttattttctggcatattaagctgttgcagcttcatcgtatgctttgaagatctgagtcctagatgtgctcgttggtactggattagatttgcatctaggcccttaaagtagacagagctaggatacatgcagcatatggatacatatatacgcacccacatttaaatgcacacatacacactcacatgcatgttttgtgtatttctaatgtctgtgaaaaaccatgggttcatatttctgattccagttcagcacagcaggagtcacatgttctagttgttctcctttctatatttatgacttcyttttctaacaaatttgattcccattattcacaatctgttgtttccccatttctaccatatacagaagggaatttcagaattggtaacccataccactacaaaacagaaacctagtaattagagttcaatacatttccagttcatttttattttagaatgcagctgtgtagtcagagctatgttccasttactcaggtaacttttcttccccttcagtgtgatttcattatttattttacttagaaagattctcagaggtgtcattctcggctatccccattcctgctgtctgttcccacccagcctccttagggaaccacagtttctggtttatccttcctgtatttatttttttacaaaaatatgaagatacgtatacattttatttctacctttttcttctataaaaggtaacatggtatatatactcttacactttttaattttttttattaacaacatatcttggaaatctagaccttcctcattcatttttgttttgttttgagattgccaaaagcaagggctgatgtccctcatctacaccagagtcctcttgttgaataccggacattaatcatcttagtttctgtgtaggatgaacttaacatttttcacagttaaaaaaaaatggtacaaaacaaaaattttaaacaactttaaataagcttaaccrtcccttaataatagtatatgagattgttcatcttggcaatttctgatkgtgatgactttcctgctttagttacttcactattgatgtagtttagtttagaggttgtattaggggtctctaaagggtcagaactgataggatagatgaatatatgaaggggagtttattaggagaatgactcacatgatcacaaggtaaaatcccacaataggctggggagcaaggaagccagcctgagtcccaaaatctcaaaagtagggaagccaccagtgtaggcttcagtccgtggctgaaggcctaagagctcctggtgaaccactggtgtaggtccargagtccaaaagctgaagaacttggagtctgatgtttgagggcaggaagcatccagcatgagagaaaggtggaggcggaagactcagccagtctgctctttacatgcctgcctttatgctggcagctgattagatgctgcccacccagactgagggtgggtctgcctctcccagcccgctgactcaaatgttaatctcctttggcaacaccctcacagacacatccaggaacaataattttcatccttcaatccagtcagattgacaaagtattaamcatcacagaggttaagagcacagacaggcaggcagcctgggttggagtcctgacttggccwcttactagctatgtcaccttgggcttggtttcctcattgtaaataagggtagatgtgaggttttggtgaatttgtacgtgtaaggcattgaacgttgtctgtcacatggtacgtactatggaaaaggttattatgcttgtattaaaaaatacaggagtatgaattwattacttcagtgtctatagattctataaagtcaagatctaaaagattagctatttgttttggtcrtctcacaaatctatcatctgcagatttatttagcaagtctgaaaaattcatactttcattgcttgtctactcagtcttcgagggatcatgtaagaattaaatttaggaaaaacaattagmaagataagagatgaatggattctccacacgctgaataatagataccagatggcttttgagaaaaagaccccagtttttgagatctgctgtcaagtattcgatgtcccggccaatagttcaaggagtacctgtgttttgaaatagccttatgagtgacatcctacattccatttattgaagtgctgaataacaaatattattgtttctggccaggcatggtggctcacgcctgtaatcccagcactttgagaggccaaggcaggcagatcacttgaggtcaggagttcgagaccagcctggccaacatagtgaaaccctgtctctactaaaaatacaaaaattagccaggcatggtggtgtgcacctgtaatctcagctactcaggaggctgaggcatgagaatcgcttgaacccaggaggcagaggttgcaatgagccaagatcgcatcactgcactccagcctgggcaacacagtgagactccatccaaaaaaaaaataaaaataaaaataccgttcttgaaaaattgaataaatgcattatttcatgatatgtcttaacaagcctgaagtctgtgtgatgtaacactttagaatgagaggccactttctgttctttaaggagatgtacaggtggaaatattcttggctttaactctaattttgttttccaagatgcacattatttttgcatctgtgcaattgatgtctctctaaattgaaactttatcayctctccacagggatgcctctgcactgctggatccgatggagtgcacagacacagcagaggagcagagrgtacacagtcctcctgcttcattagtgccgagaattcatgtgatcttagcycagaagttgcaacacatcaacccattattgcctgcctgccttaacaaagaggagagcaaaacctgtaagtgtaagtgttacagcctagtcaactatcractgttagcctcagtgtgtccagagctgcctgtaacgtgctcatagtggaattgagagtcaggtcttcattcctcacaataagtgttttcagtaatctctctctcgttgccccatttttctcttacattaattctcttcactgaaatgaggacaaaagagtatacaaggctgggtgcagtggctcacgcctgtaatcttagcactttaggaggccaaggtgggtggatcacctgaggtcaggagttcgagactagcctggccaatatagtgaaaccctggctctactaaaaatacaaaattagccaggtgtggtggcgtgtgcctgtaatcccagctactcgggaggctgaggcaggagaactggaggcagaggttgcggtgagctgagatggcaccattgcactccaggctaggcaaaaagagcaaaacttggtctcaaaaaaaaaaaaaaggaggatgcaaactgccttatttttaagattagcatcacttactgacggatatgttaagctttacctactgtcgactgaattgtgctttgctcacgtagttatttttttacctaagacacttgagaggaactggagtgtgtgtcctgactcaggtcttcctttctccttcagttgtttcaagtttcatgtccgaattgtctccagtcagagcagaacttcttgggttccttactcatgcccttctgggggatagtttggctgctgaataccttatattacatctcatctccacagtgtaagtsctgtatcctggtgggaattaggggagtttggtgtgtgtggaagtggaagagcgggaagattgctggtgtcatttgtgtgttttccttattgggcttcatcacatggtttttatctgtccagtgttaactgttataccaaatcacagacaaattccttttctcacagttcacatttagcattttgattatgtccccttaaattttagagccaaaatcagataaagcagtggtccccaaccttttaggcaccaaggacccatttcatggaagaccatttttccatggaccggagtggggatggtttcagtatgaaaccgttccacctcagaacatcaggcattagttagattctcatagggaacacacagatgtgcagttcacaatagggttcgcgctcctgtgagagtctgatgccactgctgatctgacaggaggcggaactcaggcggtaatgcccactcatccacccctcacctcctatgttgtggcccggttcctaacaggccatgaaccagtactggtccacggcctgggcgttggggacccctgagataaaggacctggctgatgagtaaaatgagctgttttatcccttttgcattctgaacgctctgtttatacatcccaaggcgcccacgtcatgtgcacgtttaacgtggacattgacactagcaccgcatcccttgactccactgtatttctttgtttctcattttaaaactagtgtgggcctttgacaagttccaagaacataaggaggaaaatgcacatcatctgtaatttcaccacttagaacctccgttaacctttaggtacatgttcattggtttttgtttacatatgtatacatccttgcataggtcttagttacactctaagcacagatgcgtgtcttgttttcagcagttgatatatattaaacattttcccatcataatgcttcatgaactttgtagtggctgcaaagtatttcactatgcagttgtaccatactgtaaccatttccctaaatgttagcttttcctagcttttctctattataaagttgcaggaaacatctttgtgctgtaaatcttatcttttctcaaatcagtctgtgacagtagtacataatggttgagagcacaggctctggaaccaaactacccggattcatatcccagctctgtcagcttccatttagatgaacatgttgcttattatcatctctgtgcctcggatttctcatctgtgaagcaaagacaacagcacctaccgctgaatggttaggggttaaatgaggaagcatttacatactcagaacggtctttggcacgtgaccagcagcacttacgtacaaatattggctattacttttattgctgttattctgataaaataactggtcagaatattctggtttatttttaatgacaatattaagctaatttttctattcttcgctatttgatagaaatcaggaagtcacttcagcatcttattgattgatttctttcttttctagatatacaagaagagatgtccttccactaggaaaatttacagttaacttgagtggttgcccacggaatagtaccttcacagaacacttgtatcgaattattcaacatcttgttccagcagtaagatgaatataaatatgtattataaacctaagcacacttaaaaaatccatctaactgtctttcattcacttcaaatatttaacttagagattttaatagatcttatttaaggggaaacaaagcctgccaaattacataatttaaaatgtacgttcccctaaacrtttcacttttttttgtctttttgcctaagcacaaatttctgtaagtctaacaaaacaattgtagtaactyccttaaaattacactctsttgataccaatttgtccaatttggtatcctttttgtacactaaagtcttaaatctaaataaactctaaattgtaggagcataattcttttagttgaggtaataaagttctttatctccattgcctcaattttaattcctgtttggaaagttgagctcactttatttgccagggtatctggaatgcagtatttgcgtggtggtaggatcttgggaacaggggaattgcttctgattagttgtgtgactgaaaatactgatcacttctttggaaattgaagagggtgcactagatctttattgaaccgaatgtattcagtgtctcagtgctaacactcgtccaggccctcaagaagcagaagtggactggaatataccagcagttctcagtctccttagactcactttacactctgaaaaatgtgttcatactcaaagagctgtttttcacgttatgattatatttatcattaatttaccaaactagaagataaagtaaatacacctattaaaaataaaaaattacatataaatatttttataaaaacaacttttcccaagccaaaaatgattagtgataaaggtgacattgttttacattcttgcaaatctcttcaatgtctggattaataggagacaatggatgcttgtatctgcttctgccttcagtctattgtagtctcaggttttggttgaagtatatgaaggaaagctggcctcacacagatggaaaagtagatggtaaaggaaggatggtttcgatagcctttgcagataactgggtggtggtctttgatactagaccaaaactgtccacatgagattttcttaaagatagttaagtgtggaatctgaaatcctattcgtaaactttccatagtctgctatggtaaaattcattagtctcgcacattgaaaggatcttttatccatgcatgattttgacctgattgaccctgtaaaagggtttaagcaattccctgggggttctcgggaccacattttgagaattattgaaacagatcctttgccctcacagagtttaggtagaagaccaacaaataaattaatacatggtaggtcatttaagcacccctaagctccccgttttcttagaatcactgaggtaatacacaaaactcctctaaattttcgcaatatatcttacctcttccttgacagccttcccccaccataccctcttctccatccctgccacattgtttgaggctggagggatggaagaatggattggtgtataaggcagagcwcagagggtgttgggaatggtggctcaagagctggaggaggagcatagatggttcgcttactcgttaaacactgagtgagaaggtgctcgcgtcctggaggcacctcctgagagctgcaggtccatccacagctcagtgtgctctgctccttgatttttctctgaaaagtttgttcaaaaatgtctatgataaatgaatacaattttaactcaaagaatatagaggaaaattaagcttttctctccctgtcttgaagagtaaaattaacattttctttttgctagctagcttgtgttaggtgaaagaggttaggttttggggtatttaatatttatatgtcagttatctaccatttgtttcattggttaaattaaaattgattttcaagaatattgaacaagacatttgagaataaagtagctcataaaatggatgaaattcaaatgtaagatctagatactatttttgcttctggagttcaagaaaccatatcactactcccttagaaatttataagatcactttttccatatgaaacacaatgtttaattccaagtacatattttcttaaaacagggaaacttaaattcttgttcactaaaaaatttctctttgcagtcttttcgtctgcagatgactatagagaacatgaaccatytgaaattcattccccacaaagactacacagccaatcgcttggtcagtgggctcctccagctgcccagcaatacttcccttgtaatcgatgagactctcctggaacaggggcagctggataccccaggtacrtacatagatgtttctcttccatttctgacttccttcgcactaaagccagatctaggaataacttttagaagagtatctatggacaaattcacatttaacaacgtaagataaaggcttggcatatgaatttgattaaagcatatgttataaactaattatatacaccaactatgttttgccatagtattctgaaagtagtacaatggaacagatatatatcttatataatatatcttatataatatatatcatatataatatataatgtctcatttaatatatatcatatattatatattttatatattatataatggagcaataatataaagggtagtattagtataatggagcagtaatataaagggtagtattagatgttgagggtcgtaagggttctttggtgaaaagttttattgtgtcagcgaatggttggagcagtctttatgggcctacagtgttgggttcttttgcgtagttgtatataacctaaaatttttttttcagtgagtgtaaggaatggtagagacagggtctcgctatgttgcccagctgatcttgaattcctgggctcaagtgatcctcctgccttggcctcccacagtgctgggattacaggtgtgagccactgcacctgccccaaatagctttttaaaaagctgaaatgggaggaagctttgcctttagtcatctaatacctcaaaagggaagtgtagaaaagatctaatataattttttttttgttttgagacggagtcttgctctgtcgcccaggctggagtgcagtggccaatcttggctcactgcaacctccaactcccgggttcacaccattctcctgcctcagcctcccgagtagctgggactacaggcacccgccaycacgcctggctaattatgttttaacctcccgttgtaaagtttgtaaatggttttcagagaatgtctgagaaataatagatcaaatggtttgcactaacctcagttgcggaatatattataaaatcacaagaaagcagattgtttaccagtgctcaaatgaagacaattaagaatacactgctggcgatcagctcaagaggtaaaggtagaagaaaaaatgaggtagactgggcatgtttaaggcaaaggggaatataaaatctgtaaaattcactaggctgatctatgtatgacggtagttttagtgtttccttggtttagccctgtaaatacaccacttagaaataatcatacttgggaactattttatgtctaggtgcataccagatgctaggtattagatttgygggggtatcgcctgcccccagaaagttctaccttgaccaagactgttgtaagcctacacacttagtgacgtttagcttagtaaactggacagcgcctcataccctttattaaaagtggtagaaacttcatggctcatcatcrgtgtcagcaaaactgatgtgtttagatgattaaagtcaaatgactgaaagtgttttcctgcctttgtaggtgttcataatgtgacagccctgagcaacctcataacgtggcaraaggtggattatgacttcagctaccatcagatggaattcccctgcaatattaacgttttcattacttcggaggggaggtcactcctcccggtatgatgagtcatttttaaatggagggaggttgacattggaaaaatacctacatttttgctgtttcttggtaccgcttattaataagttacatttgttgtaaaaaaaaaaaaaaaaaaaaaaactgtgactgctgatcattaagggaattgagtattttgcactgccatggatgaaaaccttacatctaccaagctcaggtatcagcaagtcatgagaccagcaaggctgttggcagcagaaacacccacatctgagcatagcgagattgcctgattttaacatccagacttctgttcttgctacctttgacccattgttttctgctaatcttatgtgaaaaatatttcagagttcttttaaaatgtccttggtcacttggtagttattttcatgctttgtggtgaaatgctctggtatgtcttcagagtggctggtaaagagagcttttaattctgtggatgatgggaaatgctcccagttgtcaaatggtgtgtagtctctgaataatagtattcacctgcgattgatgagaaaccgcctttgactaagaatgaaatggctcaaggatatgttttctgtgtgcaagtattgatagacctttttaattagctgctttttagaggttggctacatttttgtgtgcttactgataccattgaggaaacataagtaaccaagaaaaagctttcataattatttctgaggtagttataaagcatgtaaattaatattaaaaatagatgctcactggctgcggtggctcacgcctgtaatcctagcactttgggaggccaaggcaggtggattgcgtgagcccagaactttgaggccagcctggacaacatgacgaaacttgtctctacaaaaaatccaaaattagtcaggcatggtggcgtgcacctgtggtcccactactgaggaggctgaggtgggaggatcacttgagcctgggaagcaggttgcagtgagctgcaatcacaccactgcactccagcctgggtgacaggacaaaaccctgtctcacacacagaaaaaaaaacattattccctccccctaaataataagtggtattttctaattcccataggggctgacagagatgatgcatctttctttaaaaatgtagattaatttaggaactcagaaaatacagtgtactccttctcttttcaggcagactgccagattcacttacagccccagctaattccaccaaacatggaggagtacatgaacagccttctctcagcggtgctgccttccgtgctgaacaaattccgcatttatctaactcttttgagattcttggaatatagcatatctgatgaaataaccaaggtatgtmtaggttaaaataaaggatttccctgtgttgaattgcagtatgcaaccaatttacatttaccataattactgataaggtaattttgttatttgttttctgtcatgtctttttttattcctctgttactccattattgtctttttgtttgaaataggtattttccagtgtcccattttaatcccttgaagtttcttaaagttattttcttagtagttgtctttggggrataaacttaacatgttagtataatcatctattagggattaatgccagtttgtttagttatttttaatttaaaaaaaatttgtgtggctaatgccattttaattatattatacaaagactttgcccctttataattccgttccttctcctctcccttgtgctcctgtcatacaattacctctcagtacattgtatgtccatcaacacatttagaattactgcttttgcagttgtcttttagagaaaaaagttagaaatggaaaagacttctgtactattttttctatttgcctatgcaatcacttttaccagcaccctttatttcctcatgtgggttcatgttactgtctagtatcttttcatttcagcctgaagaactgtctttagtgtttcttgcatggcaggtctacttgtgcaaattctttttttttttttttttttttttttgagacagggtctcgctgtgtcatccaggctagagtgcagtgttgtgatcatggctcactgcagcctcaacccccccaggttcaagcgatcctcccacttcagcctcctgagtagttgggaccacaggcatgtgccactgtgcccagctaattctttgttttttgggtttttttgttttgtttgggtgtgtgtgtgtgtttgtgtgtgtgcagataggggatctctttatgttgcccaggctagtctcgaactcctgggttcaagtgatcctctctccttagcctcccgaaattctggaattagaggtgtgagctacctcgcccagccctcttttaagtttttgtttatctgggaatgtcttaatttctccttaaggctagttttgctggatgtagaattcttggtttatagtctttgtctcatcatttcgaatatgtcctcccaccactttctggcctctggtttctactgagaagccaactagtttctgataaggatcctttgtacacactgagtcatttttctgtcactgctttcaagattttgtggcttttgacagtttcgattatgatgtgtctatgtgtggatctctgagtttatcctacatggagtttgttgagcttcttggaggtgcagaataattcatattttggggaagttttcaacaagtttgggaaggttttggccatgtttctttctgcctcatttctctctgctctccttctgacactaccactgtgtatctgatgttgcatttaatggtatcccacaggtcttcaaggctctgttcattttccctcattcttctttttttgttctgtttcttagactaatctcagtgaacttatcttcaaatttagtgattttcttctgcctgatcaaatctgagcacctctagagaatttttactatatttttcaactccagaatttttatttccttcttctaaaaaattatttctctctttttattgatactctctatttggtgattctcatattttcctgaagttctttttatgtggtttcctttatttctttgaatgtttaaaatagccaatttagagtctttttgtctaatgtttgagtttcctctgggacagttttctactgactcccttatccccaaagtgtgagccataccttctggtttctttgtacttttttgttgaaaaccagacattttatttggtcagtggggtctcactgtatcacccaggctggaatagtaagtagcacagccacagctcactgcagccttaaactgctgggctcaagtgatcctcttgcctcagtagctgggaccataggtgtgcaccaccatgcccaactaaagttttgtttttttgttttttcttttctttttttttctttctttttttttttgtagtgatgaggtcttgctttattgcctaggctggtcaactcctggcttcaagtagtcctcccaccttggcctcccaatgtgttgggattacaggtgtaagccaccacatctagccacaaccagacattttaaattatataatatggcaactctgctttggaagttactctggaaattaaacctccctagggtttattgttgttgctgtttgttactgttggtaggttgtttagtaacttttttgactaattctataaagtctgtatctttgtcacatgtgggcactgaagtctctgctctgttagttttgtggttaatgattggaaagaaatttccttaaatgctgggtagtagtctcccagtctacgggtgaataataatcataaataaaaataaaagttggggcaagccctcagttcaacacttagccatgcaatttacaagccttagccttcatttcctgctcgcacagagcctccaggtcatgcagaggtgggagctrtggtctctgagcatgtctgcagccttctgagttcctaggagttacatacttaaggttttcagagccctctacagacatgtcatttcccagctagcttttccattgaagggtttgggttagtctgtctgccgcagctgttacccagtgtctcaggtagctaaggtgattggtaatttcttccgattgtttttgataaatgccctggggaaagaggtggttcatagtagacaggcttccagtcaggttaaataaagacaaccttgcaaatgggtccttccagggagccaccagacaggtggtcagatgacagttctccgggaatggcacttggaaggagccctagccctgttctctctccggtggctgccaggctgttgatttttgaagctactaattatcgcctggaggggaaggggttggaatttaggagtaggacatgttaaaatgctgccaggctcaacattcttaccaataatcacctggttttcttgcataaatgctctctggattgctgcaagtatggttttatttctagtttttaaaaagctgattttgatcagtgttaacagtagagacagttttctgcggtcccttctctgccattttcactaacatcactcttcctttgtggaaaagcattgtttcctatgccagttgctgatttatatgtttgcttgaccttaaatgaatctgagtttcattattttattttcatcagcagcattatgtatgtatatgctttggtactttcacccatattgcctcctttgtctaagaggctgacatgcaccttactacatcagtcaaggaacyatgttaattttcttttccttacaaaaatgcacatcatttacatttactcttttgataaaggcagttgaagatgactttgtggaaatgcggaagaacgaccctcagagcatcactgctgatgatcttcaccagctgctcgtggtggctcggtaagtggcgcaygtccattattgctgtttcggtaagcttgtgtatatgtcttctgagttattcagcagtaactgaggcagaattctaaaaacggaaatgaacttttccttttaaaaacgctgtatgaaagggctcattgagggggaatcgagtttggctggtgatctcttcagtggaacaggcatgctgcttgttctctaagcttcaaagagtgagccactttccaattctgactcttcaacgatttctttttagaagcctaacttggctgttgacttgtgtgtaactaccatacggtcttgtctcctaacgtgctctgtgttttcacaaagtattcctaggtcttaaaaaaaatttaaaacttactatcccagctctagacttaaatttgtttctgtgtttcaaaccaggtgtctgtstctcagtgctggtcagacaacgctgtcaagagaacgatggctgagagcaaagcagctagagtctttaagaagaacgaggcttcagcagcaaaaatgtgtgaatggaaatgaactttaaagatgtaatacctatgaagagtaatgggcaaactgtagccacataattgtaaaattcagatattcatttataccacattgttttataggtaatttctatcacaaaccagtgacatttcctgaaatcaagcctggtaacacctgatgtttatatgatattcagtaaggacttttaccttactgatttcatggagcttttgaagtttgttttataataattatataaattagtaatgatgtaaaaaaagtatttgatattaaaagtttaatattgataatgttgctgattgtaccatttccttagcttcagctgagtcataggccagactgttgaaatgctgaaatgaagaaggttgttgcagtttcaaagtcagaggaatcgtgcttcggatttcttatgttttctagttctctgtttttccagttcacagtgggttggggtgcattcagtagtccatctttggggaacggaggcgtacttgccattgattcacatgactacatgaaattctgtactgtcatttcccagatgtttggccacagaaactttttcccacttaacatttgttaacagcctgcaaaactaaacttgtacatggcagtggttcccagacttttgtattttatggaccggtagtaatatttccaaaaatctggggtactataaggttgccaatttrccttgccaagtaatccgaataaatcactgtattatcaccatttttttcataaaaggaaaggacaatctatctctgaataagaggagtcctttaaacggaatgaatgtggcttttgggggcaaaagaaaccaagacactacattgtctttattttctcctatcccagtgcatttgagaaccatgcataagggaatgctgtgctacaaagctgtgcccaaatatgaaaacaaaataggaaacttaaaaagcaatascccctttagaaagtttttattttcttaaatgtcattgagttgctttgattctattggatttttggcattttttatgggatcatcagttggttccaagtatgttagatcagctaacatctgctactccagtaacagcctcrtacaactgcaggtaggttttctccagaccaattagttttaatagagcaaactaacaacagactgtagtagcatggttatggcaaccagaatcttcagaaaggttaggacattactttttaagctgtcagtggtatcaartaacttacctagttggaggcagataaaggatcccttacgttttttcctataaggcctaaattgaaattgttaaccaaggaaacagggtcagccttgaaaaatcaaggaattcattgtacctaataactgaagtaaaaataactagttgttcaacttttcctaaactcaaatctatttttataaacaaatgtaaataakgtttatattagagttgaactggttttcatttttataactggtagactagaccttccttaaacttttagaaataaaatgaaggcttcactggatttgtgaggataaaatacattttctttaattgtcctagagcaaagtacattagtcaccatgtgttttttgtgccaatgtaamttgtaatttaccaaagaaaaatacatacattgcttggtcttgcagaaaagttcccttgaaagaacctttccaataaataaaacgtcccaaattagcagtaccttgggctgtttttcatgagtaagaagattcaccatcccatgtgatctgtgtggaaaaagaccatgtcctcttggtggaagacatgagagagctgaactgaagtggaggaggtggtgcaagagggaccttcctgctcaaggcccgcccaggcagcggaatggagtgcagtgcttggctgcagaaaccctttgtccctcacctatatatacacggacagtcaagtttgttgctctaacgtaaggcacagcgttaatcctgtatggccaggaaactgagtagactcctgtgtaaccctgtttggaactttgccttcttaaaatgatttttcaaagatctctttcgaactaatttctgtagagtttaaacgtgtattttatcacctaatgttgggttgtattttctcccatgttgggaacccttaatattttcaggacccggaagaaaagttggtagaagcaagcattcagttttgaatgtttggatttaaagtatagtttctgatccatttccctttttacatcatgagtatatttcaaaggagtaacatactggcaacagctagaccaagtgttcagttatagcaaatctgccgtttacaaattctttaatctgttatgcaaggaattctcatacccatttgtcactttaaattacaatggtactttattttaataatcacaagatttaacacgtaaaaaaaaaagatagcactaataaataacaaaagtggaatgcttatcaaagtaacgacataatgttcagttgagaatcagtcacttcaacagagtaaagctctaaagacaccagacgaaccaatacttgttggaatatgccatacaactttcttactgtggggattacaggggcagccctggttctgtgtggtcagagttatagtcagacagattcagcacaattgtgtttcagactaaattgtttttgagacacggtcttgctctgtcccccaggctggaggtcagtggcacgatcacagctcactgcagcctcaatctcatgggctcaagcaatcctcctgcgtagctagaaacacaggcatgcaccactatgcccagctaatttttgtatttttttgtagagacagatgtttcccaggctggtctcaaaactcctggcctcccaaagtgttgggattataggtgtgagccactgcactaggcccagactaaattttgaagttgtggatcatctacataagatgtcgaggatgcccctcctggaataaattaaaacctgactgacttctagaatttccagtagccaatatgggtgttcttacattcctgaaaacagcaaaatgaaacctaataggtgctggtattcacctctgatgtatcaggtttactgtgtgacaagtcttaatgctcctaggtttacattgtataggcagcagagtatttttaatgtgttcaagtagaatacggggaaaattaggatcaaatgagaattcatttctctagtgtcaataaccctcaactcctcagggaacagttaagccatcaaaactaaaatagctttatattcaaatgcttcagtaacatgttaaagtcactaaaaactaaatgtgtaatttactttgtagaggtaagaacacacaggaatgaactgacaaacagaacaaattatgaaaaacgctaatcccctaagcatctgcatgtccagcccttgtgtctactgtagtctacccaccccactccaaaaaaaggttcaggttatatcccaaagtgacctgttgctgaattactttcaaataagcaaagtgctctgtagtgtataagctactcaggtctacacattctagaatgatgcacttctgtagtcctggctgtaaaatttggaaatctactcaggttccgactccgtttaaaaccctttccaatgaacagaatttgtgatccctgggttcagacagtacaattaaaataccccaagaggtgaaaatttcatatttttaaataaaagccatggaaggattcttatggctaaaagctaaatctgaattatccgtgtctggcattgtataaacatctttttaagttcattttgctggacttgattaatgatttcaggttctggaggactcttctgaacttttgacactgcaaagtttatcccatgggttaatccagcttgggtaatactagcaacctggaccatggaacttcgaatcttggcaaagggagagactgctctgctgctactgctctctgaaggagaaggagttacatgaagccctgtctcaagttcaagcatgctggaagcggaggtgggggttttttgagatgcaactgaatgcgctggctcaactgacaaaaactgtgggcctgttgcagaaagagagacatctaattgcgatggccgagaaggtgtctgttctgttgattctgattgggtttcatttgaaacttgattggtcatttgatttctttcctgactagcctgctgagacacagatctggtctctgataggtgggtcactttgttctgtgcatcttgcacaaatctgtggcagtaaatatccataggcttggcaaagccagtcaatatgtgtacgtcgccagcagaaggacttttcttcaaaggagactcctggccttttccaagcccactcccatgagcaacagtaatctctgaaggagcatgaacgctactatctgtgctgctaagagactgggaccgactgcccaatcgaggcgctgaggcaataataccacaactaggaagaacgtaatctattggccctacactctctaatgagttagctagctgcctgtcttcatcagacttagaatttgtaaggaattcatcagagtggtatgagtcattatctgaagacatgtccccatcagactctgcctgaaccttatccatcactcctgtgttttccatagtttcaagactactatctgatttccaaagatttacttttaagtttggttttagaaagttaactttcatttcaggtttggtaaagtttcctagctttcggaggttgccaatatttacattggatttggtctgcttcactttttgatttagagatgaaaatttgctcattaaaaaattctttccctgggccaaagaaccttggttttgagacctgataccaatgatgtcttcgtgaggtttactgctcttcctacaaattagaagagaaaaaaagttaattccccatggaatccaatatgccagttccagttattaacataagtgaaaacagttattcaaattggtcccaacttcttgaaaacagtgcattgctaactgacagataaccctcagagttgacattaaaacagtgctatccaatagaaatatatgaaatacatgcataattacaatttttctagcagccacattagaaagcagcagtgaaattagcagcatttcatttaacccaatatatacaaaatatttcaacataaaaatattaaaagatgattaatattcctttttggactaattcaatataggcaatgtgtggtgttctataattacagcacacctgaattcagcctagtcgcattctaaaaggcttcacaaccacatgtggtgagtggctaccattgtgagcagtgcgggtctagcacagccaccatctgtacaatcagcaaagacatctctgactgtaaatgggaatctgcagcaccttaactaaggttatctatacacatcccagtgtggctcaaattcagatagtggggggagacaggagtaagacttccattttcttatatgtcctgtgggttacctgattttaaaagatttgggacatttaacaattagtgtcttctctcctttggtatccctcatgacagctataaataagaaagaaaagttgatgctatttgccacaaatgtctcagtgtgtgcatttgtactgttggatcatgcaagatcactgatcatgagcatactgcagaaaaattatgggttaaagtaattctttaacaaaagcctgaacaattttcttccggccaaatggctctcttcactagcagaatgtggaccacaaaacctgacagatgctcattagaaagaaaagccacactttttaaatatgaaataatctgttgataggcattctttttccaaattcaaaagcctagtgtttaaaacatactattttctctacaaagtatttagaaaaaatttcaatgtttcctctcatcagtttacttaggagttaaaaatgtatcacttgtggccacgtgagttgtgtcaaggatggcaaaatccttgcagggcccttgctctcagaccggttctcttggcaaaataccacctacgtaaatacttgtggagacagtcagtgttactctgtatcaaaacttttaaacacacctagagggatatcctaagcatattttaaatgccatatcactcaagataatgaaactctgggtcttcagagtttttcttgaaactgaggataagcaataacctttgtatggcactgttagggacaagtgaaatacccacatcttttaatccagattcacaacctgaggatgctattctaaagaaatcatcctaaacatgaaaaagtaatacatgacaaaggtatctgtcatgacttctttataaaaggaaaaaatgcttagcaaccaaaattcttggcaattgagtttaatagctgtgtgccaggtctgagtgcgttattcagttcatgcaatgcactgacatggattttctctcatcttacagataacaaaactgaagtaaaggagtatgttttccaaggttaaagagtaattgatagaaccaggagtctcagagtccatgttctgaacccacacaatacatttccaaactgatcacaggaggcatctatttaaatggtagttatgaattctacagtaatgtggaaaatgcataaaatacaatctttggcaataaaaggttattaatctgtataggttaaaaatgtgtacaagaggctgggtgcagtggctttacagaagaattccaattaacaagtgtagaaggaatgaaaattagaaaaatgaccatagatcatgacaggaataattattatagaaaagatccacaatggttatgaaaatgaatagtcttaggtttacacagaaacaatatttacatagtctcaaagtaatttcccctaaatatttagcaattataaagaggaaaacacaaagtttgcagtgcagaatcctggcagatgctaccccagccaagtaatcaagcttaacctcaacaatactacacaggccatcacgccctccctccccacagcacgaggcactaagaagtgcacgtggcttctgtggtgtccttcctgaccatgcataaccttagcttcatcaggaaagaacactggacaaacctacatggagggatgttctacaaaacagctgaccagtactcttaaaaaatgtcaaagttatgaaagaaaagacaagattgaggaaataacattaaactatagagacaactaaatgcagtgtggaatcccagactggatcctggaacagaaaaaggatgctagtgaacacctagtgaaatctgtactttggttaatcttaccgtgccaaggttactttcttaagttttgataaatggtctatggttataagtcggtaatataaagggaagccgaaggaagagtacatggaaaccctctaaactacctgtgcaactcttctgtaagtctaaaacttacctgaaaattgtatacatgaagaatgttgaaagtattttgatctgcagaaatttgatccttacctctctaaataccaacaccttaccataatgtgatctcctcccctttccccctgcaaataattttaaacaaataagaccttggataagaatgcctttattcttgagagaagcagtatactcacctctcaagtttcttctcaattatgggtaaatccgatcccatggcttgcttggtgatctgcagcatctctgcaatgcactgaagggtatctgcaacccaaatataactgcctgccaatttctccataaacatactaaaaaaaatagcagttctaacccatttagcgctgaatgaaatttgtcgtcgtataattaaatacaaatttatttgcttcgatttatagaaaactgccacctgttcactagtctcccccacttaattcacaatgttctaacattttaaaagaacaaaagcaaaagaatgaaatcggggaattaaaagtttgttctagttcatgtttgttcaagcactgtgacagatgccaaggcaacagccatgaatgagacaggcatgattcctacctgctacaaatgaaaagaacatgacatgtgaagagccttgacac

SEQ ID NO: 98176 - DNA, 18857 bp, Homo sapiens
tacaagcttgatgactgttaacctcttgaattttgagaactaaggttagatgcctgcctggggccaaggagataacagatttggtgaaaggtattgaggacaggcttagtccagtctgctataacaaattactacaggcgcgccaaacaaagtcgtggcagtgatcgaggaggccatagcgcggcctcaggctctggtgtctcccagtctgctaaagcccaaggctgtcaccatggacttccagcatcgcactgggggcaagaccaggagcaggggcatggcctcctctgagagcaatcatgaccgcagggaacacctctggcagctggccctggagaccatcgacatcaataaggacccatacttaatgaaaaaccacctgggcccctaagaatgcaagtgctgcctgatgcttctcaacaagaaggggagctatctggcacatacccaggggaagaagcaccagaccaacctggcctggcgagcagccaaggaggctaaggaggtggcatcatgctgtgccactgcttcatgtctgcatacgaacagaggatcaagcccctggaccagtgctggcatgacttgctgatggctgccgagccctacgagaccatcaccttcaaggtgccgagcagggagatcaacaaggtggaaggcacattctggacacactggaaccaggagaccaagcagttcttcctccagttccactttaagatggagaagccccagcctctccactggacccctggggtgaagcgacctccacccctgctgatgaacgatctgcccccttggccgccgctgtctgagtctttgccactgccccttccaggaggtctgcctctgccacccatgtcccccacagggcctgcaccctcagggcccctgggaccacctcagctgcccccaccagctccaggggtccgccccccagccccagtggtgcaatcccacatctggggtccatcctccagcccccggggttcacccatcagcccccggagtccacccaccagctcatggggttcacccaccagccccaggggtccatcctcccctatcagtgggggttcacccccaggccccaggggtgcacccagcagcccctgccattcacattcaccctgggaatgcacccaccagacccagggatgtaacctcaggccctgggggtccacccccaatctcctggggtccatccgtcagttcctggggtccatcttcagcctcctggagtttacccctcaaatcctgggtacaccccccaactcccatgcctccaatgctgaggcccccctcccctccaaaggcgcagggaacatacgtccccctcccccaaccaactgagaagcttctccctccccaagcaagccctgccccaggtgctcctgccttttccatggagagaattacagatatattaaatatgaaactaaaggaaatccaacatataattcattttcctgaaaaagaagaaagaataagtaaaatgaaaacaatatgtgaagatgtaatcaaagaaaattattttaaagatatacctgaatttgcaaatcagacatagctggatgaagtttccaaatgtcaagggtaaatttttaaaaagatagtttctataccaaaaaaaagcagttcctggtatgtggttgtcttaaagatatgcacacaacttctttctgttcttctgtgcctgaggtgatgcttacttcctctccccttgaatgtgggctggacttaatggctcatctgtaggtgacagaagacagcaggaagtgacagtgacggtatgtcatttctgaagttaggttataaaaagatgtggattctagcatgagttctctctctctctctccagtcactcatcaagggagtaacttgccatcaaaaccttcaaaaagcccatgtcacaaggacttgagtgggcctggaagaaaatccatcagccctgggtgagcctcaggtagctgcagccccattcgtcagcttagccgcaacctcacagagactccaagccgtaatcatctagctaacctgtttccagatttctgacccacagaaactgtgggatagtaagtatgtgttgtttttagctgcccagttttgggaaaaactgttctgcagcaataaatagctaatacacaatactaggtgggaacttgttctcagaattgtccatatctacaccccattccagaagagagagagggaaatctacaaactcagaatgaaagtatgaacaagaatgttacagttagctaaactgttcatatatatgtatgtaacaggcagaccttctcaagcatgaaaaagctcagggcagacaacaaccatgatcctttttgaaaaaaatttacttggaacaattcaaacaaagcaacaaagaagtgattaaaatattaaaattcataaatgcaaaagccatgagaaggttagtgtttgacatcaaatctacttaaatattcacttaaataagtaagactaaattgtgagaagtatggttaccaagcagaatactaatattatagaggctgacaatgtaaaaaaaaaaatgataaaatgtacaaaatcatgagtgagaaggaggagaggtaggagaaagtataagtgttctaatttctttatttttcttaccaggaagtgaaaacatacagttgaaaattggaacttgttaataataatgactttaatttcattgtttcataatcatgttttttaaaagagatctttgaggaactaacatcttttttgaaaaaaaaagtagtctgaaaattttgaataaataattcctacagttttactttagccttttttcttaaaatttcatttatgttttattttataattagcatgaccatattttgtaaaatagtttctctctatatcctatctatttaaatgtttagagagatatctggaataaagatcatcatacattgacaataaatcattattgcaagactctgagatgatcattatcttatattttgctttgtctccttcaacttttttttttttttttttgagatggagtcctgctctgtcgcccagggtggagtgcactggtgtgatctcagctcactgaaacctccacatcccaggttcaagcgattctcttgcctcagcctccagagtagttgggattataggccactgccactatgcctggttaatttttttttgtatttttagtagagacggggttttgccatattgaccaggctggtctcgaactcctgacctcaggtgatccacctaccttggcctcccaacccttcaacttttatatgttgcttgagttatttgaaaaaaagacgagcatgtattatttttgagttaatgtttattttataaaaggaaacaggagataagttgaatattcaatttaaggaataggaaaaaatgcaaaatgactccaagaaaataaaacaaaggaactaacaaaggtaaaagtataaatttgtgaattagaaagcaaaagtgaatttgatcaatcaaataaaaaacttcctttgaaaaggatcagtaatatagacaactctatggtaaaaactgatgtagatataaagaggaaagacacaaataactaacaataggtagaggtcaggtgcagtggttcacacctgtaatcctaacactttgggaggctgagatgggaggatcacttgaggccaggagtttgagatcagcatgaggcaaaatagtgagatcccgtctctacaaaaaatttaaagaatagccaagtatgatggcacaaacctgtagtcccagctatttgggaggctgagctgggaggatcacttaagaccaggagttcaagggtgcaatgagctgtgatcacgccactatgccccagcctgggcaatagagcaagaccctgcggaaaaaaaaaaaaaaaaaaaaaaagaagaggtcaaagatatgatgagaaaaggcaggcaggctcatgtttgtgcagcctaatgggagttccttcaaggagcctggaaacacaggcctctccctccgtgcccagtgagggaaaattttacctgccaggatgtgagctcagagggcagcatgtacaactccagcaccaggatcttcctcagggtaactgtgccaggactgagcctgggcaaggcaccacctaactgctccttcctctcacagagatatcctgctcctcactgccaccatctcagaacaaacccggttccacctcccaggctcctctagctggctctgtctggccacgttcttgcaggatccacatatacacacacaggggcctggcgaggagctcagtccagcagatgatcagcctcatgacatcagctcagatctgatcctgggacgcccaggttctccaaggccctggtgactccccaagcctgtggcgatagcacttacctgggaactccaggccccttctctgcaagacttctgatgtgtccaccacctgtgtaagtcccctctctcaggcccctcagggctgctgcctcctcggcctcccagcctggctcaggggcagtcactcgctggcaggtaaaactgttccctgagctccccactggcctctgatcagaccaggtggacacccctcgggcctgggtcctgggcccatggctaatatcatctgaactaacatgtgattgtccaagaggaaactggtctgactccctccctcccagctcctccccacctcaggggcatcagcaggcagcagcccctgcggcccctgccccgcaggcttcacttgaggactggacaaggcaatattggaaagtgcgcaagggcgcctcagcctctgttgggtgttctgtgcatgtttgttaaataaacacagatgattatattaatggccactgggacacagtgagtgccagactctccctgtgtgaaggggcaccccagaccctaagttcagaattccttgctacttttgcaacacatcaagtgagttcccacctccaggcctttgccagtccctcccatcctgaaacacgactcctctgtgaagccttcgttcggccccagctctgggctcccacagcacccaacgcacatggatgcccatcccactgcaatgagctgctgtcaccccccccgaagactgagagcttctcagggctgggtctcacagacatgataccctcagcaaaggcacacaggccccgccctgcttgcatctcacaatgtgcatctggaaaacactgggccaacccgcgcaagccaggggtcttcacgacaggatgtcccacagccttcagtgtgtgtaggtccccagagcaatgctgggttttgcagtgtgtccccgcaactgctttgttttgggatacctgttaacaagtctcactgcctgtgttccattagagcaatctaggagagtccccaggcactggggacaggaccctgttcccactgagttgggtggggaggcattcgtcctactctagatgagcttcgggcagcctttgggaaagcccgttcctgggcctgggcctctcccctagcctctatccccgctgtctctggagtgggcaggaagcaacctttcaacccatccccggcttgggtcctgtgtgcccaaggcccacctgggcttgagcctggagttacaggggctggtgcccagtcccatttccccactggcttgctgggcaaccctggtcaagtcccttcccgtttctggccttggttaacacaaagagggacttagtagattctccctggcaccttctagctctgacatctcaggaggagccagggcctctcacagggctaagggaaggggagtttggcctctgggataaaccaggagaaactgggggctgctagacatcatctcagaaaatggtcagaagctacagattctgacctcccaggacttttgtgacttccccacatggccacttctgttaggagaggaacctacccaccctgtctgtgtggttagcgtttgggagaagggagtcccattgagccttgggagaggccagaaagggcctctctgggtatgaaggtgggacttcctgtgggacaatgtggcaggaaccctccctgcccctcggggtgctggcctgggacaggggtgggagatgggctctgggcgggtggttacctaccttgtgatgctgcccttggagatccaggatgtcccgcttggtgacagaccagtggaaggtcaggcctggcatggcattgccaaaggagaaagggttctggtggttggtgatccaggtgatatagatggacatcggtggggagaagtcaggcctggtgaccagcggggtgccagcactgggaatgcccccagaagctgtgctgcctccttcaagcagtgggagatgtatccaattcttccccagctagagaaggacatggcacaagtttgggaattttgatgaaataccaaacagttaaacsagaggcgggactgttttccccacactgtgcctcccctgccgctggctgcgcctccccatggccaagagacccatttttggaaggagtccctggagctctaggaggctatgtgtcccccagcagcacagcttgccctgccccacagtgctggttcctccgggcccctctctcctaatctagccggggtccctgctcacagagcacccacgggtggggtccctggctccttcagtctctatttgctgagagtctgctgagggcacacttggaggcgagaaggcaaaaggccacagcaggtgccacaccgggctgcccagtccactgccagtgctgccacttcctagctgtgtggccctgggatgagtcttaagctttctgtgcattcatttgttcatctgcaacatggagatggttctgacaccagcctcccagggctgctatgaacaccaaacagattaatgtccgagacagcatggagtggagtaagtgccacggtcayggtgctcctgttaggcgcctggtgctatctgaggtgtgggaaggtgacaggctagcaggaagcaggccttcatcagtggctgcaagagggtgtcagtctgggtaggggtgggtgggaagctgccactgcacccctagatacccaggctgggcagatggaggaggtggagaagcactgtagctcgaggacagggttatagcagcggctctttgggaaccaggattcagagcccaggaggtcccctcacctgggtgcccatccttatctgcatgatggggctgcggatcctcacggctccaagcagcagcaccttcacctgaaygargtcctggggaaagagcatggtgctcaggtgcagggcaccagaatgctgtgctggccggggatgtttctggaagggacctctcaagggaaggaggctgcggctaagaggctgtggcgagaagrcccctcaggatgcctagcaccgtgctcctctgccaagagaggcctggttttgtgggcggttcaccccacatgggccagccacttcctctcccacggccccgcaggtcccagcccagtgctctgaggctgccaccctatctcatccagctgcttcgggtcagcacttcagacttggggccagggactggggtctgctcttccctaggccaggctgccctcaagcgacaggtcttcagaccctcccaaacccaaatccagcttgcctgtgtctgactaagcagagtacagggacaaatgcaggagtccagtggagtctgattagagcagaccttataacctccttcatgctcaactctatactcctattaatctggccaaagactaactctcctggcttctttctagtgctgctgactcatgtggaactgacatgattaaacctcttagactctttgccacgcgctcatgctgagcccacattctgtgcctcatgacttgggctaatgcctggcacacagtaggtgcttgataagcacccattcccctcctttcacttatccttctgctcagtctcctcctgctagtcctggcccaccccacggccttggggtgctggttgtgtgaactggattggacagatggaactggaagcatctgaccagaatcacattccaggcaaggacacaggggctgccggcgaagcccctgcctgcctgggctcaagaagatgcctttcagatggggatggtgatgcagcccctccacctgccaagggccaccagggcctttccccagcacctccccaacctgtcagatggtggacccagaggggagaatgccagcaaagtcagacaacaaagaggagggatactcagtgccctgtgtccctctggctgaatttccagccagctgcccttttagctactggaaaatgagccagttcctgaggctgcaatcctttttagagaaacaaaacaaaacaaaacaaacaaacacaaaaaaaccacaggcctcctgtctgtaagtcacagtactgaatgtgatgctctgggaagccaatctgaaccctgccacgtccccaggacagattttaacatccccaagactttttctttgtcttggaaattgacacacactggatctgggcatccacctctgtgattcagactttgtggcttaacaaggatacttgggcaggcacggaaaatgctgggaaaaggagtaaatcactgaactcaatgatggatcaaagtcagcctctgaaaacaaggacttccctgcgccccctctagggcggtgcactcgccagctccctgggctctgtgtttacaggctctgaactcaggactgcatggactgcttccaggggacctagttctcatgaggaatgggatgactgattctgaaacaggtttctgtccacagttgcattaaacatcacagaaggctcttcttacagaccaagtttctggtccagctgtgagtggaactccaaagcagccttccctgagatgattctgcaagtcactgctggcgaaggaggtcacgaagaatgcaaaggccccaattttagccctgagccttygtcagaaggtggaaatggtctcacctcctctccagaggaccaaaggagacccacgcctcacaacgcggggaagttgtcagactctccagacaccgactttcacctgcttgaatcagtcccaccaatgtggggcagggagaccctctggggagaagacggccctaacttggcctcctaccttcactgccagcccagaaaagcaattaggaaagtcccccaccctgcacagagactgggaagatgacttaacctctgctggtgtagaagatgctagcagatgacccaggtttttctctccacctggaaatacaaatccagggctgaagtacaattttttaattcaccacacatacaccacactactccggagacatacaatgcacccagaaggcactctcagcccacagcaccccttctctgctatcagcacatgctcaagcccagcttcaagtgaccaacaaaaggcccgagagctctgatgctgggcagccctgggcccaatcccagaactggcacatggtgactgtggtctgctagctagtccctcagtctcccatcatcaaagggggacagcaggaaaatgcacagggcaccgagaggactgaaggacatgaaggcaaagtgtgcggagcggcgcctgccctcaccacgattgccatcatcctccactggaagggccctttggggccggggrttgctgaagaccctgtcccgtaaggagcagctggaaagactgggagactcagcctggagaagagcagcctctgggggtctgggtgctcccaagtcagcagggctgtcctgcacagggggccctggcagggactgcagacccagggggcagaagcagcacccttggagagaggtggtcctcagaggtagaacccaaacacagtaaagaggcctttgtctcgggcacagctgccctgggaagcagtggcccatcaccacagctggctgtcctggggagttcagatagtgccagtctccaatagcacgtctgttacctgagagatgatgaccaccttgccagtctctgcatccaccacctgcacaagcccagacacagtgcccttccccatggtgagacctggtaccagcctggaagcgctcaccagtgcaacgttctagttgctgatggagaaaaggatgttggactgaggctgggggctgccctcagaggtgacctgagtggggaggaaatagcagtgcatcagtgcctactgtgccaggcagcctgtgcctcccccagatggagccagggcctcagtgctgatggcttccacctctacacagtcacctcgtgctaggacagaggcagtgcaccaggagctgcggctgctgtgcagtgggcacactggggctggagcatgatgtggcttctcagctttcacctgcatcatgacccggataagcagtgtcgcgttcctgagaatcagcccgagtggaggaaaaaccggttgagacagaggagagaaggaactgctgtgccctgaacccatgacttacacaccacatgtttcatgagaggaaaactcagggcacgaacatcacccctatgtgagcagtgacctgtgggccccagggtcctgggggctgcctcccagccactggccgaggctctctggttctctggggcatgttctgctgtttgtgactgtgctccacttccccagatgctaaacaccatgaaaacaaggacctttcatgcagctgagccttccccttggatcagcaattctcagtgtgtggtcgctgactagcaatgcataccctccagccaccccggcccrtggagccagaggcagccctgcatctgtgtcctaacatgccctctggagatgctggtgtgggtcaagctttgccatccactgcctttaggactccccaactcctttttcgaaggttacctccttccctaaatttctcccaatttctgctgaaaaacaccttagaatcgttcttgtcagtgctctcaaaacttttcagatgaggatcaaggagctcagcaacaaggactagcccaggaggagaccagggatgccggtgccatgctgtggaggcggtgaagcccccacctgctcctcctgcatyccccccaagtgcactcctggcaggagaaggtgagtgaacacaggaggcatccagggcactgcttgtgtgggaggattggtctctgcagtgctgtgctattgctggtcagaaacaaatttcttattgccagaagaaaggtgcgagtccatctagaggcacagacagtacccacgtgcttcagatcacagattaatgatgctcaccagccccagcgtggcccaagcacagggaggatgttggcagggctggtttaatgttgctgctgtaaatagacttggaatgatccccgggccacgactgccatggcytgtggctgcagtgctgctcctgtcataacctaacaccccgagacagccccacaccacataatgagcccatgagtgacctcagagctccccttgtccaggaatcacctacttcaggagttgcctttgtgacatctctgctggaggaggtgaccaycaggaggactcacaccaatgtgacaattggggaagctgctcggagcttcaggtccatgaatgggaagtatttggccagaaggggattcttgtgcaagtccagcatgcggatgtttgccttcactgtcttcccaatctccgcctgcatcgtgcagacagaggctcagggatggcctctgagagaccaatctcaccatctatggtgccccatgactttctgagatactaatagcatcaccaacctcaacccacagacctgggaatcagggatgagtcacccaggtttacctctggactatcagccagtcagcaaatgaaaattgatgaagcgcttattccaaggggtgggtcaggggagggtggctggggatacttacaggcataagttccactccctactcttaaataacaatacactaattagggagatgagacactgcttagaacagcagcaggcatccagtaggagttcagtaaatgctcactgactgaatagctcacacctggcagtgtagaataygataagaaccttaggaaatgagagtcagaaatacacagtgaagaaacagaaaattagcaaacagcagtggaaatgagattataggaggagtatgtgaggctggatagagcatattagcttcttaaggagcctaagatgcccttttaattaccagcccttctatccactcaggatcccgaccacaaccctctggaagcccagcttcagtcacctcagatatttggagtaataaaatttcgctattgacgtgaaagataaaacgagatctattccttttccttttttgcaatggtgcttggcgtgggtgagctgtactcatttgtcactgaaactccagagaacccaaaacctgtattttcagggggaaatccatgctcagcaagacatgtgcctggctggttaataacctacaccagmtaaaagacaagaattcccaggtcacagctaatttagaggcaacttccagcaggatttactgccaagcctcatggggatgtcacctgggatgaagaagttccttactggagggactctgcatccttaacatagagcgaaggagatagaagacagctttgcaagctcacaggggaagggatgcagaccccaggagcaaaagtgaaggccataggaaayatcccacagccgcctcactctccgttcctgcaggtctgctgagggggccccatcatgaagcttccactgaccttatcaatcacacagatgtacagctcctgaatgtctgacacrtaaacgacagccttggccagggccgggaagatgaggcacaagtcataggtcatgatgctggtcgagycagggagcaaagggtatacctgcaaggttcggggctggggtagaggggtgggtggtggattacgtggctgcagagccccccctctgctcaggtccgtgagcaatgcctcaccctcagcaccagcctatcacctcactggcagagccctccaggccagcactagaaagcagtggacaagggaaatcctaccccaaatagtgccctgcccacctctcatcacaagccccactgctggccaggagcagggattgggatataacatgtcagtgctcagctagatctcaccgaacattgatctccaatttgcacattttacaaagggaagaaaatggaagctgatcaaagaggggcagtcagcaaccttgggatgtgcaggaacttggggacagagtgagaatgcagtcccaggatgccacgtcctgagctggccacctgccgctgcagccctggcggtagagaagcaccccgtgaggtcttctgtgaaactgcaagacagggactggcagaaaacgagacagctacttttcagcggcagctctccctgagaagtcccaatcagaacggactgaatcacagaacctgggagcagcctgcaaggccaccccagtgtgagctccgtgcatctcgctcaactctgtgtctgatcaacagccccagctctgtgtgaagcactgactgctaaggtgtgagtgaatgaacaaaccagagctagagttttccagccttttcactgccaaagacccttttaacatttatttattatttttttaagagacagggtcttgctctgtctctgaggctggagtgcagtggtaggaccatagctcactgcagcctcaaactcctggactcaagccatcctcccaactcagcctccagagcagcagctgggatgacaggtgtatgccactgtggctagaatagatccttgtttttatttttttatttcatttttttagagacaggatctagctccatcactcaggctggagtgcagtgggatcatcacagcacactgcaacctcgaactcctgggctcaaggcaagagccccattattttttattttttattttttttggagatgcagtcttgctctttcacccaggctggagtccagtggcacgatctcggctcactgcaactgctgcctcccgggttcaagcaattctcctgccccagcctcccgagtagctgggaccacgcccagttaattttttgtattttagtagaaacagggtttcaccgtgttgcccaggctggtcttgaactactgagctcgggcaatccacccactctggcctaagagccctcactttaatccttttctgtttacacactttgttttttgagacggagtctcctctgtcgcccaggctggagcgcagtggcgcgatctcagatcactgcaacctccatctcccaggttcaagcaattctcctgcctcagcctcctgagtagctgggactacaggtgtgtgccaccatgcccggctgatttttttttgtatttttagcagagatgggctttcactgtgttagccaggatggtctcaatctcctgacctcctgatccacccacctcagcctcccaaagtgctgggattacagacacaagccactgcgcctggccatttatccacttttagggattctgccttcaggagtttctcccctaaaaaagtgcattcacaatcaccctctcatgctgcacaggataggcattcacacacgtgacatgtctatttatgatggactgcatgaagcttgccttattgcttaggcgtgtatttcatccaggtggttttggagctgggcaggcaggaacaggttatggagctagtgggtgagtccagccggctgcccctctcctctatctgggtctggctttgttgctggctatttgtggtctcatattcatggggtgagtagcaggggtttttaaagtaagcacttcagggtttgcaaagctagagtttcaatatcaagaacctacacacacacaaaattaggtctctgacccaaaagagaaaaccaaataggaccacatctcacccaggtgaaaacccttcaacagctgtccagtgctctgagaatgagcccaaagccttagaatgccctgtaaagcctggtgtggcctggcccctgcctccgctccagtttccatgcacatcacactcccccaccatgcttatgctccagccatgcaggcattctctcccactcacacagtcagatacctgctgcctgcctgcctctggggctcgcagcccccttaaagacctggggctctttcccggcctccatctgctggctccaagtcatctttcaggcccaggtccagtgttcttcctcagaacagtcttccctcatccaggtcagctcttccagtgcccctgctcccctctcccgggggctggacctgctgtgtgccatcagtgttgatggggcctgcagtgcacttggccttcctctccaggctgtcctcagcactcatataccctcaggactcagcccagcatctggcccagcctggcccccccatgcacgtcttgactggatgagctccagggctgctgctctgagtaattctggacaaggtcatggaacctggtgctccagcctgcttggctttagagagtaaaaccagctttgttaagccttggaaattctgaaaatcacctgcaaacctcacctatttggcaagtgctgattctagtccaacctcttcaatatacagatgaggaaacaggcccagatgacaggataggggtgtggctttgaaaaggcagagctggggatagaaccagataccctacatcccagcttgggctccttcctgactctccacttcccaggggaaccgagctagatgcctcctggagctggaagagaactgtggggaggggaggagggagaatggccaaaggcaaaggccacgctgagaaaggcccaagcccataactggctggggacacaggagatcaacaagctgacctgagctgcacataccacctactcaaggtacattaatacagacgcagcatgcctgagttattccatacaatgacttacagtagataaataaagatcccaaagtggacatcatgcttatactccaaaacagtagctatgtgacttgagccatcaccacttgagcctggtgtcaaatacgggctgagaaatggggtccaagagccccagttctggttttgctggggctgattcaccctagcttattacaattcccccaaagaaaacccattgaaagattagggagagtaatgagagctttctttgagaacccaattcgagactctgatttcaaactcctgcaaaagctactgctgtcaggagtgggtaggtccttcacaatgtgaagaaattccatggtgcacccactgaggagccctacacagggtaacacagggaagggcttttgctctttttcttttctttcagaaccattttgcacattttaaagacacattaaaatggcagtggggaaatcaattgctcttccacttgacttcccaggggataggcatccagccaccatctctggagcccgcaaagcctggcctgccccttgggctggtgcacagtggttcactgcacctcatggtgatgctttaaggaagtcctcaccaggcaagtctagaggcttggggaactgagggcacttggtcactagctggtggcagagtgggaacctgcacccactcctaactctacactgcatatgcggctcataccacctggcctctccatgtgttctggacccacctgcttcctgattcacacacgggagaacatttgcgaggggaaggaagtggtggtgacctatgcccagaatgaattctaatttctgagtgttaaaggtgccacctgagaacatcgggaaacactgagccaaggggaaagtcctgtcatcgagtaggagatgacaaatgcagcgtgctcattaagatgctgtgagtgcagccagaggcagctctgtgcatgtgggggctgcaactgtcacatggcctggagcttgccaggccccaagactctgcccacatcatctcagcccccacttcctggggccctgatcgcatttcagacttgtgccctgacaggtggcaactgcaggggagaagggaccctgtggatatttctgaatgtcactggacccatcaatgtctgtttccttcaggctgcccatgtcaatgacccatcaatgttgtgtgatgggccaggctgtgccatgcaagagtgtcatggtctgtgcccctgattactccccctcacggctcaaagaggaggacccaagctaatgtgaaaatcacaggcactgtgattgggtgctagatgaaacttcacgcagggacccggccagccctgcgacctccctgagggcgacggctggggacatgggtcatgtccacagattagtctcagggaaaaggaggatgcacctgacttcaaggcccgtagcttccacacactcccccctcatcctggacatgtgtcctcacctgaacaatggccccatgactggttgtgcctcatgggacccaggagatggagagacgcagccacacctcataggagcagggcggccagcctcattctctgccaaatccgcagcgcccagcacagtatctggcacatgacaggcactccagcatcgctgagtgcacaggttaacaaaaagcataaagtacctactaggctccttcccctgctctggttattgcatgggttccgcctagaggacttaactgaaatgtaaagaattgttgagaagaaggaaactccaggtttttgtttttggttttgttttttttttttgagacggagtctcgctctgttgcccaggctggagtgcagtggcgccatctcggctcactgcaagctccgcctcccaggttcacgccattctcctgcctcagcctcccaagtagctgggactacaggcacccgccaccatgaccggctaactcagtcactgcaggcaagttcagctccgaggtcttccactcatccaccgaaatggacagaggattcctcttctcgcggtttcagagtccctttgttaggggcggctctggaattctatgtagaagggaactgacgggtagcaacctaggaaactcattaaagctgcattgcaatagcaaacgcaatatatttatttagcttgtgtgatctaaacttttaaacatatcaatctttccaattcacacttcccataaaaattgaagaacgtatattttaaggtggtttaaaggggctgttggggattattaggagtaaaaggcattgcacagaggccatctcagagcgccatcgccaagattgggtggtctccggacgcaggcacaacctggagataaagaggctcgcgcttggtacccgcccctttgcgaagggcaggtgacacctaggctgcgggcgggcgggggacccaatttcgcatgcgcggggcggtgctggggggcggggcgagcggctgcctcgcggattcgcgcgggtggtgagagtggccagcgagggcagcgttcgccgcccctcaggccccgtcccggcgccgcagccgcctgcgtttcggtttgtgagcaggcccggccgggccaggagcgagagcgagactctggagcggtcgccgccgcagtcgcccgggccgggaaaggcgggcgatgcccccaaccgccgctcgggccatgtccgaggggcgcgcgtgttgtcgccgccggggcgccgtgcccgcctgtcgtcccccgggcccagccgctcgtccgaggcccgcgaggagctgcgccgccacctcgtgggcctcatcgagcgcagccgggtggtgatcttcagcaagagctactgtccccatagtactcgggtaggcgcggccctcgccggttccaccgcgcgcgaccgggcccgccacgcggacgccacccggggcagggcgggtccgggccggggcgcccgcgggtccctggctgcggcggtgaggtcagccgtccgtcctctcctctccccggtcgt

SEQ ID NO: 98177 - DNA, 28697 bp, Homo sapiens
ggcctctcaaagtgctgggattacaggcatgagtcacccctcccagcctttttttctttttttttttgagacacagtctcactctgtcacccaggctcgagtataatggcatgatctcggctcactgcaacctccacctcctgggttcaagcaattctcctgcctcagcctcccaagtagctgggatcagaggtgcctgccaccacacctggctattttttttgtatttttagtaaagacggggtttcaccatgttagccagactggtcttgaactcctggcctcaagtgatccacctgcctcagcctcccaaagtgttgggattacaggcgtgagccaccatgctaggtggctaatcttgtactttccctggaaagaagtgagactcaaatttccctggataaaatatttttatttccctggataaaatgttttggggctcatctcatactttcactggataagaagcgagactcaaaggaggccaggcagcacaaacttatggctgaggttatgccaaggccacactgaagtcaggcggcttgaacatgctgatgaggattttctgctggcaccactacccccttctcaggtactgcaggtacagtgagtgtatatcatgaactctggctgggtcttgtctgcactccctcaatattcaaagtccagttgggaacattccagttagttgggttaggccaagtgcctacctttaggctgtgaaaaagtgggaagaaggataaatgttctccaactgccataaaggggctagagctcattctgtcaatactgtccacagtagggaactgtgcagaaatagaagatgatttgaaccctaggtgacccacagcccctttcccacatatctacttcatagctggggagatatagatacagacataaacaaaaagataaagttgggaagactgtgcaccaaaccagtggcatgttggtaaatgtttaacaaaagctccccaggggggaaaaaaaccaggctggatttgttatgttcacctatttctgttgtgtaaggactcccaccatggccaatttcaaatgagacatcactgaatacagagttggaaagagatgtgcattgtcatgtcatttatatagcattccctccatacagatactaaagatgtaaactactcaagacgtcgtcgtaaaatgcagtaaaataattaggaagtgatgagttttgaatatttgtcacctttgctttaataaaattgatttagttatatgtttatgtaatttaatttaatttttttttttggagatagtgtttcactcttgttgcccaggctagagtgcaatggtgagatctcggctcactgcaacctctgcctcccgggttcaagagattcttctgcctcagcctcccgagtagctgggattacaggcatgtgccaccacaccggctaattttgtatttttagtagagacagggtttcaccatgttggccaggctggtcttgaactcctgacctcaggtgatccactgcctcagcctcccaaactgctgggattacaggtgtaagccaccatgcccagccttaatttaattttgttttgttttgaaacggagactcgctttgtcccccaggctggagtgcagtgacctgatctcggcccactgtaacctctgcctcccgggttcaagcaattctcctgcctcagcctcctaagtagcgcccagctgatttttgtatttttggtagagacagagtttcactatgttggtcaggctggtgtcaaactcctgacctcgtgatccacccgccttggcctcccaaagtgctgggattgcaggcgtgagccgctgtgcccagcccgtaatttaatttttaattaaggcaatgtttagcaactggcatgcccaattccagaaaagtcatcaacacgaaccgctggtgtgagcttcagcacttgaatgcaccaaactgtctcagtgttttcttctggaagtggaataattgagggtggggaaggcatacttttattcatttttttcattatttacattatttaaaaaacagtggcatttatagtgtttagaaaactgtacacgtactttcaaatatttttcaaatgaaatttaatttaaaaaataagtctggcctggcgcggtggctcatgcctgtaatcctagcactttgggaggctgaggcgggcagatcacgaggtcaggagttcgagaccagattgaacaacatggtgaaaccccatctgtactaaaaatacaaaaattagccaggcgtggtggtgggcgcctgtaatcccagctactcaggaggcggaggcaggagaatcgcatgaacctgggaggcagaggttgcagtgagccgagattgcgccactgcactccagcctgggtgatagagctagactccatctcaaaaataaaaataaaaataaaaataaatgcatgcatacatacatacataaatccatagaaattttgacccttatctctcctccctcagttgagtgcagtgttagttggcttccctgactccagtcacaactcctccaactgactaatggaaaaggctgccaaattacgatctctaaagttaattctgggaggaggaacagtggtcacgcctgtaatcccagaactttgggaggctgaggcaggaggatcacttaaggccaggagttcaagactagcctgtacgatgctgtctctacaaaaaaatttaaaaattagcctcgcatggtggtgcacgcctttagtcctagctactcaggaggctgagacaggaggattgcttgagcccaggagttcaaggctgcagtgtattatcatggcaccactttgctctagctgggtaacagagtgatatatattatataaatatatatatataatataatataatataatcctgatcatgtccctccttcccaaaaatcttcagccacattgagtacaaactctcaggcaggatttgagctcaacctcctttttgaagatcctccattcctctgcctccttcctgggtctcaggccaggggttttcaaacccgtccacagagcttgtgttcactgggggagcagggagcagctgagcacctgtgggtagacaaggcatgaggctctagcacctgctcccatcatagcagctctgatttgatttcacacatttcaggtaagatttcattaaaaaaaaaaggttctgttgcttaaaaacaaacatttgaaatgaactatcttagtccaacaggatggcacatctcagtcaaggactctcaaatctgtttgcttctcttttatttacttcaactgatgtttattgatcacttgctatgtcccaggcactggggataagacagactgcccctccctagaaggcttacagttcagaggagtgatgatgaatatttgaataaattaaggaacaatatctttccctttctttcccctcacacgtcttttgtggttaatctcagatgccatggactttataaatcttttgatctgcctttcctactgaccagaagaactcccttctccatataaaattttgtgtgtggaggatgttggttgtttttcctgttcattttccattctctcaccttctggtggtagtggttggaacattctttggggaacaaccctcccccaccttctccctcccagttcactgggttctggttagtctccaggagtgggcaagtgaccccaagcctggccagctggcacctagaacctccttagccacagcaattggttcagatctggccaccgtctgactccaatgattggtttgggatggatgaatgatcacaaatgtctcacagcgaatcccagacgtgtaggagcctcaggaaacagatgctctcttttcagctgaatttaagcctgaaaagatatagacccagaattttgggcagcaatttcgttacactgtggagagtgaagccaacgtggaggaaagtagagccaagtgatgggaagagactggatattcctgacactcaatgagtgggttaagccacatctaaagcttgacccctggctcatttgtttgtattggctcagttccaggagccgatgcatttccccttttgctttagtacttttcagtcagcttttccaaaagaatgttgaaatgatttgccatagcaaaacatttctaatctggactctctaagagctcaagactggtatgtctctgggtccagccagcctgccatgtaggagtctcaccctttctcaagttctgtgttctgaagccttcaggagatctgtttatgtgtgatcagcaagttaatcctttgccatttccttctcttccactgggctttccccagagggggcaagaagggaaccctgttttttgtttgtttgtttgtttgtttgagacagagtctcgctctgtcgcccaggctggagtgcagtggcacgatctcggctcagtgcaagctccgcctcccaggttcagggcattctcctgcctcagcctcctgagtagctgggactacaggcgcccgccaccatgcccggctaatttttttgtatatttagtagagacgggttttcaccgtgttagccaggatggtttcgatctcctgacctcgtgatctgccccccttggtctcccaaagtgctgggattacaggcgtgagccaccgcgcctagcgggaaccctgtttttatggaagcagggagtggtaagtccagccgggcaagtccagccatccagcaaagcagctgattatatctatatctatctatatctatatctatatctatatctatatctatatctatatctatatctatatctatatctatctatatctatatctatctatagatagataatattggccaggcgtgggccacgcctgaaatcccagcactttgggagaccaaggcgggtgtatcgcctgaggtcaagagtttgagaccagccttaccaacatggtgtaaccccatctctactaaaaatacaaaaattagccagatatggtggcagacgcctgtaatcccagctactccggaggctgaggcaggagaatcgattgaacccaggaggcagaggttgcagtgagtcgagatcatgccattgcactccagcctgggtgacagagtgagactctgtcttaaaaaaaaaaaattaaaataaataaataaataaataaataaaaataaaaaattatacatatttgtaatgctttttaagagatggggtcccactatgttgcccaggctggacttgaactttcgggctcaagcaatcctcccaccttagcctcccgagtagctgggactacaggtgtgcaccaccatgccaggccaatttgtgtgtgtgtgtgcgtgtgtgtgtgtgttttgttgagacagggtttcatgttgcccaggctggtctccaactcctgagctcaagagcgatcagtcccccttggcctcccaaagtgctaggattacaggcttgagccactgcacccagccatcttttttttagacgtagtttcgctcttgtttccaagggtggagtgcaatggtggggtctcagctcaccacaacctctgcttcccgggtttaagcgattctcctgcctcagcctctcaagtagttgggattaccggcatgtgccaccatggccggctaaattttgtatttttagtagagatggggtttctccatgttggtcaggctggtctcgaactcccaacctcaggtgatccaccctcctaggcctcccaaagtgctgcgattacaggcgtgagccaccgcgcgcagctgctctttatgactgcaaatatggggcacttgccttgtgccaggcactatgctgggcattttaccctcattcttataggtaatcctcatagcaacttgaggagtggagataattacagtattcccactgaacaaatgagaaaactgaagctcagaaaggccagtgactggaccaagttaatgattgcacggttagttagtgacagagctggggtttcacgacgtgtttaagcaccgccccatcagttgtggccactaggcttaggcggatagcctcgcagaggagcctaggtggggagggggacgaagaaggaacatttgggactgtgggatgttgaaatggtctcttcggaggctgccgggattgaaactgggcaaggtcccagggcccgagtagagccagagcgtgctacgcggcgatccctgagccacggggttttcagcgcccgggaagccaggcttgccaggttggggcggctggcggggcagggcttctcggtccgtcccaagtccaggtaggcgctcgcgacccgcgcgggcagggagaacgcgctcccacagtgctcgcgaggtgcagtgcgcccctgggggctccggggccgtcgggccaggtcggcttggcgcccagggactggccggacgggctgggcctttggckggggtggaagaggaggttgccgcgccctgcccggcccaggtgtcgtctccgggggcggggtttggagccccgcagcgggagattcccggccggactggcggacgagcgtcgagagacagaagccgaggagaggaggctaagccgggcggcgcggggagcgcactgagcaggcaaagtcgcagggccgccagcatgttctcccgaaaccaccggagccgggtcaccgtggccaggggctccgccctggagatggagttcaaacgcggccgcttccgactcagcctcttcagcgacctgcccgaggtgagagactcgcgtccctgccttccccttccgcggctcccgggggcagccccagccacctcggcctccttccctcgcccgcgtgcacgccgaggggcggagacgcacggtctgggtacaaacccgacggagttgttgacttaaaaagtaaggtgtggacggtctgcattttcatcggatccatgctgcccattccgcggcctggttaggattatctgcctgagcctggaaaaagcccgggttggtctcaatttgtagggccccagctcgactcctaaaatgtgcctgaaccccaaaatgtcttgggcatccccgggccaagggcggtgggcagctaggcgggccccaagcgctcggactcttggcctgggctcccgcttgttccccagtcgccagccccatcccacaacctgtcgcagccatctgggccagcctctgtcatcaaccccgactttaggccggggccgctcgcttccccgaagcccaattcaaaggctcctctatgcccctgcagggcttttaactccttggggttacttcccacacgcaaaatttccgcctccttttctggggcctaagaggagtccagcccctaggctgagcgtttcccccgtccgccgtccacgcgttaacctgttggatccccacctgtaacgccctaagggctagggcggggctgaaggtgtgtggttgagcggggactgagagggcgaatagctaccccgaagactcttctgtccccaaggtcagactcacactcgcccaaggagagcccagttccaagccttcccttccgggtctggaaagggttaagtgaggtgggccttccttccgccccctctacctcccggctgggattccaggcctggcttctgccctttccctccagcctgcccagaacaaagaggctctttcacacccttgtcccggcgtcccgggccttctctgactcagaagctagtggacctggggagagggggcctttgtcgcgtccccttgcccccaagcgactgggcccgaggaacccgcgtggggccagcgtgggggagtaaggggcgaggcccgggaccagggggaggggcctgtgagctggggccgcccctgggattagcccggccttcggggacagctcggaggagctggggcggagccgcagggcctggcggccgccgagtgaagtgtgactccgtgggcctggcgtggaggcgggggcgctaggctgcagctggctcggaatcggggctggtttcctgtctggaagggaaggggcctgcagaagggagcggggacagcagcagacaggcacacccctgccttcctctctccctctcctcccttctctggaaaagcgaggtaattgtgagcccagggtggagcgggctggatgggggccctgagttggaaggggtggccctagggctgggctgctttgccaactcacccctttgtcccattccctgggctcactctcccctgaggtcctcacctgtgtggctctttttcccaactttctcaaactaagctggaacccctctcgggaagctccaacctcctgcaaaccccatgactctagaacctgcatgaggcgtcgtttccctgcccccttccagttgtgcctgcccctcactgccctctccgcacacagattccctgtccaccaggccagggatgtgggcgggggctggggagcggccagagtcggaatgaaagggcctttttcttccacagctgggagaacagctgccaccaaagcgagactggacactctgtgcctagagccccctctgcagctggcctttcctcctgggaccccacttatcctcacttcgctttctttttcttccctgcctggctcccggcagggccccggagcagcagtgggcgaggaaaatttgtcacagcagccagaggggtttaacaggagtgcagagggataagggcagcttctgccctctgcccaagagctggccacctctttaaagactgagggaacagtgggaggaggaactgtgggacagtgtggtacctatctgtcccccctctggaggggttgacaagggaaagggcaccggggggcacagagatgcaggacagattgcacatcctggaggacctgaatatgctctacattcggcagatggcactcagcctggaggtaatcccccgacccttggagtacacacctccttcacttgcatcccagccccaatctctgccctgcccattcctgctacagcatggtggggagagccaggcctgcttaaagtgggaagagggacaggtggttccctatgccttgtgttgggtgcagtgtgtggacccaggctcagttctgcccatcatagtcttatgtttgcagcagggtctttacacctatttcaggaagctctgtgggtgagtgtaaatgtctgttctggggacaagggttccttttaggcatgggaagaagagaggagttcaatgtgagagaggtttacagaaaggatgtagccttgctagagaagagaaggactctgggctatgagtaaggattctgctggcccttgagacagcaaggtgctgtttattcgtgtatttgtttttttcaattctttacagagacgaggtctcactatattgcccaggctggtcctggctcaagtgatctccctacctcgacctcccaaaatgccgagattacaggcgtgagccactgcaccttgcgctatgtattattaaacacatgtaaattttatgtactatctgccaagctcttttcgaccataggatacctcagtgaataagacaagaaagttccattgtagtgggagaacagaaatatacatacgaacacataaataatatcacataaagaaattatgatgaaaatggggatgtaatgaaaatcagatgagggaggcaatgttagatgtggaggtcaggggaagcctctgttgggagatctttgagctaagcccaggaggatttggagatatgtgaagactggaggaagggcaaaggccctgatatgaggatgagggtaatatatttgtgggaaagagagagccagtgtggctggaatatagtagttggggtggagctgatgggcaggggccagatcatgcagggccttgaaggccatgataaggcacctggatttcaccttaagtgtgatgttgggccatggaagggttttaagcaagggaatgactcatgccatgtttttaaatgatggctgctatggagaataggctggtgggaagttgagggtagggttgggggtggagggttggcaagagagttcgcaaatgtccaccaggtgggaggctgtttcactcccacttcaggtgggagtgaacctggtggtgtgaattaaaatgctcatggtggagaaagggagtagatttcaaatggtggtggtaggtctgacaggatttgctgatggattggatgggagggcaaagaaagagaactccaggatgattcccaggtatgtggctaagcaactgggtggtgtggctgtttacggagatggggaagatggaggaagttgtggaagtgactgcctggaccaggcaggggctgctgctgagaggtcagaggyaggactgcaaagagtctagatcaggaatggcaggatattgtatgtgctgtcccccctcaagccctgcccccactccctggatcatagtagatgttactggtcaattttggcactctttatcaacgagcccagacctggcctcagaatctttctcaggaccgtcttggcataaactgtgcaggttgtgtccttcacacaggtgccagccagaggtgagagtcctggtctggtttcagcggcatcaggagggagcacgtttatctaatttgtttgcctggagagggtcagctttttctaatttgtggaaaggtgtccagtgaactcgttgggactctacctaattatcctccatcagtgcatgagataaaacctatttgccattcatagtcctctgcactgtccacatcagttacatatggctatttaaatcttacttttagttcattaaaataaaacaaaacattaattccttagttgctgtagccatatttcaagtgctagatggctactgaacatttccatcaccgcagaaggttttattggacagagctggtctaggtatgtaaatgtttaaattctgcatcctaccctcctccaaaaaatgtaaattttctctgtggaaggcctgttcaagttctggggcagaggagatgcttagtttcactttggtcactctcctttaggagagtggctgagggtgctgtgttctttctcaaccaagttcagcaggtcctcaaaagagagacccattgatgtttcagggaatggcaaaagagatagtcrtggaagagtaaatccaagaagactttctggaggaagtgactcaagttgcaagtaaagggggcttattttaaaatatgtgctaggcccaggtagagatgagactttcccatataattctcaaacaatgctacgaaggaggtggaatactccccattttacaaactcaggttccaggggtcaaattctgtgggcttgtcaagtccctaaaccaggatttgtacttagccctggtggagattctgaagggaaaaaagggtagtgagaagcagagcaggaagtcagagacttaagagagtgggaggggtggaagggatatcaacagggggcctaatgtgtgtggggcccatgactcatcctctagccccttgggatctgacccgggtccagctgacacccagctctgcgctctttcccaggggaaatgctgcccgcttggggagagggtgtgtttgggtggggagggggcaacaaggaactatccctgggttggggaaacgctagaagcacaagggtccagatcctgagccaggattcccagttcctctgcctgaaagggtgggagccagtttcctagggcgctcccggccttgggccttgggagagtggatttggggctggagatcagtagggaaatagaggaggtgtctggactcgtggtcccactcatccatgctgggcccagtgacctccctagggccccagctctcccaatttatacactattcgccctccatactctcaggcaaggggtcaccttggagggcaaacgctacgcgggaggggcctcccggagctggagcacgtcgtgaaggccaggagccttttccagggcggcgcgggcgcactcctggaggtccggtcccgccgcgatggagtctcggtggaggcaccgccttgagccaagcccagccaggtgcccggagggacctccagcgccctggtacccctcagttgctctcgcggcaattgggagctgatgtcaccggcgtcctgagygctgcagctggaggcggtgcagctatgctggcgccctggctcctccgatttcccgcggccctcggacccagccggctccccaggccagtgcagctctctggacctcgcgcgcctctgcgcgcctctcgcaatggagcgggctggggaaggatccgtgagtgctgggactgggatgagactagccaagatgggggttgaggacacctccgtgtccccctcctgccaggctcacccatttgggatgtttgtggctgaagctgggtgcagactggggtgggggttgtcgggcagcgcagaaccctggtgcagacaaaactagactgggaggacctatgtagtctgaaagggcttcctggtgaggggctttgggaaagggttggcttattacagaaggaaaacgggtggatggtgatgggggaaggtgataaaagtccggcctagcacagtggcccagaaaatagccaaggaagcatctgtaggcaggcaggacaaggctttttagaagagggaatttagggtgttcgggtctgagagacttgaaggctggagccactagggacagatgcaagggcacagtgtatggaggagagctggtgtgaggaaaaagacaggtttggagtggtcacattagttcccctgtttcaaatggatggctcgacttgtctcctgaaccaatctgtacactgtgatagagttagtcttccaactcctctctgaagctttccttgatcacctcagccagaagcaaacagaggctgtttcttgtgagcatggttgtgccatgacatggcacttatggagcagccattaaagtcatcatctctcacctcccagctggattttaaatgtacaaccttggacagtacagggatgctccagtgttgactgagtaaatgctgctaccaccaaagtatagcgtcattaaaataagcatccctgccattaatgtataccacatgctgggcactgtgctaagtgctttaagttcctgcctcacagaattctcacagccctaggactatttccattcctgatttacagatggggaaactgaggcttagggaggttgagcaaattgcccattgctttttaagaagcaggacctccagggctcctttctaaatgaatgttcctgagaatcctggtgtctcttccagggcctctcagctggcccttatccacagtccctcattcctggaccacctaccttcccatccccattccttgcctctgacctcatctcccaagctcagagggccggtaggtggtgattctcttaatttggggtgtataggtttctktgcagcgtcagtgaacactgtaggtggtatgctccttgtccactgatcccttgccaactagatgtccctggcatcacttgagtctgagggataactctcatttgcctttccttctgtccattcccatgagttggtggttctcaacctgggtgtacctcagaatcacttggggagttttccaaaagtacatatgccccactcctagagattcttattctgcaaatcttaggtagggcctgatcatttttttttaaactccaaagatctaatattttttaaaggaaatacaatttccagtagtacaaagggtatatataaagtatcattaggctgggcgcagtggctcaagcctgtaatcccgcactttgggaggccgaggtgggaggatcacttgaggccaggagttcgagactagtctggccaacatggcgaaaccctgtctctactaagaatacaaaagttaggccaggcatggtgtctcacacctgcaatcccagcactttgggaggccaaggcgggtggatcacctgaggtcgggagtttgagaccagcctggccaacatggtgcaaccccgtctctactaaaaatacaaaaattagctgggtgtggtggctcacacctgtaatcccagctactccggaggctaggcagaagaattgcttgaacctgggaggcggagtttgcagtgagccgagatcatgccacttcactccagcctgggcaacagagtaagactcggtctcaaaaaaaaaaaaaaaaaagaatacaaaacttactcgggcgtggtggcacatgcctgtaatctcagctactcaggaggctgaggcacaagaatcacttgaacctggaaggtggaagttgcagtgagctgagatcgcgccactgtactccagcttgggtgacagagtgagactcggtctcaaaaaaaaaaaagtatcataaatgttttccatccctggctcccaggcctacaatcactaatattttatgcataaacatgcatatctatatctatgtatatatatgcatgcatacatatatatatatcatgcacaaatggtagtatgtgcaatactacccttcttttctcacatcatttattttggagattgtttcatatctgcatacatgtgcatatctctttccttaatgtctgcaatactacagggtacagatgtactgttacttatttaaccaatgtcctactgaaggggttttaattttggtgtttaaaacaatgccacaatgaggccgggcgcggtggctcacgcctgtaatcccagcactttgggaggccgaggtgggcggatcacaaggtcaggagatcgagaccatcccggttaacactgtgaaaccccgtctctactaaaaatacaaaaaaacaattagccggatgtggtggcgggcgcctgtagtcccagctacttgggaggctgaggcaggagaatggcatgaaccccaggaggtggagcttgcagtgaactgagatcgtaccactgcactccagcttgggcaacagagcgagactccgtctcaaaaaaaaaaaaaaatgccgcactgaatatttttgtatgtatggctttacctagatatatgtgaaattatatgtgtaagataaactgctaggtattggatagctgaattaaaggatatatgaatttgtagttttcatagatttttttccaaattgcactcaaaagaggctgaaggaatttatacttccaaccatcaaatgcatgagggcatctctatttttcttatttgttttatatatatatatatatgttttttttttttttgagccagagtcttgctctgtcgtccaggctggggtgcagtggtgcagtctcggctcactgcaagctccgcctcccgggttcatgccattctcctgcctcagcctcccaagtagctgggactacaggcgcccgccaccacgccctgctaattttttgtatttttagtagagacggggtttcaccgtgttagccgggatggtctcgatctcctggccttgtgatccgcctgcctctgcctcccaaagtgctgggattacaggcgtgagccaccgtgcccggctgttatatatttttttagaggtggggtctcactatgttgcccaggctggccttgatctcctaggctcaagggatcctcccacctcagcctccctcacacaccactgcacctggctacaaagcttctctggttattcgtgggcagctgagattgagacccaatgcctgctcttgaactgcctaaaacattagtttcttgtcagttttactggccacagcccacctggggactggggagtgctttagcctgtccactgactgacatttmcttctcacccttcccccaaccctggctaggacacggagttgcagaggaagctagaccatgagatccggatgagggaaggggcctgtaagctgctggcagcctgctcccagcgagagcaggctctggaggccaccaagagcctgctagtgtgcaacagccgcatcctcagctacatgggcgagctgcagcggcgcaaggaggcgcaggtgctggggaagacaagccggcggtgagcaagggggagacgaggcctcgatggaggcaggaggccttctgggtggtggtggtgcagcatgtgcgtgtgtggcatgtggaccaccttaaagatgacttccccatgaagtcttatcagggacctgggagagaccttggtgttttaccaccactgtgtgttgcccagaggcgcatttgtgagtagccagggcaggacttasaaaagtcggtgtgtctggtgaaaggtagctgatctgaagggtagcaagtaatgcaaaagcactaatttgctaagccctgtctgtgatccagtaagactggctatctggcttttggaaaattaatttcctcaacgctggttcacaaaatcaccaatttaccacatactgacaatagtttgttatatctggggttcaccttcagaggcagggagtgggaaaggaaataagaaaccacttaaggaaagcctacccattcaaacaaattagattgtgcattctaaaagggctcagcttctggatgtaaaatgtaagcaacactgacattagactgttgatctgacaagtctataatgacttaagtgatgccatgataaaaccaaaatattggggaaaatatttggcaaattattctaagaatatgccaatttggataaagtggtcatttggagaactggtttttaggaaagtggcctacttactccactgaggctgctaggggaaatagtcccagcccctcacaggtatggtgcccattccagccatgaaggctgacacaagaggaggttgccaggagctcacccatgaagctaccagaagaaggcagaaaacccactgtatggctatcccatgaagctagaggaagggcaagctggtggggggacagcctctgagaggcagcatggacagactctgtcctgccaaagtcctcacacagcccacacaggtgatttgaggtacaccccaagtgcctggcagctaaacacattgccattagtgccacatcatttagcttaaggctctactaagtcagtaattactttagtggcattatgagtaagtacagatgaactggcagtcgcttcaggaaagggacacatggtgagtcctgatgatgggcagggagggaaggaaggtggggtgtcgggccctgcartggggtgtgggggagctgcagaacttggggcactagtagggtacaccatatcaggccaggaggaaaaaggagaaatcaaagttggggagtggtagggaaggaaaagggtctgtagtgaatggaacgtaactcttccctattggtgattttcctttgaacaaatgttggccaaattattttctgacccagtaccctcctatatcaaagaagtgatgggatggtgggaaataagcagctttcctattgttaaaaaaaaaawaaataaagactggagacccctctaagccaggggtttaatggagagccctggaaatgaagtctttctgtgggcacctgtcccctcaaggctgcacctgtccttggcagggatctggagaggtggtcagggaggttgcttggagagaggagccctgagcttgtgccttatgtgtgagttaatgtggcttgagtgtccctggtgtccccaagcctggcaaactgctgggttcaatgaacaactttcccttatagtccctcagccctgcctgtcggcctggctgggaacctggtggctgaggcgctgggatcagggggatcctagagtcgttgggaccagagcaagggggaatagtggctagaggccaggccaggacattgtgatttatccacaggccttctgacagtggcccgcccgctgagcgctccccctgccgcggccgggtctgcatctctggtaagaagcacagctaccccagctgctggtaccccttgcccaagcacacggcctcctgccccatctcaacatctattcttacccctctgccccttagacctccggattccactcatgtggaaggacacagaatatttcaagaacaaaggtggtgagttccacacaccctgggacaaattcaggggaatgaccctgaagtaggaggctctcgtgggacgtgttttttgttttgccctttgtccccagacttgcaccgctgggctgtgttcctgctgctgcagctgggggaacacatccaggacacagagatgatcctagtggacaggaccctcacagacatctcctttcagagcaatgtgctcttgtgagtacctcacactgtggctacctccttcctccactctgctccagttctggatgagcgagttccaggggaggaagctgggatgggggcagggtggagaggaggggcacctggccttctctgtggagctgtcctgcacttgcctcacccacatcccctaccctctgcctccctggactttcctgtgaccaccctcctttcttcctcccaccagcgctgaggcggggccagactttgaactgcggttagagctgtatggggcctgtgtggaagaagagggggccctgactggcggccccaagaggcttgccaccaaactcagcagctccctgggccgctcctcagggaggcgtgtccgggcatcgctggacagtgctgggggttcagggagcagtcccatcttgctccccaccccagttgttgggtaaggccttgcacaccgacaccaccctcagctgcctgtattctgcccacaggtgacctttgaactgtgttgagtgtgcagaacccattttgcattgcygccaggatgtgcagacagatatgaatgagcagtggccacgtagctgggaggcattccagcccacgccccagagctgggctgaagccagtccagaagaccagtgggaaggcagggagacttaggccctggggtcttacctttttagcagcagcaaatacattttatttttagagacagggtctcactatgttgcccaggctagtctcgaactcctgggctcaagtgatcctcccgcctcggcctcccaaagtggtaggattacaggcgtgagccacagcactcagcctagcaaatacattttatgtggatagagcagagcttcttggttggagcagagtaccctgggacctatggtggtacctaaatgcacctggagacaccgcatgggaccactgagactctgagaagcagtttgagaacctttgggtagtgaacagaatactgattttggacatagatatgggttcaaattcaaactccyccactttccacctataaattatgggcaagtttcttaacctctctaagcctcaagctgcctcatctagttgaagaatgccaccaacctcacagggctgtcataggaatacagtgggataaaacatataaagcatacgtcctgacacttagctggagctcggtaaatgttcattcctaaccctctggggaggcaagcgagttttctgtggggcagtctgaacaatggggcagatctgctcagcccttagagttcctgctggccaacatgcccctcccttggctgatgctctctcctatctccctcagtggtcctcgttaccacctcttggctcacaccacactcaccctggcagcagtgcaagatggattccgcacacatgacctcacccttgccagtcatggtaagtatgtgtgtgcatgggggacatacacatgtgatggtgagaagaggggctgtgggatggtccccttctcattcccctacctcaccctgcacttcctcctcccccagaggagaaccctgcctggctgcccctttatggtagcgtgtgttgccgtctggcagctcagcctctctgcatgactcagcccactgcaagtggtaccctcagggtgcaggtgagggggccctgaggagtggaagggagcagggagaaggcagaggagagctggataaccaggaatagaagagctaatgaaaaatcaagatttgggtggaagaaatggggtatggccagacgaggggaggaatggacagcagggtggacaaaacgaacaggttctcatggggggctgagaagagggatactgggggccgtgacttccccagaaaatgttgagtcatttgtgcagcaagctggggagatgcagaactgggcacaagtgcatggagttctgaaaggcacaaacctcttctgttaccggcaacctgaggatgcagacactggggaagagccgctgcttactattgctgtcaacaaggtgatgggtcccttggtagtaaggccaccaagggcacaggcccaggagcctctccttcaggccccaggagggtgggcacatacctcagagagatagaagcaggcctcctgctcctgacagtgccacatccagcttcaggggcccgtattttccccaactacagcatcactgtgagaggatcgtcccattcacttgccatcctcagtccctgccaaatctcagagagggttctctcgcctgcaggttcagggcttttcatcctctctccctcttctccctcagattccaatttatatctactttaccacttcccatttctctccaggtccaattgcccttctttgctccctatcccttttatgggctttcctgcctactttttgtcagttctgagggacctctggctggagcatccttgcctacctttgtgtcttccctgccttgctcaatccctttttccctgtctcaagctgctcctcctcccctgactcaggactggctgtctcatccccagcccttttttgccattccttyctactctggtcagtaggaggcaaatgagagggctcagcaaaagccccacaagctcattcttctaaggcaggcgtgatcaaggctgcctgattgtcactgccaacttctgtgaccaaggtagacctcttctttctcctgcaggagactcgagtccgggcaggggagctggaccaggctctaggacggcccttcaccctaagcatcagtaaccagtatggggatgatgaggtgacacacacccttcagacagaaagtcgggaagcactgcagagctggatggaggctctgtggcagcttttctttgacatgagtaagagagaagggggctgggttgaacctttgggaagaactggagtttgtcatttttactaaaggcctctgtttcaagattatgtggaagggaatgtagcaggagaaagggcagcctggctctctcttttaatcagcgctcttcttccaggccaatggaagcagtgctgtgatgaaatcatgaaaattgaaactcctgctccccggaaaccaccccaagcactggcaaagcaggggtccttgtaccatgagatgggtaagtgagaggaatgtgaactccaggaagctaatgggaagtagggttggggacttcaagagaaaccagataatggaaacagagagaaagcacactctgggctacaccagatctctggggacccaagtctcacccaatcttgtgtgttcttttctcctctccaactctttttagaaccacctccaccaaagttcaaaacaaaaccccartgagccaggatcatttcattaatttctttcctaatttcttcttttctgtttccctttctgcatgtggattcctgtctcttcttctgacccctcacttgcctggcaccgctttcattttctcctcttggtttcttcacccacctctgctccccactcctccccttcccatccccatctaccttgtgccccatgtcccacagtcttatcagagcctgtagccccagggggcccaggtgaggggctgctcctgcaggataacgcaatctccactgagatccaggctttgctttcctcctattacagtgacaggtgatagggctgggtaggcttggggcctgagctctgactagcccaaccctcccccaaccccttcctggtgccacagctattgagccgctggatgacatcgcagcggtgacagacatcctgacccagcgggagggcgcaaggctggagacacccccaccctggctggcaatgtttacagaccagcctgccctgcctaacccctgctcgcctgcctcagtggccccagccccagactggacccaccccctgccctgggggagaccccgaaccttttccctggatgctgtccccccagaccactcccctagggctcgctcggttgcccccctcccacctcagcgatccccacggaccagaggcctctgcagcaaaggccaacctcgcacttggctccagtcaccagtgtgagagagaaaggtgctggcataggatctgcccagaagagaaaatgacccatgcgcagttgggctctggatacggcgctgtctatagcaagttggccagtctggcctcctgttcctctgctggacctggggtaggctgcaggggtgggcagaagcccctcttaaattgtggttgccatggtaccgagggactcattcctggggctcgctgggacctccctaaacccttcctggaagaaaactggaaccaactctgccctacctccctgcactaaccagctttgaggatggcactgaagaacccttggagcaaacayamctcccttgtgactcccacatcaaccattaaagttatttaacagcagccttcacctggctcctgaggacagggtgcctctctctgcctggtctagacctgcctcacatcatccctggagcatagttcaccagctgtgaaacatgactgtgatactgagtaatcagacaaaggctgggtggagcgggtactttatgaataccacagggacaaaggaaggctgctcttctcacacactgctgaatctccggatctccgcaaggtcatagccagtcacagcaaaggagttgcctgaggaatcacaaaatcgagcaccacacagctgggtgtcggcgacacactcaccatgacagtgttccacctgggggagcagagggctcgtcagggcctgctgccccatgcttgggcccccccattccacccaccccatgacacatacctcaatgtagccactctctgggtttctgctcagcttccagatatgcacaaaggtgtcctcacctgcagagagtagctgtggaggaggaagagggggagtcagaatgccctgacgggacagctataagctggaatccccagtccaggtgccccaggggagggggctacactgagttgcaaagacaagcctgtggtgttctctcaacattccactgccaggaaaaagggtatgtaggtacagaggaggagacttaccttgcccacctcagaagccaggtccagggcgcagatggcccgggcatgggcattgatctggacatgtagatttcctgtagtggcctcatatagatgcacttgtccgttcccatagcctgctgctatgatcccctgccacagctgcacagaggggcacggaactctgcaagggtgacacccaactttgttttgcccagatcaaatcctactccccagcctgaagctatctcaggaagccctctaccctttctgcctcacctacccaaatcctggaatgcgggtcaataatgtgaattctggccctgaccgccagacacacagcaagcctgagtcatctgccgtcaccatgtcagccacacaatcctgaagggaaaggcaagatcaacccttccctttctcccctgctatggtcctgtatacagggcaggaggggaagggaggcagtgtgtgcatctttgcctctccagggaaagggcaaggtgtggagctctcactagctagacccatcagaaaccacccctaccaccagggttcccttgggaagcatgaactgctttccttgaatttcttcatggagtcccatcccccaataacattaggagggggtgcataattgcctcactggatggatgataaaactgaggccacagtgtcgtgaccttctggaggtctcgtagtgaaccagtcacagtcatgactagaccctgggcccctgcacccccaacaccaggcagccaacacaacctatgggcctagccctatgccaggtacaatggagaatatgaataagaaaatatacaccctgttctcaagaggtttgcaaattacttggggagacaagagttgtcttttgagggcagtgccaattcaggtttcagctaagagacatcagtgggagctagaatatggggaaggcttcctggagaggatggatggcactggagctgggcctgaataggtgggacttgccctagagaaggaagctgcacatttcagagctggaaagtatcttagaaaccatttgttccaactcctcatttcacatcagtattataaagtcttaattaactataaaatactacataaatgtaaagtatctctggctttatcactgaacctggttgctgaagactaggaaaatgtagatttgcccaaagccatccacctgtttagtggcagagccaagactcaaagccaggtcccctgcctcccagggtggggaaggctcccagatgggtaggggaagtccactcacctgtccctgggcaggctcggtggcaatgtctgtgattggcatctggtgcccagccagctcctcgctcagtacaatgttgggaccctttgctgggatgtcaaacaccagcacccggcctgaccacgttcctgtatccagaaccagtactccagtgatgacttcctgaccctcctgggtctccagccaccatactcaacacttactccatcccagaaaccttagtaacaaaaccccctctcactgctccaacggccatgccccttcattcactagccttgtcttatcccaccctgaccctctgaacccttccatggtttactggagtctctgattccactccacttccacccttccctctaactttccacaatttcctcaggccctcattattctcctggccacagcccacatgccccagcacccctccatgccctgcacttggctccctcacccacacagatgaagtggccactggcagcaattccccgggcaaacacagcctgtactgaatatgaaaggggagaatgatcagaaatatcccctcctgcagccctagcaaacactccctgcccccaccccacttggtcctgcaggtacctggggaggcatctccagagtccagtgcatgccagtagaccatggtgtagccattggactcgtacatctggaagaccggggcaagaaccagggggcataacccaactgacctctgctgagtacttcacatatccgtgttagccttagcccatttaatcctcaaaacaaatctgggatgtaggtactatttttatcctaattttttcagaggacaacagtgagagtgagaagttaatagtgtaaggacatacagctagtaaaggggcagatactggaggtggcacttggaaactggaaaagatggaaagattgaagataagaaatagaaaaagagtgagtgggccaagcatgtgaaaagtctggaagtgtttagaggcaagtgggaaagtctggaagcctggcagggaagctgagaaggctctggtggggcaagcaggagagtcctcttcttacctgtattcctcgatgtgaggtgagtaccagcagcactcggaaggggaggacacaccagtggacctggagggaggtgcatcagtgtagggagaaaatcaaagcagggaagatgagtttgtttgtttttttttttttttttggggacggagtcttgctctgtggcccaggctggagtgcagtggcgccatctcggctcactgcaacctcagcctcctgggttcaagcgattctcctgcctcagccacccaagtagctgggattacaggtgcacgccaccacacccggttaattttttttgtattcttagtagagaagaggtttcaccatgttggccaggctggtctcgaactcctggcctcaagtgcccgtctcagcctcccaaagtgttgggattacaggcgtgagccaccgcgcccggcaggagaggggagattctgaggttaggacatgcctggggagattctgaggttaggacatgcctgctcctgaaggtttggagagaaaaggctgggggtaggactgggttcagcaacatcactcccagctccatgcctcacctgagtgataagtgggggactcactccagcaccctccttagcgtggagctggcgctgggccaagggcacaccctcaggagcagcgctgagaagctgggcgcttggtccatgaaccacgccaaaatacgtgaggttgcgagccggcagctgcagcacactgaggttgttgcacagggcggcggccgagcctcgcaggggaatggagcgctcccagcggaacatcctgtgtgggggtgcagccgaatcaccaggcgcgctacaaacagacgcagcggagatgcccgagggcggctatcatcgagcatttcggaagatgcctgagactgggtcataggatggggtgcccagaggacggtgatgggggagggtctcgaggagcaagacaggggagtcccagggctgttttggggcgacgggggaatcgcagaggaggaatggggatgacacaggaccacccgatggccccaagcccgcgagccaaataagtgtgatgaagcccccaaggctttctccctcggctcggatccctgaagcccccggcctagatcagaggtaacacctgcagccccagatcggctcgcctgactcctggttcgtagggtccctccaaatccgccgccaccatagagacgacgcacgtacgcacggcccttgggcggggtgagcggccggaacgtgccgcgggcggcgcggttgccggggcaactgtgggcggggcgagcgaccccgagcccgtggttgcccaggcgactgttaggtggcttacgcggcccggatgcagcagaaacaccagcgttgctgcgaccgcgttggcgatggcgcacgaaggctcggtgagcttcagttcagctggggatgcgccagagccagggtcggccgttaaggtcggtgtcgggaacagtgggctggctctgggccgcccagtgcccctacttgctcccgcccaccgcgcgggagtttagatgaccaaggaagccacgtcggtactcgggcagaaaacctacacctgcacggtgcccactcaaacgctttgttacactcaagccatgagggaaagggtcagtgggtggtgtagagcccgagaacaggaagtggattttgaaacagctaatgaatgtagtaagtctcttacatggtggtgcgtatttaaatggatgagcatttagagagggaagataacagaaaaaatctatttcgagaatttcaagaggaagaaatatattaaataattcagagactgcacttgaaagtcaaattgtttaagagccaatcaattttaaaataaagaaaacggggccggtctcaatggctcatgcctgtaatcccagcactttgagaggctgaggcgggaggattgcctgagctcaggagttcaagaccagccaggccaacatggcgagaccccgtctcgactaaaatacaaaaaattagctggatgtggtggcgcggtgcctgtaatcccagctactcgggaggcagaggcaggagaattgcttgaactcgggaggcggaggttgcagtgagccgagatcgcgccactgcgctctagcctgggtgacagagagagactgtctcaaaaaaaaaaaaaaaaaaaaaaaaaaaagaagaagaagaaagaaaacggatttgaagagcctttgtgcaaaaatatctctgtcccttctggtcaccatcacgggtgtcagatgcgaggctgggaggggaggtctaaggaaacaactctctttactcagtccagtcagccctgctctagtcaagcttggcctgggctatgggccactcctggtgcttgctacagggctgttctcactggtggatagggttaatgagacttcagggattttgagttctgcaagacttaggaaacagcagatttggggggataatgaattttaggaaacagatatgagacaaggttttagcggggcaataggcaaaggtttgggaagatcacatttggaagtacattttggaaggaaccaggttcagggagactgttgtggggaattgagggagctcccaagagattgtttgtaaactttttatgtctctaaagtgagttttggggactagtctttttttttttttaagtgattacaaaaggaaacaaactcattgtagagaacttacaaaatagaaaagagcataggaaggaaacgtatcctctgttatcattttgaagttttccttttgttgaacacatagtggtttacatatatgagatcataattgatgtgtaagtttgtatcctgcttctttcaattaacgttacatcataaacatttgctttatgccattgcaaattctttctaaagattacctttaatggctgggttggtggctcatgcctgcaaggtgggcagatcacttgaggccagttcaagaccagtctggccaacatggcgaaaccccatctctactaaaaatagaaaaaaaattagccaggcctggtggcaggcgcctgtaatcccagctactccggaggctgaggcaggagaattgcttgaacctgggaggcagaggttgcagtgagccgagatcttgccactgcactccagcctgggtgacagagcgagattccgtctcaaaaacaaaaacaaacaaacaaaaaaagattacctttaatcattgcataatatttcagtata

SEQ ID NO: 98178 - DNA, 16587 bp, Homo sapiens
gtcggtgtgtctggtgaaaggtagctgatctgaagggtagcaagtaatgcaaaagcactaatttgctaagccctgtctgtgatccagtaagactggctatctggcttttggaaaattaatttcctcaacgctggttcacaaaatcaccaatttaccacatactgacaatagtttgttatatctggggttcaccttcagaggcagggagtgggaaaggaaataagaaaccacttaaggaaagcctacccattcaaacaaattagattgtgcattctaaaagggctcagcttctggatgtaaaatgtaagcaacactgacattagactgttgatctgacaagtctataatgacttaagtgatgccatgataaaaccaaaatattggggaaaatatttggcaaattattctaagaatatgccaatttggataaagtggtcatttggagaactggtttttaggaaagtggcctacttactccactgaggctgctaggggaaatagtcccagcccctcacaggtatggtgcccattccagccatgaaggctgacacaagaggaggttgccaggagctcacccatgaagctaccagaagaaggcagaaaacccactgtatggctatcccatgaagctagaggaagggcaagctggtggggggacagcctctgagaggcagcatggacagactctgtcctgccaaagtcctcacacagcccacacaggtgatttgaggtacaccccaagtgcctggcagctaaacacattgccattagtgccacatcatttagcttaaggctctactaagtcagtaattactttagtggcattatgagtaagtacagatgaactggcagtcgcttcaggaaagggacacatggtgagtcctgatgatgggcagggagggaaggaaggtggggtgtcgggccctgcagtggggtgtgggggagctgcagaacttggggcactagtagggtacaccatatcaggccaggaggaaaaaggagaaatcaaagttggggagtggtagggaaggaaaagggtctgtagtgaatggaacgtaactcttccctattggtgattttcctttgaacaaatgttggccaaattattttctgacccagtaccctcctatatcaaagaagtgatgggatggtgggaaataagcagctttcctattgttaaaaaaaaaaaaaataaagactggagacccctctaagccaggggtttaatggagagccctggaaatgaagtctttctgtgggcacctgtcccctcaaggctgcacctgtccttggcagggatctggagaggtggtcagggaggttgcttggagagaggagccctgagcttgtgccttatgtgtgagttaatgtggcttgagtgtccctggtgtccccaagcctggcaaactgctgggttcaatgaacaactttcccttatagtccctcagccctgcctgtcggcctggctgggaacctggtggctgaggcgctgggatcagggggatcctagagtcgttgggaccagagcaagggggaatagtggctagaggccaggccaggacattgtgatttatccacaggccttctgacagtggcccgcccgctgagcgctccccctgccgcggccgggtctgcatctctggtaagaagcacagctaccccagctgctggtaccccttgcccaagcacacggcctcctgccccatctcaacatctattcttacccctctgccccttagacctccggattccactcatgtggaaggacacagaatatttcaagaacaaaggtggtgagttccacacaccctgggacaaattcaggggaatgaccctgaagtaggaggctctcgtgggacgtgttttttgttttgccctttgtccccagacttgcaccgctgggctgtgttcctgctgctgcagctgggggaacacatccaggacacagagatgatcctagtggacaggaccctcacagacatctcctttcagagcaatgtgctcttgtgagtacctcacactgtggctacctccttcctccactctgctccagttctggatgagcgagttccaggggaggaagctgggatgggggcagggtggagaggaggggcacctggccttctctgtggagctgtcctgcacttgcctcacccacatcccctaccctctgcctccctggactttcctgtgaccaccctcctttcttcctcccaccagcgctgaggcggggccagactttgaactgcggttagagctgtatggggcctgtgtggaagaagagggggccctgactggcggccccaagaggcttgccaccaaactcagcagctccctgggccgctcctcagggaggcgtgtccgggcatcgctggacagtgctgggggttcagggagcagtcccatcttgctccccaccccagttgttgggtaaggccttgcacaccgacaccaccctcagctgcctgtattctgcccacaggtgacctttgaactgtgttgagtgtgcagaacccattttgcattgctgccaggatgtgcagacagatatgaatgagcagtggccacgtagctgggaggcattccagcccacgccccagagctgggctgaagccagtccagaagaccagtgggaaggcagggagacttaggccctggggtcttacctttttagcagcagcaaatacattttatttttagagacagggtctcactatgttgcccaggctagtctcgaactcctgggctcaagtgatcctcccgcctcggcctcccaaagtggtaggattacaggcgtgagccacagcactcagcctagcaaatacattttatgtggatagagcagagcttcttggttggagcagagtaccctgggacctatggtggtacctaaatgcacctggagacaccgcatgggaccactgagactctgagaagcagtttgagaacctttgggtagtgaacagaatactgattttggacatagatatgggttcaaattcaaactcccccactttccacctataaattatgggcaagtttcttaacctctctaagcctcaagctgcctcatctagttgaagaatgccaccaacctcacagggctgtcataggaatacagtgggataaaacatataaagcatacgtcctgacacttagctggagctcggtaaatgttcattcctaaccctctggggaggcaagcgagttttctgtggggcagtctgaacaatggggcagatctgctcagcccttagagttcctgctggccaacatgcccctcccttggctgatgctctctcctatctccctcagtggtcctcgttaccacctcttggctcacaccacactcaccctggcagcagtgcaagatggattccgcacacatgacctcacccttgccagtcatggtaagtatgtgtgtgcatgggggacatacacatgtgatggtgagaagaggggctgtgggatggtccccttctcattcccctacctcaccctgcacttcctcctcccccagaggagaaccctgcctggctgcccctttatggtagcgtgtgttgccgtctggcagctcagcctctctgcatgactcagcccactgcaagtggtaccctcagggtgcaggtgagggggccctgaggagtggaagggagcagggagaaggcagaggagagctggataaccaggaatagaagagctaatgaaaaatcaagatttgggtggaagaaatggggtatggccagacgaggggaggaatggacagcagggtggacaaaacgaacaggttctcatggggggctgagaagagggatactgggggccgtgacttccccagaaaatgttgagtcatttgtgcagcaagctggggagatgcagaactgggcacaagtgcatggagttctgaaaggcacaaacctcttctgttaccggcaacctgaggatgcagacactggggaagagccgctgcttactattgctgtcaacaaggtgatgggtcccttggtagtaaggccaccaagggcacaggcccaggagcctctccttcaggccccaggagggtgggcacatacctcagagagatagaagcaggcctcctgctcctgacagtgccacatccagcttcaggggcccgtattttccccaactacagcatcactgtgagaggatcgtcccattcacttgccatcctcagtccctgccaaatctcagagagggttctctcgcctgcaggttcagggcttttcatcctctctccctcttctccctcagattccaatttatatctactttaccacttcccatttctctccaggtccaattgcccttctttgctccctatcccttttatgggctttcctgcctactttttgtcagttctgagggacctctggctggagcatccttgcctacctttgtgtcttccctgccttgctcaatccctttttccctgtctcaagctgctcctcctcccctgactcaggactggctgtctcatccccagcccttttttgccattccttcctactctggtcagtaggaggcaaatgagagggctcagcaaaagccccacaagctcattcttctaaggcaggcgtgatcaaggctgcctgattgtcactgccaacttctgtgaccaaggtagacctcttctttctcctgcaggagactcgagtccgggcaggggagctggaccaggctctaggacggcccttcaccctaagcatcagtaaccagtatggggatgatgaggtgacacacacccttcagacagaaagtcgggaagcactgcagagctggatggaggctctgtggcagcttttctttgacatgagtaagagagaagggggctgggttgaacctttgggaagaactggagtttgtcatttttactaaaggcctctgtttcaagattatgtggaagggaatgtagcaggagaaagggcagcctggctctctcttttaatcagcgctcttcttccaggccaatggaagcagtgctgtgatgaaatcatgaaaattgaaactcctgctccccggaaaccaccccaagcactggcaaagcaggggtccttgtaccatgagatgggtaagtgagaggaatgtgaactccaggaagctaatgggaagtagggttggggacttcaagagaaaccagataatggaaacagagagaaagcacactctgggctacaccagatctctggggacccaagtctcacccaatcttgtgtgttcttttctcctctccaactctttttagaaccacctccaccaaagttcaaaacaaaaccccagtgagccaggatcatttcattaatttctttcctaatttcttcttttctgtttccctttctgcatgtggattcctgtctcttcttctgacccctcacttgcctggcaccgctttcattttctcctcttggtttcttcacccacctctgctccccactcctccccttcccatccccatctaccttgtgccccatgtcccacagtcttatcagagcctgtagccccagggggcccaggtgaggggctgctcctgcaggataacgcaatctccactgagatccaggctttgctttcctcctattacagtgacaggtgatagggctgggtaggcttggggcctgagctctgactagcccaaccctcccccaaccccttcctggtgccacagctattgagccgctggatgacatcgcagcggtgacagacatcctgacccagcgggagggcgcaaggctggagacacccccaccctggctggcaatgtttacagaccagcctgccctgcctaacccctgctcgcctgcctcagtggccccagccccagactggacccaccccctgccctgggggagaccccgaaccttttccctggatgctgtccccccagaccactcccctagggctcgctcggttgcccccctcccacctcagcgatccccacggaccagaggcctctgcagcaaaggccaacctcgcacttggctccagtcaccagtgtgagagagaaaggtgctggcataggatctgcccagaagagaaaatgacccatgcgcagttgggctctggatacggcgctgtctatagcaagttggccagtctggcctcctgttcctctgctggacctggggtaggctgcaggggtgggcagaagcccctcttaaattgtggttgccatggtaccgagggactcattcctggggctcgctgggacctccctaaacccttcctggaagaaaactggaaccaactctgccctacctccctgcactaaccagctttgaggatggcactgaagaacccttggagcaaacayamctcccttgtgactcccacatcaaccattaaagttatttaacagcagccttcacctggctcctgaggacagggtgcctctctctgcctggtctagacctgcctcacatcatccctggagcatagttcaccagctgtgaaacatgactgtgatactgagtaatcagacaaaggctgggtggagcgggtactttatgaataccacagggacaaaggaaggctgctcttctcacacactgctgaatctccggatctccgcaaggtcatagccagtcacagcaaaggagttgcctgaggaatcacaaaatcgagcaccacacagctgggtgtcggcgacacactcaccatgacagtgttccacctgggggagcagagggctcgtcagggcctgctgccccatgcttgggcccccccattccacccaccccatgacacatacctcaatgtagccactctctgggtttctgctcagcttccagatatgcacaaaggtgtcctcacctgcagagagtagctgtggaggaggaagagggggagtcagaatgccctgacgggacagctataagctggaatccccagtccaggtgccccaggggagggggctacactgagttgcaaagacaagcctgtggtgttctctcaacattccactgccaggaaaaagggtatgtaggtacagaggaggagacttaccttgcccacctcagaagccaggtccagggcgcagatggcccgggcatgggcattgatctggacatgtagatttcctgtagtggcctcatatagatgcacttgtccgttcccatagcctgctgctatgatcccctgccacagctgcacagaggggcacggaactctgcaagggtgacacccaactttgttttgcccagatcaaatcctactccccagcctgaagctatctcaggaagccctctaccctttctgcctcacctacccaaatcctggaatgcgggtcaataatgtgaattctggccctgaccgccagacacacagcaagcctgagtcatctgccgtcaccatgtcagccacacaatcctgaagggaaaggcaagatcaacccttccctttctcccctgctatggtcctgtatacagggcaggaggggaagggaggcagtgtgtgcatctttgcctctccagggaaagggcaaggtgtggagctctcactagctagacccatcagaaaccacccctaccaccagggttcccttgggaagcatgaactgctttccttgaatttcttcatggagtcccatcccccaataacattaggagggggtgcataattgcctcactggatggatgataaaactgaggccacagtgtcgtgaccttctggaggtctcgtagtgaaccagtcacagtcatgactagaccctgggcccctgcacccccaacaccaggcagccaacacaacctatgggcctagccctatgmcaggtacaatggagaatatgaataagaaaatatacaccctgttctcaagaggtttgcaaattacttggggagacaagagttgtcttttgagggcagtgccaattcaggtttcagctaagagacatcagtgggagctagaatatggggaaggcttcctggagaggatggatggcactggagctgggcctgaataggtgggacttgccctagagaaggaagctgcacatttcagagctggaaagtatcttagaaaccatttgttccaactcctcatttcacatcagtattataaagtcttarttaacyataaaayactacataaatgtaaagtatctctggctttatcactgaacctggttgctgaagactaggaaaatgtagatttgcccaaagccatccacctgtttagtggcagagccaagactcaaagccaggtcccctgcctcccagggtggggaaggctcccagatgggtaggggaagtccactcacctgtccctgggcaggctcggtggcaatgtctgtgattggcatctggtgcccagccagctcctygctcagtacaatgttgggaccctttgctgggatgtcaaacaccagcacccggcctgaccacgttcctgtatccagaaccagtactccagtgatgacttcctgaccctcctgggtctccagccaccatactcaacacttactccatcccagaaaccttagtaacaaaaccccctctcactgctccaacggccatgccccttcattcactagccttgtcttatcccaccctgaccctctgaacccttccatggtttactggagtctctgattccactccacttccacccttccctctaactttccacaatttcctcaggccctcattattctcctggccacagcccacatgccccagcacccctccatgccctgcacttggctccctcacccacacagatgaagtggccactggcagcaattccccgggcaaacacagcctgtactgaatatgaaaggggagaatgatcagaaatatcccctcctgcagccctagcaaacactccctgcccccaccccacttggtcctgcaggtacctggggaggcatctccagagtccagtgcatgccagtagaccatggtgtagccattggactcgtacatctggaagaccggggcaagaaccagggggcataacccaactgacctctgctgagtacttcacatatccgtgttagccttagcccatttaatcctcaaaacaaatctgggatgtaggtactatttttatcctaattttttcagaggacaacagtgagagtgagaagttaatagtgtaaggacatacagctagtaaaggggcagatactggaggtggcacttggaaactggaaaagatggaaagattgaagataagaaatagaaaaagagtgagtgggccaagcatgtgaaaagtctggaagtgtttagaggcaagtgggaaagtctggaagcctggcagggaagctgagaaggctctggtggggcaagcaggagagtcctcttcttacctgtattcctcgatgtgaggtgagtaccagcagcactcggaaggggaggacacaccagtggacctggagggaggtgcatcagtgtagggagaaaatcaaagcagggaagatgagtttgtttktttkttttttttttttkggggacggagtcttgctctgtggcccaggctggagtgcagtggcgccatctcggctcactgcaacctcagcctcctgggttcaagcgattctcctgcctcagccacccaagtagctgggattacaggtgcacgccaccacacccggttaattttttttgtattcttagtagagaagaggtttcaccatgttggccaggctggtctcgaactcctggcctcaagtgcccgtctcagcctcccaaagtgttgggattacaggcgtgagccaccgcgcccggcaggagaggggagattctgaggttaggacatgcctggggagattctgaggttaggacatgcctgctcctgaaggtttggagagaaaaggctgggggtaggactgggttcagcaacatcactcccagctccatgcctcacctgagtgataagtgggggactcactccagcaccctccttagcgtggagctggcgctgggccaagggcacaccctcaggagcagcgctgagaagctgggcgcttggtccatgaaccacgccaaaatacgtgaggttgcgagccggcagctgcagcacactgaggttgttgcacagggcggcggccgagcctcgcaggggaatggagcgctcccagcggaacatcctgtgtgggggtgcagccgaatcaccaggcgcgctacaaacagacgcagcggagatgcccgagggcggctatcatcgagcatttcggaagatgcctgagactgggtcataggatggggtgcccagaggacggtgatgggggagggtctcgaggagcaagacaggggagtcccagggctgttttggggcgacgggggaatcgcagaggaggaatggggatgacacaggaccacccgatggccccaagcccgcgagccaaataagtgtgatgaagcccccaaggctttctccctcggctcggatccctgaagcccccggcctagatcagaggtaacacctgcagccccagatcggctcgcctgactcctggttcgtagggtccctccaaatccgccgccaccatagagacgacgcacgtrcgcacggcccttgggcggggtgagcggccggaacgtgycgcgggcggcgcggttgccggggcaactgtgggcggggcgagcgaccccgagcccgtggttgcccaggcgactgttaggtggcttacgcggcccggatgcagcagaaacaccagcgttgctgcgaccgcgttggcgatggcgcacgaaggctcggtgagcttcagttcagctggggatgcgccagagccagggtcggccgttaaggtcggtgtcgggaacagtgggctggctctgggccgcccagtgcccctacttgctcccgcccaccgcgcgggagtttagatgaccaaggaagccacgtcggtactcgggcagaaaacctacacctgcacggtgcccactcaaacgctttgttacactcaagccatgagggaaagggtcagtgggtggtgtagagcccgagaacaggaagtggattttgaaacagctaatgaatgtagtaagtctcttacatggtggtgcgtatttaaatggatgagcatttagagagggaagataacagaaaaaatctatttcgagaatttcaagaggaagaaatatattaaataattcagagactgcacttgaaagtcaaattgtttaagagccaatcaattttaaaataaagaaaacggggccggtctcaatggctcatgcctgtaatcccagcactttgagaggctgaggcgggaggattgcctgagctcaggagttcaagaccagccaggccaacatggcgagaccccgtctcgactaaaatacaaaaaattagctggatgtggtggcgcggtgcctgtaatcccagctactcgggaggcagaggcaggagaattgcttgaactcgggaggcggaggttgcagtgagccgagatcgcgccactgcgctctagcctgggtgacagagagagactgtctcaaaaaaaaaaaaaaaaaaaaaaaaaaaagaagaagaagaaagaaaacggatttgaagagcctttgtgcaaaaatatctctgtcccttctggtcaccatcacgggtgtcagatgcgaggctgggaggggaggtctaaggaaacaactctctttactcagtccagtcagccctgctctagtcaagcttggcctgggctatgggccactcctggtgcttgctacagggctgttctcactggtggatagggttaatgagacttcagggattttgagttctgcaagacttaggaaacagcagatttggggggataatgaattttaggaaacagatatgagacaaggttttagcggggcaataggcaaaggtttgggaagatcacatttggaagtacattttggaaggaaccaggttcagggagactgttgtggggaattgagggagctcccaagagattgtttgtaaactttttatgtctctaaagtgagttttggggactagtctttttttttttttaagtgattacaaaaggaaacaaactcattgtagagaacttacaaaatagaaaagagcataggaaggaaacgtatcctctgttatcattttgaagttttccttttgttgaacacatagtggtttacatatatgagatcataattgatgtgtaagtttgtatcctgcttctttcaattaacgttacatcataaacatttgctttatgccattgcaaattctttctaaagattacctttaatggctgggttggtggctcatgcctgcaaggtgggcagatcacttgaggccagttcaagaccagtctggccaacatggcgaaaccccatctctactaaaaatagaaaaaaaattagccaggcctggtggcaggcgcctgtaatcccagctactccggaggctgaggcaggagaattgcttgaacctgggaggcagaggttgcagtgagccgagatcttgccactgcactccagcctgggtgacagagcgagattccgtctcaaaaacaaaaacaaacaaacaaaaaaagattacctttaatcattgcataatatttcagtatatatagcatgtcaattatttattctctttttaaagacatgttttcaatattctgctattataaaaataccgcagagaatttgttggagaatatatttttatcttcatttcagaaaatgccttttggttgtatttatagaactgaaattgcagggttgaggaagtgaaaacattttttaatgtcttcatgcatactgttgcagcatggtatcacactaaacctttgccaatgctgagtattcttgtttttaaaataattccaatttgatgaactagaaatcagaatgtcaatactatatttattagtcatctacagtccctctcttgtgaaatgtcatgtcctttgcttatctttgggatcttaaatggtttttcttcttatagtttaaatttttattgcaatatagcccaagctggacttgaactcctgggctcaagcaatccccctgcctcagcctcccgagcagctggtactgtgggtgtgcgccactgtgcctggccatttttcttcttctattttttattttattagttttttttttcttttttgagacagagtctcgctctgtcacccaggctggagttcagtagcatgatctcagctcactgcaaactctgcctcccgggttcaagtgattctcgtgcctcagcctccctagtagctggaattacaggcgcccaccaccatgcctggctaatttttgtattattagtagagacggggtttcaccatgttggctaggctggtctcgaactcctgacctcaaatgatccacccacctcggcctcccaaagtgctgggattacaggcgtgagccactgcgcccggccatttttttttttatatgagcttttaatttactcggggatatttatcttttttcatatttgttgcaaatgtctttgagaggctctggagtcagacagacttgcatgtgaatgcattctgacttcactacatcctacttgtatgatactgggtaaattaccataaaatggagataagaatagttggttaaaaaaaaaaaatgtagagaactttttaagctcccctgagccggggctgtgctcttctaagtgggactccgagcctgggctatttctggcgctggcgcggctccaggaaggcatccgcatttgcgaccaggggcggctgcggtggagactggcctgtcctcagcgcccagcaccgctgctcccggcaaaccggagcatgcaccgcaggccagcggccgagttcgcccatcccagccatcacttttccaactagtccttagagaagggaagatgagcgagtcgagctcgaagtccagccagcccttggcctccaagcagaaaaaggacggcactgagaagcggggccgtggcaggccgcgcaagcagcctccggtgagtcccaggacagcgctggtagggagtcagaaggagctcagcgaagtgccaacacctaagagacctcggggccgaccaaagggaagcaaaaacaagggtgctgccaagaccgggaaaaccaccacaactctgggaaggaaaccaaggggaagacccaaaaaactggagaaggaggaagagaagggcatctcgcaggagtcctcactggaggagcagcttccttctgggactggacagctttgatctgctcccaaccccccacctcccaccccccaccccttccctacacccaccatcaccaccgcctccagccaccaccctcatcttccacctgcaccttcaccaccacactacacaacacaccagccgctgcaggtccctatgggctgagtggagaggacttttcccctggcctcttcccatccctaccccctcctccccccgtccacccactcatacacatgtgccctcctggacaaggctaatgtcctgcttagccgcaccctgcacctgctgcgtccctgatcccttggtggtgacattgctctctgggcttttggtttgggagccacttctctgctcctccactgttgcctctggcttcccatagaggggcctgggagggttcccctggtcttaaaaggggcccaagcccccattctggcacaccccactccactgtcctggcagcagcaggtgtggccaatggaggggggtgctggcccccaggattcccccagccaaactgtctttgtcaccacgtgaggctcacacctttcatccttccccaccttccctagtccctgcactaggttggacagcccccattggctacaggaaagcgggaggggtgtgagtcccctactccctctttgcagtggccccagcccccttaccgtctgcctgggatctgagtacatattgcagtgatggagatgcagtcacctattgtccaggtgaggcccatgagccctgtggcagctacctgaggtgggctggggctgctcccccaaccctactttgcttctaccacttggccattttcctctcctcagatggggcaccaataacaaggagctcacccttcccactcccagccctcctgctcctgccacccccccaggttctggttccatttttcctttgttcacaaactacctctggacagttgttttgtttttggttcaatgttccattctttgacatctgtcattgctgctgctagcagcgccaaatgttcatccacattgcctcctgttctgcccatgatcccctcccccaggttactcttcgtggagaagaggggctggggcatggcaggctgggtgactgactactcccctaggatgctgcagcagagagagcaagggggcccaaatccaccataaagcatgtaggggccacctgctcccccgggtctgtcagggaggggtagccatgatttgtcccagcctggggctccccctctggtttcctatttgcaattacttgaattaaaaaaaaaaaatccttttctggaaaacaaaatgtagagaagactctaaatagcaccaataattccaggactgtttactgaattgtctttctcaagtaatttgaacactcaagaattttgaacactttgctctggtataagggccatgaagttaaaccttcacattgtctgggcttgctcactgtgtgctcctaagcaaggctggttaacttctgtcagacttcggtttcttttttctttctttttctttttcttttttttttttttttttttttttgagacgcagtcttgctctgtcgccaggctggggtgcagtggcgcagtctctgctcactgcaacctccatctcccgggttcaagtgactctccttcctcagcctccccacttcagtttctttatctgtcaattgtggttagtgggctgttaatgaaaattattaggtcaaacatctactaagtatctgtcacatagtaggctcttcgtcaattggcccttttccttcccactagacaacttgagaaagcttcctcctagcctatagctactcttccgttccacttcttggtttcctgctctgattgccatgttttgttctcacagaggcaggagaggcaggtccgagaccgcggggtgacccggtccaaggcggaaaaagtgcggccgcccactgtgccagtgccgcaggtggatattgtgcctgggcggctcagtgaggccgagtggatggcgcttacagccctcgaggagggcgaggacgtcgtaggggacatcttggccgacttgctggctcgagtcatggactctgctttcaaagtctacctgactcagcaggtgggccgggatccgggtccttcagactcgtctccctctcccgcccctccctgccgacctgagatcctctctcgcctccgcagtgcattccattcaccatcagccaggcccgggaggccatgctgcagatcaccgagtggcgcttcctggcccgggacgagggagaatctgcagtagctgaggaccccacatggggtgaggacgaggagccttcggcatgcacgacggactcctgggctcagggttcagtgcccgtgctgcacgcgtccacctcggagggcctggagaacttccaaggcgaagtacactcctcaggagcctctccggactcctctgccat

SEQ ID NO: 98179 - DNA, 14228 bp, Homo sapiens
tttcacagctcaagaatcaggcaaatcctgggctgcgtctcaaagagtcccagcaagtgtcccagtggtgatggtgacctcccaactgtgctgcaggaccaaagtggaccagaaggacagaaacacctctgctcatgctcttagtctcttccctctttccatggttcaaccctcctctccttttttctctactcactcatttttctcttcatgaaaacaaaaatcttctcctaagtcgccccatccatttttagagggcacgtgcttccacactcggagttcaaggcaactggtggaccccccaccaggtacaattcccagagtgtctgcagcacgggtgggagggtgcagtgtgggtattgaaggctggcagggcctgggaatcactggggcagattgcacagtgaggcgaacactggaggtgaggggccaggtcccaccaataccattcagaaggggcagggactcatactccctgtatatatgctaaatactccagaccttttctatttccaggagaaacaatcaatagaaggaaagagagacaagagtaagtattggtcttagattttatcctaagggctaagtttcctctgtaagctacagtttctcatatgttaacatctgtgatacattatttcacaacaggcttcagtgtttcctggaagcgcttcatctttctgccttgaaaattatcttcctacgttttgagaaacagaagggttatttttccctctatttttgttagttcattggccttaagttctcataaaataaatggttccctggcttatccagttccaatgaattgctgatatttaaatatgccattacaaaatgctttaaaatttttaatttgtgtgtgtgtatatatatatacacacacacacacacatttatatatatattaaatttatatttatatatagagagaaaaattatattttgggtatattgagttaaataaaatatactcttaaaattaatttcacttgtttctttttacttttttaatggggccactggtaaattcaaaagtgtttatgtggcatctatacatcctattgggcatcctaaagcactctcactcaaaatatggtccatgggccagcagcgtctgcataggagcttcttataaatgcacaatctcggacaggggcagtggctcacgcctgtaatctcagcaatttgggaggccgagaagggcggatcacgaggtcaggagatggagaccatcctggctaacatggtgaaaccccgtctctactaaaaatacaaaaaataaaataaaattagcagggcgtggtggccggcgcctgtagtcccaactactcgggaggccgaggcaggagaaagtcgtgaacccaggaggcggagcttgcagtgagccaagatcgggtgacttcactccttcctgggcgacagagcgagactccatctcaaaaaaaaacaaaaacaaaagaaatgcacaatctcaggctcaccctgacttacagagtcagcatccacatgtttgttagactacccaggcaattcctaacaaaattaaaaggcgctgagctacagagctgtgcttctcaaacagtgaagaacaatcaagtttttttccaattaattgtagactgttgtcaaatataataaaaaagaatccggccgggcgaggtggctcatgcttgtaatcccagcactttgggaggccaaggcaggcggatcatgaggtcaggagattgagaccatcctggctaacacggtgaaaccccgtctctactaaaaatacaaaaaaattagccaagcgtggtggcgggtgcctgtagtcccagctactcgggaggctgaggcaggagaatggcatgaacccgggaggcagagcttgcagtgagcagagattaagccactgcacgctagcctgggcgacagagcgaggctccgtctcaaaaaaagaaaaataaaaaagaaaaagaaaaaaaaaaagaatgcttagaaaaatgaaaatgacacaaacaaaaaatacaaaatgtaaatttgaaatttatagagtcagaaattataaaattaatttcagtaagtgtcattaaacaacatagatataaaggaaaacaattacaaaaaatgaacacattgttctttgaaagtgggtacataggcaattgacacagagagtcatcattacctttgtaactttttgccacacaaatattttgtatgaaattgcagttctccatgttaaacactcgtagacacattttaaatacacattttttatattactatttaaggtttttaatatgacaattaatcttgcttcctggttgtcaatttacctaatctggtttgaatggatggcaatgctctttgcaggggataatgtgtatctaaactatttctaaacattgcttaacagcagtcaaagtagagaaaggaggctcacagaggtatgttgattgaaatgaggaagagatttttaaaccagtctcagcaagttcagtgtattttttttaactgctatccaaaatgaagctgatagtgctacatttttttaatgtatcttcagtcttttatccgtagccagttcaaataacttatactgtaagattaaatataaataatctttcaatgaaagaaaatgattccagattttatgcacttttggataacagttttcaaaataaccttaaaacatcgcacatgataatacagtcctatggcatatgactagtacacaactcaaactcatcacacaagttagacaaaaacaagactgatttatatcctgttcaacaaaatggtgtccacatgcttacatattgagcaatgtcaaattattgctataaaagtttctaaatgcttactcttgatttctgtatttatcctgtaacagactagtaacaaaccattcatatcagtattgctctgcagactatgtttgaataacactgcattagatattccagctgaataaaatatcaagatttaaatagtcatctttcgcaagcattttagctgagtctgtgtgacaggtgggccacagacaagcaggttgtaatcaactcttatcagtcaatgagataaataacattaatttaaaccacagagatatgtttataattttgttatctgtgattgctgtgtatttcagacagatacaggaatctatatatgatatcaattcacatcctttgcagaaacagagaaagccctctccatatgtgagatttatgttcatgtttctacttgttcacataaattaaataatttttatttcacaggaaaaatgaactatacatatgcaagatggtaaataatgttaaaatacaagaaccttgccactgaaattagaataatcctccatactactccccaaaagacagaggcaatgtatattaaagacattactaaaactgtttatcattcaactttgcagtagtcttatgagatattggtatttgctagttatttgagtaaaaactgagggtgggaaatttgttagtgctttgccacacacagttgtccaatctggaaacctttgactgcttcctctctcaacccctaaatctaattggttttgcaatcctatgtgttctaccttaccgccatctcacaaatctcacccttctgggttccagctatcattgcctctgctcatgccctcattagcaatcaagtggatttgtgtattaggctcctggctagcgcccccttccttccttcccagctccctctaattcaccttttgtagaacgagagttatctttccaaaatttagaagtgatatgaatcacttctatatttagaacgttcagtagattggcataaccttcctgtaaaatccaaattccttaactttggatacaagatccttcatactctgaaccatcttctccataatcatttccagaataccccataaaaccaaattacctagcaattgtccatcattcaaataaatactacttcctgattctcatgtatttctatattctcctgtgcttggcaatgatactgtgtgcatctggaccggtgagttcttcccaggcttatttatgagcatgcaatgaatgttcatgtgtgtgcactgtttgtacaggaacatgttgaagaaggcagagccagtctctacaagtctgtggtttccaacagctgcaaggagatgtcttgttactcagactttccattcccagaagattatccaaactatgtgccaaattctcaattcctggaatatctcaaaatgtatgcaaaccactttgaccttctgaaacacattcaattcaaggtaagacacaaaacatcagttagtagtcagaaagtatttcctacctattttctcttatctctccagcctagccctgggctctgtagatgagatactaaactggcaatattaatgacacctggctgtatttattttctccctatactcactccccacttcaagtaaatctggaggtgggggaggatactttgtgtaaagattcacaagtataaaattttagtttgcaatacttatatccaagtatcttagggaacctaaaaaatatcaagccacattttcagcttgggccaaatgcctgcccacatggacactgagaaccaccaacccccttccccagtctcctgtttggttttttgtctgtttgtttgtttttgagacagggtctcactttgttgcccaggctggagtgcagtggcatgatcatggctcactgcagcctggacttcctaagctcaggtgattctcccacctcagcctcccaagtagctgggaacacaggtgcacaccaccacacccagctagctttttatattttttagcgatggggtctcaccatgttggccatgcagtctcaaacacctgggctcaagcaatcctcctgccttggcctcccaaagtgctgggattacaggcatgagccactgctcccagctcccactctcttcttgactattcttttataggaatggacacgtgcagtggcccatacacaagagaaccttgctatgtgaaagaaatcttttctagatattcttgagaatagaaaaatctttgaatattgttattctacaatgcccccttcctctcccatttcagaggctggagacaggaggaaggtagtaggacagggacaaatgaataatatatcctttttgtcctttttttttcctttttttctctgtttcctctccaagaaacatatgaaaatctatgtttcccttctcctttctccctcccctgtcagaggtaaggatgatgaggaattcacagagaattatacacagaaaacaacacaaatggagacattgaccaaaacaagtggaaaataaaatttgcattcacattcacgaccttaaaagtcctctgatatggtttggctgtgtcgccatccaaatctcatcttgaatttccacatgttgtgggagggactcagtgggaggtaattgaaccatgggggcaggtctttcccatgctgttctcctgatagtgaataagtctcatgagatctgatggttttataaggcggagcttccctgcacaagctctctctctgcttgctgccatgcacgtaagatgtgatttgctcttctttatcttccaccatgattgtgaggcttccccagccacaaggaactgtgagttctccattaaacctctttcctttgtaaattgccaggtctctggtatgtctttatcagcagcatgaaaatcaatacagtaaattggtaccagtagagtggggagctggtgaaaagatatcaaaaaatgtagaagtgactttggaactgtggaaacgtcagaggttagaacagtttggagggctcagaagaagaaaggaaaatgtaggaaactttggaacttcctagagacttgttgaatggctttgacaaaaatgctgatagtgatatgaacaataaagtccaggctgagatggtctcagatggagaggaggaacttgctgggaactggagcaaaggtgactcttgtttggttttttgttttaaaaaaaacctctgcaattattagtttattagtatcatccgggacttagatgttcagtattcctcctgaaattacataaacaaatgcaaatggaaagaatccaagtcaaaattatataacaaaacagcactccatcacaaaagcgtgtaaaattacaataacactattttaaaatactggcatcttaagaaaacgataatcttgaaaatcacaaaattgccaaattgttccctaaactgctaagcagataatcatgactaatgagtgagtttgttttgtaaagaaaaatcattcaaataaattgaataattcatactgagatgcaaaatttaagtgtcttctttcctcctatttggatttatgagggggcaaaccataatataggaaaatatacgctattttgaatgtggcatctttgttttaaaagctggcccaattaattaaaaatacttttaatggaaagtctcatttcctgagcagtccatatttagataaatgggaaaagacatctatagccagcattttcatagtcttcactgagactaatgtcaacaaaaaatttaatatggcagtcctgyattttaagctcacgcttttggggatacattctcaggtcttctttaatgtgggaactgcaaaatataactgccattacatggtaatgggagttaaagaatagagtcctcatgtaaaaattacaacatacttttctattagtccttcaaggactaatttcaaaatgttggattctagtaatcccatgctttgagtagattgattactcttcagtttgtaaatgtaagtgggctatgtgaaatttcttaactgatcaagattttggatgttcagttatggatgaaaactatctcaacttaactttacccccatatgatatgcagggtgtgtagacaaaagctttttattagctaactatatgaaaggataaacactgtaataattcatgtgattcaaaatgggcaaaagcaaagactagcttcccctccaaaagaaaaatttcagacctatgaaaaggacaacaatactaataaaaaatttgtatttacttagaagcattcagaatgtaaacaaaacagctgcaacttttttttttttgcaattacagagtggtattcagttaacagaacaacaattatttcctataagctgcatcagagacagctgaagatgaaaaaactaccatccccatatataactaatttgtgctgtgcaccaacaagaacatgctttaaatttccatgccaatttacaacccgcatactgcaccaggcaaggttagtggctattgaaaacaccaccaggagagggctatctaaagacacattcggtagtgtgttaactttataaaaaaagacactgtacagtttaaaarcaaatcctacacagacttacatttccatttttttctttaaaaggagtgacttgtgaacagtagggttaaatgctttatagacgagaaaaaaaaccgctagaaccaacttattcatcatcttcttcatcttcatcttcttcatctacctcctcatcataatcttcttcatcttcctcatcttcctcctcttccttctttttcttgcttttttcagccttgataaatcccttttttgctgcatcaggcttccctttagctcaatatgcagcaatatcctttttgtatttttcctttagctttgcagccttcttttcacaaggctgcttgtcttctgcagcagtgttattccacatctctcccagtttcttcacgacatcactaatgggcaggccaagttgttctcctttaatttttgggtgatactcagagcagaacaggaaaaaggctgaaggaggcctcttgggtgcattgggatccttgaacttcttttttgtctcccctttgggagggatttaggttttcacttctctttcataatgggccttgtcacctttgccatatcttcaaattgtcctttctctttagcagacatggtcttccacctctctgagcctttcttagaaaactctgagaagttgactgaagcatctgggtgctgcttcttatgctcttcccgacaagtttgcacaaaaaatgcatatgatgacattttgcctcttggcttcttagaatctcctttgccaatgtttagttatttttccccagtgaggcacagagttgcccagtgcccatctggctctcacttgccccagtgctgtctctatggagctcaatgtactgcctcttcttatgttctagcaatgagactggagatttatggaactttgaacttgagagatgatttagggtatctggcagaagaaatttctaagcagcaaagcaataaagaggtgacttgggtgctgttaaaggcattcagttttaaaagggaatcagcataaaagttcagaaaatctgcagcctgacaatgcaatagaaaagaaaatcttattttctggagaagaaatccaagccaactgcagaaatttgcataaataacaaggagccaaatgttaattcccaaaacaatggggaaaatgtctccagggcatgtcagaggtgttcaccacagcccttcccatcacaggcctggaggcctaggaagaaaaagtggtttcatgggccaggcccagagcccccatgctgtgtgcagccaagggacttggtgccctgcatcccagctgctccagctgtggctaaaaggggccaacatagagctcaggcagtggctttagagggtgcaaaccccaagacctggcagcctccacattgtattgagcctgcaatacacagaagtcaagaattgaggtttgggaaccttcacctagatttcacaggatgtatggaaatgcctggatgtgcaggcagaagtttgctgcaggggcagggatctcatggaaaacctctgctagggcagtgcagaagggaaatgtggggtcagagtccccacacagagtctctactggggctctgcctagtggagctgtgagaagagggccaccatccttcagaccccagaatgttagatccactgtcagcttgcatgtgcctggaaaagctgcagacactcaatgccagcctgtgaaagcagccaggagggaagctgtaccctgcaaagccacaggagcagagctgcccaagaccatgggaacccacctcttgcaacagtgtgacctggatgtgagacatggagtcaaaggagttcattttggagctttaagatttgactgccctgctggatttcggacttgcatggggcctgtagcccctttgttttgaccaatttctcccatttggaatggctgtatttacccaatgcctgtacccccactgtttctaggaagtaactaaccaacttttgattttacaggctcataggtggaagggacttgccatgtctcagttgagactttggactgtggacttttgagttaatgctgaaatgagttaagaccttgggggggaactgttgggaaggcataattgcttttgaaatgtgaggacatgagatttgggatgggccaggggtagagtaatatggtttgtctgtgtccccactcaaatgtcatcttgaattctcacatgttgtgagaggggtccagtgggaggtaaccgaatcatgagggtaggtctttcccatgctgttctagtgatagtgaataagtctcacaagatctgatggttttataaggcagaatttccctgcacaagctctctttttgcctgacatcatccatgtaagatatgacttgctcctctttgctcctgccatgattgtgatgcttccccagccacatggaactgtgagttctccattagacctttttcctttgtaaattgcccagtctctagtctgtctttatcagcagtgtgaaaatggactaatacatcctcctaaacagatttccaaagagtattttattccacttccttattttgcaatggacacagtaaaaataaagcattatcataatgaatatatacaacatataaaaatcttctttttaatgcatcaaaatttctgaatttgaagcatttcctttaccacatgctgcccaagaccttttttattttgttgttgttgtttgaaacaaagtttctgtcacccaggctggagtacagtggcaggatcttatctcactgcagcctccacctcctaggctcaagaaatcctcccacttcagcctccccactattaatagctgggactataggcacatactaccatgcctggctatattttttttaatttttagtagagataaggtctcactatgccgcccagggtggtcttgaactcctgagctcaagctatcctcctgccttggcctcccaaagggtggggattataggcatgagccactgttgccaggcacaaggccattttagaacaatttttaaaaagctagatgttcaccaaagttttaaaaagtaaacacaaggccaggtgcagtggcccacacctgtaatcccagcactttggggggccaaggtgggtggatcaagaccatcctggctaacacggcgaaaccccatctctactaaaaatacaaaaaattagccagccatggtggcatgggcctgtagtctcagctactcagaaggctgaggcaggagaatctcttgaaccagggaagcggagattgcggtgagccgagattgcaccactgcactccagcctgggcaacagagcgagactccatctcaaaaaaaaaaaaaaaaaagtaaacacaaatagctattactcagctgtgatctgtagttgattttgtttggttttgcttctcattcctctgtatatattccaaatttttaatgacaagcttttttttttttgagacaaggtctcactctgttgcccaggctggagtgcaatgacactatcatggctcactgaagccttgacttcccaagcacaggtgattctcccaaatcagcctcctgagtagctgggactacaggcatgggccaccacacctgggtaattttttgtattttttttgtaaagatgggattttgccatgttgcccaggctacatatttattatttttatgattaaaaataaatctattttgaaagattttaaactaactgaaaatttacttttagaaaagacagttgcactacaaatgtagaaacacaataagcacttcaaatagtataaatcaaatagcgaacccattaagagggacttaagaagcctatattctttaaaaactttaaaaaagaaagaaagatagcaagccacttggtgagtgaataatttatccttttaaatttcacttgtctgagatttattgtacatatatttcctgaaccaaagcctggtaatcatggacatgtatgtactcactaagagcaaaaaatagattctttgaaatgtggactactctcaaaaaaattcaggccataatgttagcacttttcaattgctttctagttctggaaaaacttcagcaacatattctataaaacctcataagctaatatacacaggaccaaattcaggttttcaattatatcttacccatgtatctgtcaaagaaatttttgttaaagagacagccctgtgagaaatgaggttgcataacagaaaggataatgaaaaaggcatcagaaacttaggttctaattctgattctgtcactttctgtgagaatttgagcaaatcacttaaaatttttggatgccaccacttgtcttagatatctctccaagcttagactacctccatctagggaatcatgattagtccggtaacctgattaggtttctagggttatacttattaattatgtttattctgtgttctagaacttttaaaatatcaatggtacatcaactggcaagtgcttaatggaacattgacaactgctaatcatatctgtgattcttttttcagaccaaagtctgcagtgtaacaaaatgctcagattctgctgtctctggccaatgggaggtggtcactatgcatgaagagaagcaagagtcagccatctttgatgctgtcatggtctgcactggctttcttactaatccttatttgccactggattcctttccaggtacagcattttctgtaactaactttaagttttctcgtgggagccattctgatgcttgattggtctgggaatgaattcctatggctgttccattaaatagttaaagttgggaggtaggaggaggctttttttgttttgttttgtttttttctagccagcattttctggccagtttttggctttcatttgttccaaacaatctgtgaatacataagagcaaaatggataactttataagtatttttatgctttaccaagattcaatgtccctcaagtgactggtagcactcagaaagtcttctgagacatgggatgcttacacaagtcattaacttcagcagcaggtacacattgccaaagttgagtttagaggccacaaaagtcaatctgtgaaaaaagaaaaaagtaattttttctatttgttcctcttatgtgagtgatagcaattagattagaggtttacggcactggtcaatagtcaagagggagattagtcttgggagacaacttaagacatctttgggtctcagttttcttatcggccttttgcaaccatagtcatgttaatctatgccaaattttaactggattttaactcaatggaacagaaaatgaaatggtttggtttatttcatctgtaacaagcattcaaaaagttaaaactttcagaaacttttctccaaatcatctaatgattgcctagaatgatcccaagactcatcttaccacaataaatttaggagcatgctatggttctggatctgcccccagaggtcactcagatcaggttagattaggataaagcatatcctgaaaattgccagagaatagaatcattgaattggaaagaaccaagttcagtcttcttcccaatgcaggaaattatttttcagcaattctgagagaggctccatagcctcttcttgaacccattcaacaatggaatctcatcatcacagaagacaacccaattttttgtcattcttgcctgcagagcaaggctctgagcagccatccactccaaaattccagaaaggagtacctagtcactgcaagaatccagaaagttccatggcatagggagtaaactacattcattcagcacttacagtatattgcactaggtgctaagaatatagaggtgaataaggcaacatgtaacctgtattggaggaatgaatagagttttatggagtccagtggagaaatcacagtctgcatatgacctgtagtgattccaataccctaaacatacacctctcatggtcctggatttgccccccaaagtcacacaagtttacatcagattaaaataataaagcatacctgaaagcaattgagccaatatgctcagtttgagtagaagaggtagggacccagcagctatgaattctagcatatacaaccacctagctgatagtcttgagtcgcccacttaacttttctaagcctcaaatttacccacaaattgaagagcttggattactttaaccaacagtacacatcacaaatcaagcaagaagagctctacaaggcttgcagtctttcttaaaacccatcttatctaccactgtcaatttaaaatccctggctaaatgattaaggagtctttgagctctaaaattctgtgattttagagttgaagagcagttctcccaacctctctatctcctgacttacagcagacttgcttagatggcacacactccttgcgatggttgttaactgtcaaataaaattcaaattcactgaaggtatttaaaaatatgtatcacaagctctagaagcaattccagagaaggtgcactaaaaagtcgtagtaaaaataataggtatcacagttagaataaacgtatgatttcccaagatgactacttttatcattcacatatatacattctgctatttaccttttttcttttttatattataaatttttttcttagataggacattctgctacttactaacacagccacatttacctaatataagttcttactctgtctttctgtgagataagagaaagtattagtctgttaagagacagccacagagtctcatttttgtccatttgtgaccccccaaaacaaagcctatccaaagagaatctaaaacaacatgagatccagagataactgtattttctgcttaggctttccacctctttcttcgcaa

SEQ ID NO: 98180 - DNA, 29797 bp, Homo sapiens
  misc_feature (1)...(29797): n = A,T,C or G
tcctgagccatcagcctgcctgttcacagcgcctatgtacacaggcttcgctcaattaatttgcacttgttggcgccatctgttcttttcatgtgtccttatcaggagtgtgtgcgtcctgcctcctgctcagatgtgacagtgcaaccctcctcatacatataggggcttcctgggcaggctcacatctcccctctcagactgggctcctcagggtgggacactgtctcccccctcagtctaggacccctgaaggcaaggccaagtcttcatcttccttcacctccccctcaacacccacagcctctctctgctgagccaagcttggcctggaccctagcaaaaccttctgagtctgaccccaccaggcagggcctcagccctccagaggaagcccccagaccccaaaccaaacaatgccctggaaggctggctgcctctgggtgctgggaggtagggtgtttgttctgatccccactctggctcccatagcctgagctttggcaggttcttgttacgagaacagtgacatctttgagtcacaggggtgggaaggggctaagaagccacttggaagtctctgtttcccttgagcagcattggttaagggtggtacaggggccaaggcttggacagctcctagagtggggtgggtcatggcctggtggctccaggatgccagggcaggtggcccacccagataactgagaaaaggcagcacctcaaggatgctttcccttggctctctccccatcccgaggttttgggcagccaacatcccagcctactcttctctgggtcattctgtcttccagaaggcctctcagtcccttccaaccccagcacagatttctttctttctttctttctttttttttttttttttttttgagacagagtctcactctgtcatccaggctggagtacagtggcgcgatctcagctcactgcaacctccgcctccccgggttcaagcgattctcctgcctcagcctcccaagtgtctgggattactggtgctggccgcgatgctccgctaatttttatgtttttggtagagacggggtttcgccatattggccaggatggtctcgaacacctgacctcaggtgattagcccagcacagatttctaaccccggagggctatgaatgctgagctggccctgccacagaagtgctaggcaacttcttaccctgtctgggctctgggtcctgcatagcacattggatttgtttagaatgcaaccagaccttattctgggagggtcacaagcatgcttggtgccagcatccaggcccagcccagtccactttgcctgcctataacaggcttgacagctgggccttggacttacatccaaggtcccatgactgaaccctgcagccgctccagtctcatctcctaccagcccctccttgccgcgtgtcctgtctgcactcccacggtgttccaggctgctgctcacctccacacctgtgctcctgctgttccctgtgctaggactgtgtctcctccttatgcctgtatcacctgacaaactcctactcatccttcaaaacccatctcccgctctgacataccctccaatacacccttgcctgcaccccagggtgaggagggggctggctggggggctcccccgctactgcatttgccatactgatttactatgccacactgcctgctctcacatcgactagaatacaagctacttggggacagagaccccaagccttggccgcatctgtgtctccagtgcccaccacagggcctggccaagtgggcctgccaaagagtatatcctgaactgggaggacctcagtccttggcctgggtgggggaaaggcagtgctcacccctcccctagagatggaaggagacacactcttgccaccctggctgcccacttatagggtcatggcgacctcaaggcagacagtggattcagttagggcaaaatgcaaacacacatttcaggggtggggggcacagagcagggggctttaaccaagctctctgcccaccctccccctgccagccccctagtctggacccatcccagggcccctctgtgaacatcactggcatcatgacgagccctttcctgcagacagctccaagctgtggtggagcacctggggtggggatttgggggttaggaggggtacagttccatttgtatttcaggcccagcagcattcctgccaggagagagttttagaaatggaaatggagggctgtgttccctcagcacatgtcccgcctccgggagctggcatctctgctctcacatggcccatgtgcaggggcacagaaccccaggtgccaacgagccccctcctaggctgcagcagaagcccacagccaggcagggcccagagaagtctgacagcctgccaaaagcaacagcaaaaaccacctcagcccaggagcctcccatcccccacccccgtgtgtctgatgcggtggttttattgcgggcagtgagggcattcatgacagcctcagaatgtatgagccagacctggagccagcaggggtagggggagcagagcaactgtgcgactccaggagatgggatgtgggctcagtggaggccgttgcaggggaccaggtaggcatctggaccttctggctaggccagcttcaagctcgagttgcggggaggcctctcctaccagcagctaagcatggctatcaacatcctgcgtgccccaccctgagttcagctgagcctctggccctgcaatagggagatcccagccctgatgagtgatgaagcatgagccctgcccttgcggactccaaggccaaggccagttgaggacaggagagccagccccagggtccggagtggtggtgaagactctggaaccagctcacccactccaagaacttccctagcctcctcatacctcactctcctcctctgtggaatggacatggagaaggctacttcatcaggtgactggtggtgaagttaggccgatctatttaaggtagttagaacagtgcccagcctatggtgagctcttgttacctgcctggtgcaggctctagaaattcagaaaggaagccaagaagagtaggaaagtcttttgttaggaggtgggctttgcagaatggatctgcagagatgggggaaggcgactctgtcctgtaggtgggggaactgcgtgagcaaaggcacagaggccggatgcactgaacctgtttgttcccccagaggttctgaggccacaggaagtggctggcgtgggagtggctggtccaaggggagctgcactattaagtgtggagggggagggggacaggagcaggaccacagggaccttgaccgccaagctgggggaaggaagtgtgaataaagccccaatgccaccaggcatctctgtactgccctcctctccctccccactccagccaggcacctgccctgtttcctgggaccccctgaaggaggacatcccttagctccacaaagagccctgccctagtcttcacatagtaattgtcttgtgtgtctcacccagtgataaggggtgggcaaggggcaggggtgggggctcttgagcacccgttttatagatgaaatgcctgagaccaggcgggagcccctggggcctccctggcttcatggggcaggctcaagtccctcaagggcgcggcttccctccctctcagcagcccacacttgttctatgtccggtgatgggtccctgagggtccgctggggcgcccctccagcctcccgccagagcagggctggaagactgccatgtctggggccaggctgagctcagtgcatgcctctgcgtagtgcattattgatggggcttctaattgtgcgtttcccaaagtctacaggcttttgatgaaaaattcatggcacgcccgaggatgggagcagactcaatcgattggcgcacagcaggcaggggaggacagggccccttgcagggaggggtggtgaagcctggtctgggaggcttcttgccccaggatcttggggatagcagggggcacacacccatttccctggtggggaggctgaggggcaggagcaggaagatttaaggcccacatctcagtgccagccagtgactggtgccatccagggaggatggccgactccaccacgggcctccctttcatttccctggaggggtgctagaccctccagagcccctcatgagagttgcacagaggagggagtaatatttctggagccactcttatatgccagacgctgctcggacgtgtacactcgcagcctcatttaatccccaacagcgttatgagatgggcacagtgatgcactccattttacagaggagaaaacaggcttagagaggttaagtgacctgtccaaagtcacacagctgcttagtaacagagcccactatctttccacttcaccaggcccactcaaataagaactaataggagtatggggattgtcttgtgccactcccctacttgtccctattgttcagaggaagtgtccccattaagaaaaagtggagtgggccaggtgcagtggctcatgcctgtaatcccagcattttgggaggctgaggcaggtggatcacgaggtcaggagatcgagagcatcctggctaacacggtgaaacccagtctctactaaaaaaatacaagaaattagccaggcatggtggcaggcacctgtagtcccagctactcgggaggctgaggcaggagaatggcatgaacccgggaggcggagcttgcagtgagcccagatcgcgccactgtactccagcctgggagacagagcaagagacagagccagactccatttcaaaaaaaggaaaaaagaaaaagagtaagtgaaacatgaggcctgcaaatgagaaaaggaagcgccctccacaacaccggcagaagccagaggccccccaaccctgtgcagagtgctgagctgggcacccagcagcaggggtggagattttgaaacgggtagaggtgactgtcttggcttgtccagtcagggattattattgtgccaccattgaggccccaaagaacactgtaagtcatctattcattcattaaacaagtaaacaaatatttatgaagtcccagtgctggtcagcatcttgctaggtccaggtggagggccctatcatgaaagcctttgggaccaagcttgtctgggacagacaggctgaacccagttcagctggggaaaggcaggcaggcccctccatgccccaggagggggtctccgcaacccaggctgaagccagttatatcagacattctgccttcatgaccagggccgtttctaggtggcgggctggcttgtttgggtttgtttttttttttttttttttttttgcttcccagtgagtttctttcaaaaacttccacccatgtctccgctgaactaaagagaaaggaatttgtccagagcatcaggaaagcagccagaggaagtccccagggaccaggcgtggggccctaagccacactgcagctgcagggaggagagtgagcccagcttgtgctgctgcgggggggggaggactcctgaggggacaagggggaatcagggagcagagagactaagggggagggggaggaggagactcagggacagagggtgaggctcagtgggagagaaaggggagacagggtatgggggtaaccaggaggcagagaaagtggagaagagcggagggagttgagggggaggcaggaaccaaggtgtagccaagggcaggtgagggaggagggactctgagcctgggccaggggagtcagaaggccggagccctgaagggccccacagccctccccggccctgctgtctccatacaattctgtggccaaggagtgaaccttgcatgatttcagccaccccacccagacaccccccaccctggaacaaaggggaagtggccccatgggcctgcctgcttccagctcagggctgggcttggtcaccaggcaggcacttgttgtagcaacagtccctggggacccatcctggggaacaggactgctagcagtaaagatgggggagccagggcccccatcccctccagcccccaaggctgccccaggcctcattgacagcttctctgtaagtcgccccctcgcccactggttctgggaagatgggttggctcgcctagcagcaggtgtgttggggtgtgttgcccagcaaccagtagaggtgttcccagagcctcttaagtgggaggcagggtggagaggaccagggctttggcccttagatgcccgtggtcacaggaatcttttgcarggccccyggctccagcctaggccacctgagcccacacagtaatccagagagggaggacagaagggcttctgggaaaatcccttgaagtgatcattgcctcctgctagtctgggccctacctctggtgtcttggaggtccagccttggatcctagaaagtggctgagcctgggctagcctgggaaggcttgctggtagtgcatgtgtggtgccgagctgtgaggaggagtgggtgtggcagatggggcatccagtggaagcagcagctcagactgggggctggggccgccccagtaagtgctaaccyttctggtttgggccccagttgccaaagcatttcttcttcccctttggcaagaatcccagaggacaaccccaacaagggtcattccccacagggtgcagatgagcaggcacggagtgggcaagggcctcgcttcgggtcgttcgacagctgtgggcagaggctggatcagaacccaaggttctgggttccagccagggctcttcccccacccaatgtggggcattcctgaggcagcaaagctctaaccagggaggattctggcaggaggtgaccagtggggaagggttctttgwggaagagtgaacagggcctgtgagaccaggactggggcctgcccctcaccacctgctgaatgcccagccctgtactcacctgggctgagagcaagggctggccccaatctgctgtcagcagaggctggactctggcccaatacccaaggagtcatgactgatggcctgtcttgggatagcccgggggtcttcctggaggaggagggcccagaatggagccttgagggtcaggcagcgttcagaaaagcctaggaggggaagtaggaatgggaagccagcatcttccaggaagccccgcccccaccccagcccagccggtctccattgtcccagccaggcccaattagcacctggctcctgcaggggccaattagacaggggctgaggtcagctgccggccaaggccctgccacccctccaagcttcaccaagccaagcacaaaagctttctaggcatcatctctgctgcagcaggaagggaaagaaagaacagaagaaagggaaaattcactccttttgtttctttgccataaccttgggctgaacaaagaagcaactgcctcccctccctgggagggcagcttctgtggagcaggaagtctgttttaaacagcaatttgcacagatttgttgtggttgggaggcccagatgacattcgaggggaaccaggagcagagacctggggtgagcagggccctggttctagaaactcctgtgactccccactgcgctctgttcagaagcagagcttccgggcctggctggtgcaaacaggtgggcctgctccagctctctagccagacagacctgtgtactttgctgcctccaaagagcccagcccacatgggcctccacaccttccctcagtgttccccacctctgaagtcccacccaatccagtcaaatctcacctgcacctcaaaggcccagctccacccctcccctgcaggatcccctccccaaccctacccctggccttgacttgcactcmtagggtgtgagccatgtcccacacaaggcctgcctcccaccgggaactctctgagtgcagggtctccccacccccaacagagctgagcttaggggtacaaacagcagctgccaggccctgctggggagcaggtggaagggagatatatgccagagtccaaaatggggtttgggaagctggggccaccctggggtggtgacaggtggagaaggggacccaccagtgccattgcctcctccaggctcccacccccagggcaatgccacatcgcacagaccaccctgccctcacctccctaaccctgccctctgtgtctcaggagcrcagcctctcccactgggctatgcccttgccgcttcgatatcccacccagccaatgaggctctcagtcctccctcgcctgccctctggtggtgatgaggttccagagtgaatggagggaaagaaagaagcttgtcctcatggccagtgggttctattgtccttcagtggctgggaagggagcttggctgggtgggcagtggcaaagaactgagaggccagggtcccagtggcattggcccgtgtgtttctgggagtaaggggacttcttagccatggtgagccccaacccctgggaaaacactagtccctttcagcaaattttcaggcacaacctccatcctccccgacttgtccctgagacggcccctcagaactgggcttttgctccctggtctctggaactggaggaggccagcatcaatttgccagctgaattttccattgtattttaaagaaatgtggttaattcgctttattttattttatcttattttatttatttatttatttttgagatggagtcttgctctgttgcccaggctggagttcagaggcacgatctcagctcagtgcaacctccgccccacccccgcctgccccccagttcaagcgattctcccacctcatcctcccaagtagctgggattacaggcatccaccaccatgcctggctaatttttgtatttttagtagagatggggtttcaccatgttggccaggctggtctcaaactgctgacctcaggtgatccacctcccttagcctcccaaagtgctgagattacaggcatgagccactgtgcccggtgtactttttgtatttttagtagagagggggtttcactgtgttggctaggctggtcttgaactcctgaccgtgagtgatccgcccccctcggctcccaaagtgctgggattacaggcgtgaaccaccgcaccgggccaagaaatgtggttaattccctttaaaagtattgggaaatttagattagccaagagagacctctctgacattcaaaggacacctacaggagttctgtttggcaaatctggcaggagcagggtmtgggtcaaaggatttgcctgagtaagtcagggaggcagggaggcccttccctgccatcaaggtctttaggagctgaagggggagcatgtgcgtggcccttggcagatgrggagtgccaggctgrtgtaggcgagaaacagcttctgggcagaggtagggaaggctttgaagataggggcccagaaggctgggcccatgggtggagtggccagggctaaattctgaaagggggtctagctgtgctgaaagaggtggaaattcaaagttggaaatttaccatgagggccagtgggagtcattggaggggtctggaggccagagaggatgttccagttacctattgcaataacaaactaccccaaaatgttatcatttaaaacgataattttttcttttattatcacatctcatagctttgtgggtcaggaactcagccacggcacagcaggtctaagtcctcagctgggacgacctacgggcaggggcgggagcagccagggctgggtgggcctcgctctctcccatacacttagtttgggcttcctcacagtctcagggcagcaaggaattagcagctagcagggaagaattggggttactgcaagatgggtctcatcccaagcccctgtcctcaccactcagccccaacatcttccctggagctaacccaggatagaggccccaggttcaagattcactgagtgacttcaggcaaatctctgcacctctctggtcccaatatcagaacttstgagatgggggttccagggctagaggtcttggaaggctggctggaccacctggaggaaggacatgtgctcctggaactggggagagagacagctccgcacacaccttccccacaatatgagctgtgggccactcaggttggcctcatcccaccacaggctgaagctgagtgtctgtgggaggcggctgccctctgctgactgcaaaggcaaaccacatgcagatggcctgggcctgccagcgatggaycctggggatccggggaaccctgagattgggtggccgcccaaggaaggggacagaggagagggtgtgtgcctggtccagcaaacccaccctctgcacccacttcaacactagccagactgccacccacactacctcagacccagcaacctgtctcaggcctccttctctgggagagtgaagcccctccccgctcctacccctgctccagcccatacctcccctatgcatccctccctcttaccttctaagtctccaggaaatcctctctctccaccactatgcctctccttgaccctgttttcctagctacctttgacccttctcaacctcactgtcccctcagaccttacccacagcacccagcattcagagcactggccaaggtcacttcctccaggccacaccaagaggctccctctgcagatccggaaactgctaagccttctctcctttttccaaaattcttttaaattgtgaaatgtaacccatttcacaatttaagaaaaattgcattgaacatatagaacataattattataaattattatatagcaaatgtccatgaaaccaccacccaggtcaggaaacagcatcaccagcatcctcacgcccctcatgcccctcccagccacacccctcctctcctggatgtaatcactctgccagctttctgtccttgctttgcttctttatttttttattttttaattattttttttatttttgggacacagtcttgctctatcacccaggctgaagtgcagtggcataatctcagctcactgcaacctccgcctcccgggttcaagtgattctcaggcctcggcctgccaagtagctgggattacaggcacccgccaccacgcccggctattttttgggcttttgtgtagaaatggggtttcaccatgttagtcaggctggtctcaagcttctgacctggagtgacctgcctgcctcagcctcccaaagtgctgggattaaagggttaagctgccggttggttcacgcctgtaatcccagcactttgggaggccaaggcgggnnnnnnnnnnnnnnnnnnnnnnnnnnnnnnnnncacttcaccaggcccactcaaataagaactaataggagtatggggattgtcttgtgcccctcccctacttgtccctattgttcacaggaagtgtccccattaataaaaagtggagtgggccaggttcagtggctcatgcctgtaatcccagcattttgggaggctaaggcaggtggatcacgaggtcaggagatcgagagcatcctggctaacatggtgaaaccccgtctctactaaaaatacaaaaaaaattagcccggcatagtggcaggcgcctgtaatcccagctactcaggaggctgaggcaggagaattgcctgaacccgggaggcggttacagtgagccaagatcacaccactgcactccagcctaggcaatagaaagagactccatctcaaaaaaaaaaaaaaaaaaaaaagtgtgagccactgtgcctgacctgctttgcttctttatactgtcgctacctgagcatgcctctcgaatcactctggcctaaattttctatttttaccttcatggagagggcaccgtgacatacrcattgctttgcacacggctcttttgctcaccttgatgtatgtgaggttcacccacatcatggtttcttattgctctgaagtatcccgctgtatgggtctccacctgcccctatctctgccccataattcctcactcacytgccagttctttaatgtttttatgaaggtgagttttgctttgtgtcccattcagaccatctctagcggcgggttcatctccatcatccaagccgcaagactcaagcggaaggtggttgtcctccttttgaagccctcttgccagcctgctctcgccgcttttcctcctacctctctggcaattgcgctagtcctgagagctcctctcctaccaccccttgtccttgaaccccctcctcactccacagttgccagacgctgaaaatctgctcccttcccaaggctccaatggaaccagggctgtcctgccacctgtcccccaccaggattcactccaggcttgatcaccatcagccactgctggcctcctgcacctgaggccctgcaggtacctcacccctaacacgctcctcccccaacccagctccccctccttcccactccagacctgcgcctcctccacccaaagaccccagctcctcctctcctcatcccccacctcctccttctcccctcttcctccttcccactccaggcatgcacctctaccaaaaggccccagacttctcccactcctccccctcctcccccacctcctcctcctccacactrcaggcatgcacctcctccacccaaagaccctagccccctgccaacctcctgctctgccatccccaaccctcctcttcgttgttcacttcactctgtcatgctgagtcctccttggtctgcctccacccagcaagggtccctggctccctgctctgggcctccattcatttctctgtccatcttggtggcctgaggcatcttgccacaaaccccctccagcttaggcccttcactggcctgcaggatggaatccaagctcctgagattgccacacccctacttactccccaaccagcactctgccctccaggaagtcaccgrctttgttcctgatcatacactctctctcctccctgcctttgccacagtgtctcctctgcccaagagccctctcccctaccccgggtaacacctgctcaccctcctagagtgagctcaggctatcaccacctccaggaaggcttcctagacctggggytaggaaaagagactcctgtaagctctcctctgycacagatgtcactgccatctccttggtgtagatgggagaccatcacaagcagggacggtctgggctggtctgggctccatggccccagtgtggacatggccttcagcaactgctgrtgactgtgctgcttccaatgtagcctttacactgagtctctgtgaccttgggaacactacttccaatctcagcttccccattttacaatgagtttataaggaccctaagtagccacaggtgtcattggatgcagtgcctcagattctgccagaagcacttcttatttttttgyggggggtgggtaagggttaagcattaccctctttaggcctcctgcacccaaggccctgcaggtaccttacccccaacacaccctccctaacccagctcctccttctccccactcccagcataaaaacaaagacaatcgccattcctcctccttcgtgggaactggtcctcagtttctatacaatgaaagtagtcacatcatcatatcttctgtgmccactgcccagggttataataagaaccattaaaagtgcgacggcaggcagaatggctcatgcctataatcccagcactttgggaggtcaaggtaggaggatctcttgaggctaggagttcaagaccagcctgggcaacatagcaaggccccatctttacaaaaaatttaaaaattagccaggcatggtggcacacacctgtagtcccagctacttgggaggctgagtcaggaggaccacttgagcccagaagttcgaggttgcagtgagctatgatcatgccactgcactctagcctgggtgacagagtaagtctccatcttggaaaacaagaaagcactcagaaggtggtggaggaaaaagagatgctgttgccaggcaccctgtgtgccagagcctgggctggcactgttcatgccccctctctctccacagcaaccccccttggggtggggtgattttcccattccacggatgaggacgctaaggctcagagaacagcckcccttccagagccaaagcgaaggtgtcggtgcagcaaaggccaccagcgctcagtggcagtggggcaattcaaacccaaggacacctgacatttctcacctgggcaggatctgatagctgggtcttggatggggaaagcgcagtgtcaatgggtgaggagaatgcagtgggcactagccttaggcacaatggctttggagtcagtccttctagaggaggctaagcctagggacaagacagggaagtggctggtgcctgaccctcccccagcagactggaaagtggggagggggctggaggggagggattggagcaggggagtcagcaggaccacaacaggaatctgggccatggtgtccttcctgttctcaaggctgggctgtgacgcagagcatggccctgggggttggggaggcccagctccaggctgtagggagtggtcagggctgctcatctgcaggcagtgtcctcccagaccagctgtgctgctcaaggtcactgctgtgcgggtgggggaagccgaggagggaaagcaggtccttcagtttcccacagatgtagagggaagagagcatacagactgaggggtaagccagggccgagatccctctccatgccctgggggagccctctctctcagagagcagccaggcttggtgggggagggggataggcacctgtggaggcctayaggactagtctccgaggagtggagtccagcagggaccgtctgactgagacagggacgcggcctcaccagaagccatgctctccctccatctccttcctcgctctgggccccagctttctttgtctrtcaaagcgaggtgttaataacagagctctgggccaggtgcggtggctcattcctctaatctcagcactttgggaggctgaggcgggcagattacctgaggtcaggagttcgagactagcctgaccaacatggtgaaactccatctctactaaaaagacaaaaattagctgggcgtggtggtgcacgcctgtagtcccagctacttgggaggctgaggccagagaatggcttgaacctgggaggcagagtttgcagagagccaagattgtgccactgcactccagcctgggtgatggagtgagactccgtcacaaaacaaaaataaaaataacagagctctgctcatgccccaaaacagctgagttggagaacaggagggtcttagaaaaaatgaccctctgaatgagaagaggggktgatcagacccatggggtgggctgaggaactggcagccccctcccccaggactcactccatgagcaygctcacaacccggttatggacaggatcgtattaatttgccacatgcactttcctttcacaatagagcgtggccatctctgtgtgtcagtataataaaatctgggtcatcctttgtgaccacagcctgtggtgcagagactgagcatgccctcatataagaccacaagctgtgctgcagtgagcatccctgcatgcattttcctggatgtgtgtgtgcgtgtttcgctggaagccaagaaaacccatttggatgctgctgtaattgtccagggcagatatgctaagagcttgaaccaggctgggcaaagaaagaaggggccaaatttcctttgccaaaatatcgtgtgcttcctttggtcagtcccccatcagtaatgggctgccataaactgaagatttagagcacagcaaaggaagggcctgggagctctgggggcagcaaggaggaagaggaaggggtctgacctgttgattaaagcagtgattagaatagaaatgggtgtggaggagagcagcagcctccaaattatacctgcctgggcaggggcttcacgcaccaactcttgagcctcacagcaacaccaggcatctcygtgtgaggactctgaggctcagaaaggtgaaggggcctggctgaactcacactgcatgtgagtggccaagctggcctgctgatctgggcctgactgcaaagccctgtgtgtgtgtggtctctagacagagtctctccattaacaatgctgtccgaggacaccagatgggcagatctggaggagccaagacctggaactcaacaggggcaagtgctggagagatgaacctggcactggtgcaattagagggagcccaaccagaaggctagacagtggcaggtgacaagtggtgtctggtgggcccctgctgccaggagacccctgctctcgaagccatggcctgccatgcagcaggtgggaggcagtggctgagaaggcaggccatatccgcagtcagcatgaggcccaggtggttgctgggggccgagctctgcttcctggaggtgtgagtccccacccgtatgtacacagcctcccacagcttcaggaagcccacagccacaggggctcagcaaacgcaggagcaaactcacttccccatgcccatttcctcccccatcccagctcccacctgctgttcctccatccagacctctctggcttcacatcgaggttgcagtgagctatgatggtgccactgcacgatccttttctattttgtgctgttcagatttaagaaactccctttgtgaaactttataaataacagtagggaatttctgcttataaaacaaatgcatataaatatagcctattaattttcatatatatatatatatacatgcacatgggcaggcatgawtttttctctcgattggggattgcactgatcattcctttttgtagcctgcttttatcacttctcagcgtattgtgaagtgtccacatatggaggcctcatggcagaattgcacggctcttcagaacagaggctcaagtccctgcaggcctggatttcagaccctggctctatcactaatcagtcttgtaactgagcaagttactcacctctctgggccttggtttccgcattggtataacggagataatagtacctatccacgcaggtctgatgagaggactgagggagggcacataaaaagcttagaagaagacctggaacacagtgaatgctcaatgagcatcagacattaggattgctgttgttcctgacctcatggctgactccagcccccagccccacctcataccccacatcctgtagctggatcccagcctccactaagctctaacctgggtctcccagggtgaccttgggtcctctgactactgagctgtttggagggctgatgcccagtcaccttccaagtggcatccagtgggatttctgagaggttcttccctgggttctcagtgacgtgaggaatgagaggagttagaagatggggaaggaggagggaaaaggtgaagaaatagctatgatcgagccagaccctgcaaacctggccctggatcttctcaagtctccattgcccataggcctcctcccctgtgtccacacctggggtttccccctgagttggtatcacaggacgtgatgtggccccggggagagaacattagtgtggctgccctcacatggccaggatgggtgaggatcaagtyataaccacccttccagggagctgctaagacttagggccatggcttggggctcctggtgctcactggccttgtgggggacccactgactttcmagtgtagatgtggatgtgggaccagggttgctatggggcagtgggctcagctctgggctctgggatccacaggagrtgaacaactaccggckggccatgcagaagatggcagaggacatcctgtctctgcggagacaggccagcatcctggaaggagagaaccgcatactgaggagccgcctggcccagcaggaggaggaagaggggcagggcaaagccartgaggcccagaacacgggtgaggatgtgcaggccaccaagggcacccgggcttctgcctgggcccaggctccaggttgtgcaatagggtggctgggagcttctcccagatgtgcatgctgctggactctggcaaataggagcccctcgcccacagacactcacacagtccctgcccagctgggtcctctcagggatgggaaacagagaatccagtcccgtcccaagccctcgggccaagggatatctgccttcctgctactgaccatgctgatttgagctgggagaggcttcctccctgagccagctccccaacccacctaacagtgtccatgaagcagaaactgctgctgagtgagctggatatgaagaaactgagggacagggtgcagcatttgcagaatgagctgattcgagtgagctggggcttgtgggggcagaggggagggagctatggtgggggagcatcggggtgagaagagtctgggaggagaagggagaacaggcacagagggaatggaagcacggaagaaagggggaccagcctggtggaggattcagcagaggggccgaggtggaccctcagggccaaggtrgactcccaggcacccattctctccccttcyctcctcccccatctcacagaagaatgatcgagagaaggagctgctccttctgtatcaggcccagcagccacaggccgctctgctgaagcagtaccagggcaagctgcagaagatgaaggcgctggaggagactgtgcggcaccaagagaaggcaggtggcagaggggctgcccccgaggccaactgatgatggcagagtagggagcccctgggccagcccagcctctgctctgctctccaggtgatcgagaagatggagcgggtgctggaggacaggctgcaggacaggagcaagccccctcctctgaacaggcagcagggaaagccctacacgggtgggtccacaccctgatgtgatcagctccccagcttctgctccacccctggaggccctgccttcctggagcctctcagcttcaggagaacctgcgaagaggtcccctgcactcagttatgtctgtgggcctgggagacccaggattgccctgctcccctcctcattcaggcgccccatccagagatcccctgagctccctccttccctggaagcccctcagaacacaattgggatgcagtgtgagccaggctagaaagagggtggacctccagaggagggccctgcagactagcacagcagagagggccttcccctgaagaagggccacctggggcaacacttcccagctcctagccccaggatccgtcgaattatttccccataccgccaaagattctgcctctgcaaagcaaacaaacaaaaatactttgattaaatcaatgatctggggccaggcgcaatggttcatgcctgtaatcccagcactttgggaggccgaggagggcagatcacttgaggtcaggagttcaagaccagcctggccaacatggtgaaaccccatctctactaaaaatacaaaaattagctgggcatggtggcgggcacctataatcccagctacttgggaggctgaggcaggagaatcacttgagcccaggaggcagaggttgctgtgagccaagattgtgccactgtactccggcctgggtgacagagggagactccgcctcaaaataaataaataaataaatgatttggaggttttcttccccatcgatattaaccaaaagccacctaaaactgccaatcagcctctgataagcagaaaggaccaggtaacaccatatcaggccagcccaaagcaagggatttccctgagcctgcctgtgcaacctcacccagggcccctgtgtgcccagccctgtgcttagccttcaccgctgagggtctcaggggcaggagggtgtttctaggagcctttagaatgcaatgaaagctgggctggcctttcaggaagcctgaggtcatccaggagtctggatgagactgagaaggcaacctagggaggggaaacagccagatcaaaggcccagggagtgagaagaattccaggatcagagaagggaggaagagagagaggtgaggagctgaaatacactgaagacaaatgaggagttagagagaacgttgaggtcaggttctaaagagcctagaaggacagcctgtgtgcacctgatcccactggtggtagggagccattgaaggcttgggagtagaggggaggggtggcagattgaagcaaaatgctggagcagatcaggacagggacatgggaagcaggagagcccatctcaccaacatctgtggccgtgtctctaggcttccctatgctctcagcctctggccttcccttgsgttctatgggagagaacctgccggttgaactttactcggtgctgctggcagaaaacgcgaagctgcggacggagctggataagaaccgccaccagcaggcccccatcattctgcagcaacaggccctgccggtaagaggcccttgacctgggcctgcctatgccggtcactgggtgcccagaaatcacccatggtacaacccaagttgaagatcaagaccaggagctaagcttcccagggtctccagtctgcctgggggctcctggaatcagctctcaggccttggtctttttctcctgcggaatgtgtgtccccgaacacttcacctttaacctcatctagcatcccaggagaaagcaagccccttgttgacccttggtccctgaaccctgacccctttttcacctsrctggcctccacctggaccctacacaggcctctcaaaactcccttctggagcattccctggtcttggtgcagccttggagagcccttttccatcccaggtggaccccggggagttgggagcaggaggagacttgacagagaggctacaagagacgcatggcccaggccactcagagtgcacagagaccctgcccgcacaggtgggtggcccagggcccagaaatgcccaggccctgctccacctctgaagatgcttcaggggccccttgctttacataaaccccaaagcagaacatttggaatcacagaatattgggcagggcaggggcacaggagagttttctctccatcccaggactcgccggaggtgagttctgttraaagcacacctgactcatggacatccaggtaaagtgtgagggatgaggtcaactgcctcacaggttcttcacttcactcaaagactcccagtgcgttaattatagggggctccctaatgcattttacattaaaaaaaatgttgtgtcaaaacttcgtattctcaaaatctgtgtgggaaacagctgtgaaaaaagcacatgccagaccctgttctgaacttccagaagagggttcggcccaggtctgacgctctgcctcgggagctcagtctgaactcaggcctgactggtttcttcctcaataccttatggtttcccaagctcacactgccacagcctccagctggggccaaatgtgagtttgtgctttgcccacaggatctcctctctggtacttcagacaagttcaacctcctggccaagctggaacacgctcagagccggatcctgtccctggaaagccaggtgggtgagatgcaggagttgatgaggctggatcaggctcaccacacagcctataaccagggctcagtgtgtgagcagagtctaggctcaatctatgaccaggatcaaggcttagtgtgtggccagggtcggggttcagtgtgcaaccagggtcagggctcagtgtacaaccagggttagggttcagtgtgtaaccagggtcagggttcagtgtacaaccagggttagagttcagtgtgttaccagggttagggttcaatgtgcaaccagggtcagggttcagtgtacaaccagggttagggttcagtgtgtgaccagggtcagggttcagtgtacaatcagggtcagggctcagtgtacaaccagggttagggttcagtgtgtgaccagggtcagggttcagtgtacatccagggtcagggttcagtgtgtgaccagggttagggttcagtgtgtgaccagggtcagggttcagtgtacaaccagggtcagggttcagtgtgcgaccagggttagggttcagtatacaaccagggtcagggttcagtgtgcagccagggttaggattcagtgtgtgaccagagtcagcgttcagtgtgcaaccagggtcagggttccgtgtacaacgaggttagggttctgtgtatgaccagggttagggttctgtgtatgaccagggttagggttcagtgtatatccagggtcagggttcattgtgtgaccagggtcaggctctgtctatgaccagaatcagggatcagtgtggactcaggatcagagctcagtatgttgttgaaatgtccatctgtgtcttggtcaggctgcctgactgtttggccccctcaccctcaccccgccacccctgaggtctcgggaaggtgtcaagcccacatggcccagagctttgctttctkcctggacagcaggctcaggccctggttgtcctggccatcagggattagccctgctgcccatggtcctccaattgtccctctctgtgtctgcagttagaggactcagctcgacgctggggacgagagaagcaggatctggccacacggctgcaggagcaagaaaaaggtttcaggcacccctcgaactccatcatcatagaacagcctgtgagtgacccccctggagtagctcccaggggttcaggtggtggagcaggaagccaccgcacccccaaagtcactgggccctgagaaaagccattgtggagccaactccagggctgggggtcaggagtcctaggctcccattcctgctccattaccaaccgaaggctcggtcttaattcccccacctgtctaaggggaacagaaaacccctgccaaaactaccctttcccccatggggtgctatgaaactcaaggagatgactgtggatgaggggtccatgcaggcatctccaggatgccctgacactgtgctttaggactggctgcgctcatgggcagagtagcttgtggccctacccccctgaatccatagagcctaagattctcaaattagcacacccttctcagatggccacgatgtaggctccactttgccaacttcccgagaacaaacaggcctgctcacaactgcccctcaagttcaaccccgggaccgcccagccccgcaaagcaaagaccctgacttctcctgctcttgagccagctgtgctttgcccgtggccagaagctcagcagcggctcctgggaaaggcctggaaaggatgagggaacaggcaaggaacaaaggcaacctttgcacactcacctgagccctggggacccttggagaaattaggtgtcacctgctgtggcaaaatgggtttagaaatctttgccaggtcatggcccactggattctggatactctgaggcctggtttgtcaggcaatatgcccttgagcaggtcaccccctgggaatggggggtactcaygcaccccgctttgcacaccacagagtgccctcacccactccatggacctcaagcagccctcagagctggagcccctgctgcccagctcagactmtaagctcaacaagcccttgagcccccagaaggagaccgctaactctcagcagacctgagccccagagcaggcctccttccctgtgtgctggggagtctcatcaccgccccctaaaaatgacgttattaaatgttgtagctctgtgagcattttcctctttcctggagcagggcagcctgggggccctgcttcctcctcctagacctcactctgggcctgggcctgggtcttctgctgcagccttacagcctcccgcctgccccaggagccagcatctttggaaagccaagggccacagtggacccaggagggtggagagaagaggccttccaaagcaggggccagggagacgggccccttccagacccggagaagaagcaaggccaccagagaccagctctgttgggaaatacgagggaggcttgtccttttcatctgccccaaaacatctatcatgtctgatattccttctttcaagtttggtttgtctgtctcttggaaagggaaagacttggaggcttgaagccttcctgtggcagtcacgtatcattgtggaatactccattaagccactaggctgagctggcaatgatgtgtccaaatgtagccggggcaggagagcagattgggccagggggaaggaggcacctacagggagtcaggaggcccaggttctgggggcaaacaggctgtgtgacctcaagggacccaagcaacctctctggacttcagtgtccccatctattccatgtagagcttgacctcattggctgtaagcctctttccagctataacatttctgagtcaaagctgactcaggaccagagaagaaaaaggacacaggaaggaaagacaaagacaacagggaagaggattttgtggtggggaaagcagaagggctccaagagtggatccagatcccacagcttcgggcaggagaggccaggccagctggaccactggcctcagctggactagctcccccacctgcctgcaggacttagacttggatagccgagggccaagaggaatcaggtcaggagttgggagaccccaagggattagggggcggaagtcgagaccagtgtcattcagtccaaatgacaaaccagcggctctgctgcagaatagtatccccacctcccacccttggacaagggggcgcaagcccccagagcaagaacacgaggcctggagcaagcccagaggaggcccgggaatggtaaaggaagcaggctggcctctcatccccagtcagccacctcacaccagcccttcagtagcaggggttctcacccacagttctcggcctttgccatgcccaggactctggctgggccttggcaggaagtcctcatgccccacagggaactcccacccagagttcacccaagcagagccctgtgcgagccttacccctgtggggcaggtccactcagaaaggcagtactggcccacacttcttggggccacccacagaactccccagttctcctttgtccttctgcctgatgcttctgtagctcctggcacagtagcagttgcctcccctcctctgccccactctgcctcaccccttgccccagggagcctggagttgattctgctggctcctgaactgccatgggtgagggggtcccagcagaggtggcttcaagtgtggctacctggggtctcctgagcatgcccagatcctgctttaacacaggaagcatctccacgggagtgatgaacacctaatgagtctgatggaacgcaagacaccacatggttcagctgtttattgtctccatggggtgggtgaagaggagtggcccagctgagctgaggaaggtgaccactgagaacccattcaacctgctgagcaggctgggcagaaaggagcaggacttgggacagacgactgaagatgcagagaccccatgggccccacccctgggccttcctcccatgtggctgcaggccatcctctctgatcactgctgggttgcttcctggttaaagggccagaaggtgaaggagatgggcttttcaggcatcagaatgaggttgaatgtggtgcccacatcgctgaggtgttggatttcaactctgaagttctccagcatctgagaaaggcagatggtaggtttaggggagggcaggggaggatctgtctccctagccaggccaattcacccataggcagtgcctgtggagtgtgatttgaggagttccaaggagttcaccaccagctcctggtgtaaccctgcacagtgcctgataatgcacccttagtgctgcattcccttgatttaggcctagaccttaacttgtctacaaacctcagtcctatcccatcccatcaccaccatggggaatggatggccaggggcatcagtgggtgatgagtggttgagcccgaaagagggggcagcagagaactgtgggagagagcgagagcaagtaactggaggtagatgcgccccagcactgacatccttgggctctggacagagataggaggaggaagattggtgccttcattagggccagggccagcccagggtgcctagatgtccccagcttgactcacattgatgaggaagatggtcatctctagctcagcgatccgccgtcccagacactgccgcacaccccagccaaagcccaagttccggaagtaggtgatgttcttgtctttgctcagccatcgggttgggtcaaaattttccgggtcgaagaagaaggtgggctctcggcccagagcatagatggccacttgcaccagtgtctggggcaaggtgatcagaggcctgagtaagccccacttccccacagccctgagcacaaaacccccttccctagtcccctgccctctcaccaccactcccactccccagcatggctgcccagctctccagggcaggacattctgcccactgtgcagccttgaacaaggccccgcccctctgtaatccttacccaccaaatggggatggctgaagacccaaggccaggatgattgtcccaccctttcctcagacccaggcaaatcatgaagtctccctcctaaccctgggttccaataacatcctagaggtcaccgcccaccatgcccaccacctctgcccttcattcagacttagactgctgccatcaagggccccaccagggccccagtgccaccctctgtctgcaattccagcctgccccagccctctctgactggcagagcctgcagcctgctggctgcacctaccttggcaggaatcatgtaatctcgaagaaccaagtcatttacaagatatctctgcagggtcacggagatggggtgaagtctgcgggaggagggcactcagaagctgatggccccaaaggctggacacagccgccggagccccacaccctgtgtggcatctcagccctagctgcagcagcctggggggacctgggggtagggccctggctctatttctttctcctccagacttttcacttcctgcttccaacctcctccaccagcccatcctcgtaaccctttccccgggcacttccctggccctgcccagggattggagttgggggcggcatgggtggttgtgggcttgccttagtgtctccttgatgctggctttgaggagggggaccagctgtagcatcgtggccatgtctccctgggcctggtgccgcgcagccaagacctctgcccgcagcatatcctgcaccttcaggttgcgtgccatctcatacaagtgccactgcagggtcatggacgtctggtggggagtagggtatacagaagaccaggagggcctgtcactccggggccccttgaggtccttgaccccatggtaaattttcatttccaagaacctctttctccccgaaccccatcccagtctccaagaccatcctctgcaagagcaaaacacattccattgtctaaaaggcaaatgtccaagaaggctttcttgccggccaggcaggaacattcagggcagcacttgtccctgccctcgtccctcatgtcaccaaaaacccactcatgtccacagtgagtagagtgtcagctacacagccaatgccttcttccaaagaattccagaggcccttagaggccaaatccttctgtaatgattgcactccagaatgactgccattccttttgaaatgccttgttaaacaaccacccctctttccagtagaacttcctaaaaccttaggcttcacctatagcaacatggcttcaagtaaggctcaaagaagctgaaaccagaccagccggatgtttcctatcagtgttgcaattagggtgtggtgtgtgttgaaattaatcagctaatctcaacgtaagccagaggctgtgaccactagcccttcgccagagatctgagtgaccctcatcaaaccccacagtcccagattcctcaatgatgacaaaccaggcccgtttgggactccagcctggagcagccctccctcctggggactaggacatgggttgttgacacattatcttaccaaggatcatatttttgtccaacagacttagacacccacctccctcctcctggcaggggcaacaatgacaagctgtgaggtaccatttattaagcatatattatatggcaggcagggtcctaagctgtttacatatgttacctcgtttaatactcacaaacaaacctctaaggtatgttaccatcatccccctttttcagatgcggaaactgaaacaacacacagctccttctcagcttaaaatccttgcctggctccccagagcctccagatgaaatacagaggctcaggcctgagccacagggcccctcaacacctgcctgctgctccccaataccccactccccacctctctccaacacacacctaatgttccagctacatggagtggcacacagcccctgaagcccagaagtcttccccacgctaggtcctcttcctggaattcccttccccgcctaagaaggaaggatgtgctccctctgcaagactctaatcaaatgtgtgtattcatctcagtactgccaaggcctgccatagagatgtacttgggatttaataaggtggttaactatgttactagctgtgtgacctcgaccaagttatttaacctctctgtgctctactttcctcatctgaaaaagggggatgatggtaacataccttagagggttgtttgtgagtattaaatgaggtaacatatgtaaacagcttaggaccctgcctgccatatagtatgtgcttaataaatgtgacctcacagtaatcgtttctttggtgccggtgagtgatttttgaagatctcttctacgtaatagacaatgaactatgtttaaggtatgctcaaaggctccatttgcagtctgtctcagggatggaaactccttcatcagagtgtaacacagatataatacctgggaatgaaagtgattcacccagggggcttgacatgtgcttctccctagtcctgaaatgctattccttctctctcctcctggcaacagcctgcaagacacgcacgttgaattttagctcctctgtggagccttctccgtgtccttcatggccacattagccactccccacctctcagctttgtcagtggcaggtgcttgcctctgtcactgcagtgtgctattcctccgttcacactgctgcctccctgttataggctgagctgtataccccctcccaaaattcatctgctgaagtcctaaccctcagaacctcaaatgtgactatatttggagatagaacctttaaagattttaaagtaaaatgaagtccttgaggaggatcctaatccagttctgattagtgtcctcatgaggagagacaattctgacacagacacagagggaagcccatgtgagacagagggagaagacggccatctacaagccaaggaaagaggcctttagaatgcaccaaccctgccaacaccttgaccttgaacttccagcctccggaactgtgagaaaatcaatgtttgttgtttaaatcgcccagtcaatgccattttgttacagcggccctagcaaaccagtacacccctcccctctgagccacgtgaggacatttgaggtctactgtattccttttgagatggagtctcacactaccacctgagctggagtgcag

SEQ ID NO: 98181 - DNA, 273853 bp, Homo sapiens
gacatgatcctgataaaactttttaccgagagatacacaaggtgattcttcacgtggaacctaataaacaagaacagcaaaaataacctagaaaaaaacaatgaggaaggttgctggtcctatgagatgttacatgtcgagaacctccataagtgaatgtgtagtgttggcccaggaatagaacaatggaaaagtttaaaatccagaaatcgatccatgtacatttggaaatttagtgattgataaagatagcatttaaaatcagtggtaaaaatcacttctaacaagtggtattttgacaataagaccaccctgtggaaaaggataaaattggatccatcttgcatagtgtatatttaaattccaaatgaatcagaaacccagacataaaaagggaaacctgcagagcgcagcggcttgtacctggagtcccagctattccggaagctgatgtaaggagggtcacttgagcccaggagcttgagaccagcaggaccccatctcttcaaagacttttaaagtcccaaagacaatgtaagtaaattccttgatagaatttgtaagtaaattccttgatagaattgggaaaacttcgctctctgggaatcaagggagaaattgatgaagtgttgatattccatatatatgaaatcttaaggacaacctagtagaaaaatgggcaaaaaatatgaatagctcacaggaaaaagaaaagcaaatggctcaaacatatgaacaaaagattctccagctgatatactgtaccatcgcttacctagagactggcaaaaatccaggagtttgacaacatatactgttggttaggctgtaggggaaaaaggcattctcataaacattgctagcaggaatgaaaaacttagaattcctatggaaggaagttggcactatctagcgagattatatatgctgctttagcaatcctacttctgaaatctccccaaaagtgacacatgcataagacttcattgtagcactatttgtattttgtgtgtgtatggttttcttggggtttccttggtacggcactatttgtaaaaggcaaagattggaaaccacccagatgtccttacatcttacatccttacagtggagtactgtggggaaaataaacacaccaagttgcaaaatagtgtggctagtatgctagcttttatgtagaatgtatatgtactgtgtgcacatatacatatttgaaaatggattacacatggttacttatatgggaagggtgggtaacaaggattggacagggttagattagacccctctgaaggtaccttgttttatagttgtaactttttttttttttgagatggagtcttgctctgtcacccaggctggagtgcagtggtgcgatctcagctcactgcaacctctgtctcgcgggctcaagtgattctcctgcctcagcctcctgagtagctggaattacaggcacctgccaccatgcccagctaatttgtgtatttttagtagaggtagggttttgccatgttggccaggctggtctcaaacacctgacctcaagtggctccacccgccttggcctcccagagtgctgggatcacaggtgaaagccaccacgcccagcctatagttttaactttgaaaccaagtaagtgttgttttcagacacagtattttgggaccactctagtccttgatgacggaaagaaccataaagtaatcttaaaatttctttcagttttatgttagtaaatatactggcattattttgaaacagtgatatgtactgtagactaaatgagtaaatgaaatcaggaaccaagattttcagcttgagaaagagctacaagtataaaaatgaaagtagtgaagcaaaagtccaatctttacatgtataaaggcaaataattttgcaagaatatggttttaaaaaaaccttggtggccgggcatggtggctcatgcctgtaatcccagcactttgggaggccaaggtgggtgaatcacctgaggtcaggagttcaagaccagactggccaacatagtgaaactctactaaaaatacaaaacattagccagatgtggtaccaggtgcctgtgatcccagctacttgggaggtggagcttgcagtgagccaagatctcgccagtgtatgccagcctgggcaacagtgtgagacttggtctcaaaacaaacaaacaaacaaaaaaacctaagtcccttcgctgtcaaatccttaggggagtaaattctgtcatctctgggtacctgttttcctgacttttcaaggtgttgaaaagagccttatgattcagccaaactttccaacagctctgatgggcagtttatcctcactcccactctacccagctctgttcctttcttctcttccactgtgtctgaatttgacagggtcccagtctcagtggtactgttcaaagtgtttataatgttactcttctgggcaatttttgcttcatacgtctccatccaatcaatgcatttcaggtgttgtggcagagagatttttgggggtgctggtacaagcaagacaggaataacccttaagtcacaataaaggcctctgcagggagtttttacattcacttcattttagacatcctcatttccctttcctacatcatgtaatttgtgtgattttttttttttagatggctattcatatgaaaaggaagcaatggaaaattggatcagcaaaaagaaacgtacaagtcccatgacaaatcttgttcttccttcagcggtacttacaccaaataggactctgaaaatggccatcaatagatggctggagacacaccaaaagtaaaattgttgatattgtattatttatattttcagtgatctcatttgaatgatttataggtaaatactaatcagacattattaaaagcaaaacaggaaaaaggtaaacttcttaaatttagttacctataaaaattgtcaattttcattctttaaaaaacacatggacttactataaaagcctttttgtactagtgaaaagaatcttcagctatatagaaataaagttatactttaaattgcagtgtcctaagttttttaaattcctcttactatcattcccaacagtgcccacatttattcttgttagatgtaggtcatctctctttataactaaaggttggactactctagaataacagatgtttacattctaggtaatagccattcattcaataactctttggaggccttttaaagagaccattttgtagcaaaatggttgtagattgtttatgattaaatggagaaaaatcacttcagatgttgaagcaatttttttggattttaagtttgcaggataacgatttttttcttattttccaaacctaggtacaagttagatgaaataaattctgagtaagtcaagttgactttgctgaaatatataacgtgacaaactctagcctcccttcagaatgaagaattattaaatgttctcacatataattctaagctggagtaactatacaaaggcatttttacacaatagcctgatatgttcactccagaaaaaaaacttcaggttcaggaagtaaaggtggtgctaacttcttgcctgtccaaagttgttactagaatggaagccatccgcgggaagcttgttagaacttcactgtcagcgcaggctgagcctctgggactgcacccttctttgcactattacctccagttgctgaagaattgttcaggaacgttgaaacttggaaataaaaagggaaaagcaatgtaaatataggaaaaggctgactacgcattttatgaactcatagctaatatgctgcatgttcacagaaaggcagcaagccttgctaacatggaaatctccaaacatttctttgtaattctttgtaaacctttttaacttaatgtattgctaaactttgttaacctttacgacataactaggattcataatcaatggttccagaaaacttttttattaatatgacatgcttctcacattcttactattgaggattagaaaggctagaagcatgttctaggtgtttttctgttgtattcttttcttgtagggtctcgctctgtcacccaggctggagtgcaatggcacgatcttggctcactgccgcctctgcctcctgggttcagtcaattctcctgcctcactcccaggtagctgtgattacaggtgcgtgccaccacacccagctactttttgtatttttagtagagagagggtttcaccatgtcggctaggctggtctcaaactcctgagctcatgatccacctgccttgccctcccaagttgctgggattacaggcgtgagccaccaggcccggccgtttttctgttgtattctttaaataaagtatgctaataatttcagcagaacactttttaaacttaaaagaacttaccattggtccagctgtctctgttttgatagacattttccgatggaggaggttagctggtttttaaataaaaattaaatcattcaaagtcattgctagaaaatgcaaaaagccttttttttttttttttttttgagacggagtctcgctctgtcacccaggctggagtgtagtggagcgatctgggttcacgccattctcctgccccagcctcctgagtagctgggactacaggtgcacgccaccacacccagctaattttttgtatttttagtagagacggggtttcaccatgtgttagccaggagggtctccatctcctgaccttgtgatccgcccaccttggcctcccaaagtgctgggattacaggcgtgagccactacgcctggccaaaaaggcattttttaaaataagtgttaaggtattttgcttttctttctttctttttttttttttgagacttgcgctggagtgcagtggtgcaatctcggctcactgcaacctctgcctcctgggttcaagtgattctcctgcctcagcctcctgagtagctgggactacaagcgtacaccaccacgcccagctaatttttgtatttttagtagagacggggtttcaccatgttggccaggatggtctctatctcctgacctcgtgatccgcccgccttggcctcccaaagtgctgggattacaggcatgagccaccacgcccagccagtattttgcattcttatactttaccaggctagtttcttgtaaaacaaaactgctgaaaactaagatgccagtaatttacctaattgacacatctcttcttgtataaaacataaaccaaagccgaacaactgtcttccacacaagcaaaccaaaaccatcagtaagaggggacatgaaacagcccccatgctgggcactccagaccccactgttagttcagggcaatgtggagcagcaacacctgcccaccacccagtcctgtcaggactgaccattagctttctaaggatgtatcacctcttcctggctgggccaagtaccttacttatctttactaagtatatatcaaaatcataatgtacaataaattacgagaatattcttattagctcctttacaggaaaaatcatctaatgacaagaattatgtattaggcgatacgttccttcccatcccgtttttgtttttaaccttccattaaatataaagctctaaaggactgaaactacttagccttgctagcaagagcagtgaccaaataacctgaggtattatgatgtttaagattccaagaattttatcacaatacaacacagtttaatgttctctctcatattactttgaaatatgtaggcataaagacatacttttaactgaaagataatacaaatgtgttaaagaacaaactgtcataacagtgttcagtgtattgccaaagtgtttgagaattacagtagtaaagatgtcccgttgccagtaaaaacagacaccaagatgtcttgaaacagatagataggaagtatatattgctttcctgcatgctttctttctatttgaggcaaaaagactaaatttggcccttgagtattgtggaatttctagcagctgtcacccttattctgaaattataaaacgaaattaaataagcattttgtagtgttaatataaaatatgcttttcactattccctctagggtaacaaagattaaaagcaacagagatagctgtcatcaggctgttctctacttatccattgactcatttagtgcaaaacacattytattaatagtctttattccatatggaaaagtacagtagttgtgcagaaacaaaactaacaaaggagtaagactttcacaaatattaaagaaaataaataagccatagtagttacagcaaaactcatggaaagcctataaaaatgataaagctgttcatacaaagtacaattgtacacacaggaacaaacgttgaagaatgacatcagaggttcctatttgtacaaaaccataatgatgttcacaggaacttcattacaacaattcactttaaaacattctgcaaatatataacttccttctcctcaattttagaaaataaatttcacatcccaacatataaaacagatacactcctacttctctcaaattagcaytttaacatcttccaataacacaccattttcatataaaaatacctttaaaccaaggttcattcctgtaccttatctttacaaatgaataatacatcagagcttggacttaagtagcacctcaaaggtgttcatataaatgagataaagtgctgttactggtatactgttaacatgccctaataatatatcattcagtgcaataaccagcatggatgaagcttacagagaacatgcaaatcgtgactggggttttcttttttgtttttagattaactacattgaaatagttctatttacaagtctgaataaaactgggctatttaatatatacaacatgtgactataaagtactaattgtacaacaaaacaaaagtaacaaccagtcttacctttagtatctgaattaaatattgtccttagaggagcttggaaggattgttccaggagcactaccattgttaaaagcagtttggaaaccaggtgagagctaatttataagcgccactaagaatgctggtcttagtattttagcttgaatccacttgaccaccaatcatgactccaaatggcttatactgtttccaaatatcaaaaacaccttcaagcacaaatataggttccaaaagtgctataaaaatatatgaataagaaccataacacagaaataagtgtttaatccctttataggaactgctatgaagagaatacttaggtgttctcatattctgcttaaaaaaattggctgcgtttacagtcgcacttatatttagctagaactcactcagaacttaatttttatgtatatataaaatgggatttgactcaatggaactgtaactgtaaaattccatcgtttccagaatacatcacttggatgtacatcacttggtcatgagttaaacctgttactcttgaacaatagacatatttattctctaagtaagttctgtgattctaccatatagcaaaggcaaggargaaagtggcaaaagccaaacaatttcataagtgagagtcattaatgtcttctgggctgtcttaaaattttaagttgatataattttcaattctgtttagcattcttatttatggtgatttctagctattaaagaagttttatcccacattttagatatatcaatggcatcagatccaccccaaagaaaaaaaatggctaaaaaataatttttctgatgaaaaaaactatttaatttaccaccaggagtcaacacacgtttccaaattccacaaatggggmtttcttaaggttcacacatttgactctataaatgatcgctttggtttggctgcagtgaggtggctcctgtgggcttcattactaatatgaggctgctgtttggagatactttcctggtacagatgagaaacagtcttagttatcctgttctcttgagagtggactggaatttggcacttgctttcttctagctccttcacttgtgccccattgtggacacttgcactcagggtagaaacagaacaggttttggcttggttattatatcctcccacttgcatgagagagggcttctcagtgttagcagactgcaggccagctgcagaagacgtgtttgtcagcagcccctctggtgccggacagtgccagctgcggcttggaggattgctctgctgttggaacctcgcagtcttatccatgatgcccatgaacggcgtgttgcggggtctgtgctcagctgtaccgctctgaacgtgggttacaaccttgtctttaattctagtatctggtccttggaccttgaagccatctgaaaaactgctgctcgaagtcaaactactggttgaacttgacatctttatgctgctggatggagaaccagaagagcctgagctggtgagggaagctgggtgtcgcacgtcgctgcaggtcgccagcccaccttggtttggaggggctgcgtccacagccacggaggaatgagacagaagcctctctgtggttttcgtcttacttggtaaagggtgtgcagggccattctcaccacactgcaggcggacattctggctggggcccagccgatccccaaagtggccacaaccagctcttgtagtgaaagtaccygttccctctaaatgctgggttctgctcccagcaggagyrgcagcgattctccctggcatgggacttggaggagggttctgagaagagatctgaactttcatactgccatttctcactgccgactggccagagcccaggtgctggctggttttcacgatctgggcctgcttggagggctgcaggagcagccctggctgggccacaggctctctcagggacttgccgattcctgccctgctctgtggcgataccggccttcctttggactgtaacccttcttgaaggtttcggatgtatgaggaagggacagatgaggatggctgggacctgggagttggggaaacagattcttcctggggagaagtttcttcctcttcagtctcctcagagtgaaagtggtcacttaagccaggggttggggtgtcctcttcgttctcggagtcgttgagtggagctggtagcgggccctgctgtttttgctgttgactcctctggagttgtttgcactcctcttctacgcgggccagaagcctcttgacttcctgattggtgggacagagtttcacagcctcttgcaggtcagccagagctgccacgaattgcctttgtaggaaaatgtaaggtaacattacaaaccacacacgaacatgctcagagtgtaactgttcataaaagagctgtgctcaaaggaaagagaaggtagcaagtgagttttgaacacttacggtggtggccaggacccacttaaccagcccagagtaactcagctaagtggcagtgctgaattctaacctaggtaggtgggactctacagccctgctctccataaagaccactggrctgggaatagggagaagcatgaatcagtgggcgccagaatctttttaatattgttaccatcccrtggtaacactgtgcccayctctcagtcaacaggcttatatcactcttccccacctctgaacttcctaatgtccctagttggcagtttccttgaaatatggactaaactaggtaggaagttcatgttgcagtaagtttcacgtggggggaggggtgggaaggaatgattattgagacgtcaggagaaaatagaagtttactcatcactgataatgtccactactatgcctcttggaagcaggtagtaatactaattcactactaaaaaggatgagaggcacctgagcaacacttctgcagcaaaacctccccaaattcaacaggcaggtttgatcccacaagaaaaaaagctctagacacaaagataaccacagacggtacctgctatttctcttcgctcttgctctggcataaaaggcttcataggacttgggcttcaattcgagagccttggaagcaaattcctctgccatgccaaagtcctggtgtcgacaagaaatacaggagtcagaagcagcctggacacacgattgtgggaagcccgtctagttttgttctaaagggtagcagcgctctgaggcacagccagagagggaggaagggaaagttccgttttctatcttgttttaaagtgaggagataatgatggttgattaatatcattaggagaagaatccactatgaaaacagtggtagtaacagtgccccaagaaggccagatggtggaacctcacagcccggtggaggggcagcctcagagaggagcgcagacactgcatctattccggcagcagggcacagaagcaagcagctcaacagactggggcaggaggacacagttaaaaaaaaggtaggaagtactactgaaacagatctactagttacaaatcgactatgagttccccacgaccggttacaaattagttactggcagaccctctgagcaaacctaacacagaaggcaggcccaccacaataggcttgggttggactctcctgaatccggggacggcagtgccagcagcaacagtgttgggaagctgcagaggagcagactgcatttgcttctcattactgaggccaaggaaacgaaacccaagtgcattccttcaacatcatgcgaggagcgtagcagccgtgaccaaacgatagtcacggataggagctgtttcccacatgccaggttcatgtaaatgtgcaagcaaattggacaggagggcccaggatctggtctggagaagggctggccttcacygctggagaagggctctgttgctggaagactgggttggaataaaggggcacagcttacattkgtttttcttcggcatcgcgacaaattgagatagagggaaacccttaattcattgaagggtctcatgtcctctccgaatccttctcgaggaaactttcttaaggcatactggtacctctgggctgcctctttcattttccctttctaggattcaaaaatcacaaacatttgtcctttttcagaggttctaaaatgaataactcccacaccyggaacaccgtggggagtttactcccccctgcaaacccaygacagaacattgaaagcatccaaacaagtgtcaaggtgggagctagttcactaactgggctggcacatgagggcttcactgtcctcacatgcacccgcatcctgtggttacacagtgagaaagaagctggttttacaataaggtgtctgtaaactgctagattgataattaccaaacttaatgaatcagattaccttctggtatgtatttttgaaaattatttcaagaatgatctcaaatctatttgaatgctaagtgtaatagaaatcagatgaaaaactgatcctattcctaggacaagtagcatcttgtagataaacctagagagcttgctgcagaataataatttttcttctaagaggaattaaaacatgggctttaaaaatcagaacagcaccacacatcattttcaaagctaaaaaaatccatttgctcagtcagtcccattgcacagcaggtatgaagcctgttgaaaatggcttcctatttctgacataattgcctaccaatccatattaaaagcacttcaaagccacaacaatacacactctcaactcaatttcaagctgattccaagccaggaaccctgctgggtcatgctatattgcctatttatttgttactattttaaaaaatgagaaggaaaaaatctacaacataccaaatacagctgcctaacagtaaaaaggattaacatggtcataatctagtttttcccctataatcttttaattctgtctaatcacagagctgcaaagaatagtgacctatgcaaatggcctgcatatctatctaaaccaggggttggcaaactatagcttggatactaagtctggccagccacctgtgtttacaaataaagttttattgggacacagctgtgttcattcactctgtgctatctgtgcccccacatcagaactggggagttgtgacagaggccacacagtctgcaaagcctaaaacatttactgtctggccctttacaaaaaaagtttgctgacctctgacctaaactgatgtcttatttggaaaaatttaaagtgaagtttattgatctgtaaatcatatttccatttccaagggaaaatggaaaaaattaattcagtcttctgagtaactgaggtattacttgactgtattaagtaaaaatctctaacaacactttcaaattctagaaattaatagatattaaaaattaggaaaggcttaggagacagaataacccttttcttctagaaatgtctgctgggtgttcctctcccacgtctcatgactgtgcctcagcatggtgttctgaactcagaatgtgaagggctgaggaaccttctctatgatgttcagttgacctagaggtgactcagcttcacgccatggcttcagacaggaagtcaccactacaacctcaaggattagctcagaaataatggctctcagacacaaagagaggtgctttctacctttaagattctgccggaaagatattaagccaacaacgggcatraggccaggtcagcacctcttggcactttttttttttttcttctgagactgagtctcactctgttgctgaggctggagtgcagtggtgcaatctcagctcactgcaacctctgcctcccagattgaaacaattctcctgcctcagcctcccgagtagctgggattacaggcacctggctratttttgtatttttagtaaagatggggttttgccatattggcyaggttggtctggaattcctggcctcaagtgatctgcccacctcggcctccaaaagtgctggagttacaggcgtgagccaccccacccagccactttttgcacttctattacatggagwctgtgcagtagcacagctgyagccattatgtacccaattaagagggtgctcccaggcagtttcaatggcaaagaaaagggcggaaccacttactttgtacatcacatttccttcctccattaatttctgtaaaagtataatcaagatatcaggtttggaagtggccatcgcccaagcagcatttcctgcaaaacaaacacgcattcagaggcacttcagaggccctgcggaaaggatcccaattcctccgtggccccacggctggaggtcagcaccagcaggagcccagctgcaaggaccacagcacgatgagggagggagcaggacgccggcgaggctgttgctaatcctttcccactgacctgggcactcaaatctgtccttgttattttactgaaaaaagtaatgagaaacgaaggcatccgagcagcgaaaactcattcctcccttccgggtgggatgtggggaaaattaattaaatgaggccttagcataacctcctcagttcctgcagcggccaccgtgcaggcatgtgttctcagcacgcagtccctgtgctgtgtcatctgctgtactccgagatgtcatggcttctctctcctaccctacagctcggccacaacctctctaacccctgcctgagctctcgggacactgtgggaggagtgctgaagagcacagccctggagccagctgctaggtccccacggcgagtaccacaaggcagtcctgggggaagccatttagctgctcggtgccttggtttcctcatctgtaaaatcatgggattgtcactgagactttcagggctgtggtagggattaaggcagagggcraaactgcttggatagttcctggcactattcactgcttgacagtattagtgaatagcattttcatcacagtgccctacccagagctgctcctgaccaagggctccatacatcaaaccaaaatagtgaccctccccacatctggaatggtgtgtttgtgtcaaagccagccacgtggaaagggctttccctactcagggtcccccacacaatcstcaagtatcgtcctagtttgtctccatgaaatcatactactacttcttcacagaaacttgctgtggtggccatttccccacacagctgactggtggctctagaacagtggctcagcctccgctgctgctcagagtcacctgggggagctttcagcagcactacccggccccaccccacagcaagaggctgtggttcctctctggcgtggttcctggccactgataccactccagactgtccttcaacaccagcctctgctttccacaccctccccgcagaaacaccgtgagctacttacacattgtgtataatggtgattaagtgagactgagacagagatctgcaaacatctgacatcttacttcctaacctgggagcaggtcactctctgtgctgtctaggcttctacaatcgggagctcaccgctcctcctgctcaatggaggcagtgctcactgacctaacttggctccctttctgagtagcgccaccactacagatgtgttccggcagccgatggctctgtccaagggccgcatcccgctgtggtccacatgctcgatcacggctcccttctccaccaggtacagcacctgcagagacagcagaagcctaagcagcagctgggaacaggagttcaggggcgcacacggatttaggggtgggcagtcttagcttcactctgattttagatgcctctgcctattaaggatcctagactagaaataaagtggacacgaaacagagaagaggagctgcaatccacagctaaaaccttcactgctgaagagattttgctgtcagggatgaggaaagcaggggacacgctaccacaggtgggtgtgtgcacacatgcgtgatctgtctctgtctcacaccacttcccaggccacagagacgggacatagtcacctttgcatctccaatgaagtaggcagcagacttcttcaatgagctctaacaaatgagcaggccacagcagtggtgactttagaaatactcagacccacacaacctgtgcacggcagactgttaagattggcagcttgggaccggatggacccgagtataatccacttcaaagagatgtgaaggaaatygggagagtaaagatggcaagtttgataccacggtacaaagactgatttgatgtgatataatagctgtcagttgaaccaaactggaaacaagaggaagaaatactgtggccactaaaatttctccatttactggagccattttagcctgtagccattttttagcctgtggctattttagattttcatgtgaatctaaaaatatatgcttcctatcatccaccccattattcaaaatgacactaactagagggattatctacayaaagaactacaacccaactacaaaaaccaaataacctcatctttagaatgggcaaaggactggaatagatttctacaaaaatgatcaacaagtgctcaacaagcatatgagaagatgttcaccttatacccattacgatggctacaattaaaaaaaaaaagctactattaaaaaaagcacctcagacatgcagggccatggcttccactgcmaggtctgcaagcacctgtctgtccagctagtccttccacaagtactggctgggcgtgatggctcacgcctgtaatcccagcactttgggaggccgaggcaggcaatcacctgaggtcaggagttcaagaccagcctggccaacatagtgaaaccccatctctactaaaaatacaaaaataagctgggtgtggtggtgggcacctgtaatcccagctactcaggaggctgaggcaggagaatcgcttgaaccaaggaggcggaggttgcagtgagttgaaattctaccactgcacttcagcctgggtgacagagtgggactccawctcaaaaaaacaaaaacaaaaaacaagtattggtgacgatgtggaacaattctggagcccttatgcactgtgctatgaatgtaaaatggtgcagcagctgtggaaaaaaagtagggcagttcctcaaaaaattaaaaatacaatcactatatgagccagaaattctgcttctggatatataccccaaagaactgaaaacagggtcttgaataaatacttggacacccacattcattgcaacattattcacaacagcaaaaaacatagaagcaacctaagtgtccactgacagatgactggataaacgagatgtggtgtatacgtacaatggagcaatattcatccttacaaaggaaggaaatgctattctaacacacgctacaacatgggtgaacctggagaacattatgctatgtgaaataagccagtcacaatgagacaaatactatatgattctacttacatgagatatctaaagrggtaaaaaaactcacaaagtagagtggtggctgtgatgggctgggggagatggagagttgtttaacaaatacagtttcacctttgcaagatgaaaagttctggatactggttgtacaacaatgtgaatatacttaaactactgaactctatatgtttagaaatgattaagggtaaattttatgctatgtgtttttgccacggtattaaaaaaattatgttggaatgctaagctccttcactcttctctaattttgataaactacacaatgtgggaaggtagctgaaaaataagtgtagacatgtgagatttagttgagtatgtttttgaaaactgacatgaagtagagtttacaaggtactgaagtttataccattgaactctgacagcgctgccttctaaaagcaccaaggcacagaggtacagggccatggcttccactgccaggtttgcaagcatctgtctctccagctagtccttccattagatgtattgaattaytggaaactggtaactctcatgtagctgacyatttctctggcacctgctgggtgcctgggacatggagcctgataaaatcagtttctgccctgaaagacatttcacggttctcagtttatcaaggttttattccctcaaacctcgattagacatgggcatttgrcaaagagataaagatagtgcccaaagctttccatattatttttaggcaatgccatatcactttaaaaacaaccagtatatgtacatgatgaaatactatgcaggctttaaaataaggaaatcctgtcattagccacaacatggatgaagctgaaggacattatggctaagtgaaataagccaggcacggaaagacagcatgatctcacttatatgtggaatctaaacaagttgaactcacaacagaagcagagaayagaaagaggctgggagacagggggacctgcggaaagggtaggcaccggtcaaagggtacgaagattcagttagacaggaggagtaacttctggtatctactgcacagtactgcaactagaattaataacttttatttattatttttttgagactgagtctcactctgttgcccaggctggagtgcaatggtatgatcttggctcactgcarcctccacctcccgggttcaagtgattctcgtgcctcacccttctgagtagctgggattacaggcacccgccaccacgcccrgctaatttttgtatttttagtagatactaaaatagtatctactagttcrcttgatctcgaactcctgacctcaagttcgcttaatctcgaactcctgacctcaagtgatctgcccatcttggcctcccaaagtgccgggattacaggcatgagccaccgcacccggccagtaatgtattctttatttcaaaatagctaaaagagatctcaaatgctctcaccaaaaagaaatactatttgggtgatggatacatgaattagcctgatttgatcattccacaatgtgtacaagtatcaaaacatcactgtaccccataaatatacacaatcatttgtcaattaaaaataaaactttgtccgggcatggtggctcatgcctgtaatcctaccattttcagaagccaaggtggggtgatcacttgagcccaggagttcgagaccagcctgggcaacrtggtgaaaaaccgtgtctctaaaaattagccaggtacggtggtgcatgcctgtattcccagctactcagggggctgaggtgggaggacctcttgagaccaggagaacaaggctgcagtcatcacaccactgcactccagcctgggcaacagagcaagactgtgtctcaaaaattaataataagccaggtgcaggggcttacgcctgtaatcccagcactttgggaggctgaggcaggcggatcatgaggtcaggagttcaagaccagcctggccaacatggtgaaaccctgtctctactaaaaatacaaaaattaggcatggtggtgcatgcctgtaatcccagctactcaggaggctgaggcaggagaactgcttgaacccaggaggcggaagttgcagtgagccgagatcgcaccactgcactccagcctgggcaacagagcaagactccatcttgggaaaaaaaaattaataaattaaaaacaaaacaacttaaaaaaaaaaagcaaccaggtagtcatttgattagtcacttaccatatataaaagtagtttctaaatgatctatgcaaaagttttatttatatggatgactgagaaaatcacatatgcacatgtgtatgcatattcacgtatgtgtctgttgtatgtgctatttgcaagcaggtatttttaagcttttaagagtcgactaaaatcttaaktcctggaatagactgcatgtcacagaattagagaaaaatgaaagatccctgacaagacacacacacacacacacacwcwcacacacacacacacacacacwmtctgatgacactgagacacaacctcatgcaggccctggattgagctgttcacttcctggggtttctttccaatgcaggtggaggtggggaacacctgctggtactcacagtctcggcatcgccatagaaggcagccaggtccaagggtgtgcggccattcttgtctgtctggtctatygcagctccttcttcaaccagatactggaccactgccctgtgacctttcagacaagcccagcttaatgctgacagaccctctttgtctagagaagaaagggctgcacctgaaaggaaagcccattcacagaacatgaacattatgagatgacaaagccagaaagcaaattgtttcacacctgcggaacacccggcctgaaccaagtgtcagtcaagcactgtgaagggtgacwctggccggatgggctggcagaatggtcatcgctgctgaagaggaataccasgcatgtggctgtgttgcctattctctctactgtttattagaaaatttccattaacagaaaacttagaatttgaatcagaaagcactgaatgggtctgctgaagttctctctgtgtccgtccaaaagaaacctttgagggcatcacgctgctaccttttgaaaggaggaattccacggtgctcaagtgcccttcacaagcagccaccatgaggggcgtccggccttgcttgtcacttaggttcacatcacagccgcgttccaacagcagtctaacaatctggaagagacatttggaattaccatcctcctgctgcattttccaccacacctgctatacccaggcaggtttctcaacctttaaaaatagtcaaatgactttctttcaaaaatctgtaagttgtgtgaaccatggggcctggaaaatctttccactgtattcctttgaacagaaccttttccaaaatatgcactctttttaacatgcccaattcattgctgttatcaactaaatatacacataccagagagaaatggtaatttgggggaggagggatgccaatcactatctacaaggacaagacagccacaggggcgtgggagaatgaagcataactaagaggggcgagcagcggtcatggggtcccccacgggcactgaaactaagtacctacagctgagtgcagggcatgagggggtcgcagaaagaagctcgcccaccacacacccaagccatgggctttcctaagatgcagcattggcggatggcatgcccttcggggaaggcaacttttagcaaagcaccttgaggagattctcagccctagaaatatgcctttcaaccaygcatagtcataagtttggggagaaaaaaccctagaaaaccagacaggggtatcccatcaccaccatcccagcaggaactgcttcacccgtagcttagcccatttttccccaacacatcacctgttacatggccgcagcaacaggaggcaacacaatcccactgccttcttgctcgtttatccactaacaaatgctttccaaaattccccgtgacttaggacacagcagggccaggaaaggattagccagatgatcaaggtgaagcagtgagggtgacagggaagagatggtacaaaccaagctcttaggaatggaaaggggagaagaatcctgccaggaagcactcacagctcctaccaagggagccagcaggcatcagcagagacgcgattccatgaccaaaactttggtctagaaaattcttctttgtaatggtcataacatcctttgcatccatagtgtatgtgtaacttggtgctaggtgtagggtaggtatgtggtcactgtttacgaaatgaaggagcaaggattccctgctcccttgaatgaaccacaacaatacatcatttcatagtaaaaaaacaaaacaaaacaaaaaccaaaaacaaacaaaaaacccagcctgaatcagtgctggaccagagggaaacattttcttttccaaagagcacaaaagaactgctcttcttccaagtatgttggacaaatgcgtcaccaaactacaacagcacatatgttaaagcaagtctcctgttaacacgatgaatccacccactccacttccctccacagctgaaggcagtggctgtgtctctgacctggatagctcagccttgagcagccttgctccccagcctaygtggccaactgtgttatcttgtcaaacgtggctctatcaagcagtcctgatgkcacagcagaagccgaggatggggaacagacaggctcaggggagctgcattgtgttctcaggggagccaggcaatagtgaactccatcccsactcattgcttctgaagcattcaggggccccctgggtacctgccaatgcccctggcgtgctgcacaaaacaaaggtggaacccctctcctgtttgtccgcgacacagcagctccatgccccagcagcagctcacagacctccagcttccctcttcctgcggcggcagtcagggctaaaggaaagtcacatggaggggaatctgttagcatgtggtggagcacagatagccagaaattctttaacagttctctcccccagtgggagatggggtctatatgtcctccscctttgaacctgcrggggctctgtgacagctttgaccaacagaacacagcagaaccaattctgtgtgcatgtcaaggcccaggtcctaagagatgggctgcttgcacttccttgaacactctttctyggagcycggatgccatgctgagaggaagcccaagcagtcctgtggtgagacccacagagagaagaactgaggcctgggcatggctgccagttccagatgggctcccagcagacagccagcaccagccagccagccacatgcatgtcccatctggaaggggatccaccagcctgggtcaagctgccccagctaaagccatgtgagcagaggtgagccatccccaccatgcccggccyaaactrtagattcagaggtggctaagttttgtttttgtttttctcaggaagagataaccagaatacagtgcaatgcaaacacaggttggtattattgtctagtttggcctcttaccctaaaatcataaaatttcattcaacaagaataatcactgaggcagtctagagtgcacgtcactccccccttgttaaagaatctctttaacaagtcaagattcagggttaagaaagtcaagaaagaaaagaagatccaactgtagagggcccaagtgaacacgctggcccagaggcagtgagctgcccactgtcgtggtggtgctgcgggaagtcagctaaggatgaaagaaaaatggcatgcaaggagaaaggacaacgaggcggggtactcacgacaccctcccgtcagcctgggcatccccactccccgattcttaatttgggggtaataagcagggggtgtagttcgaagagttgcttctgctcatcgcaagaatcaytgtctagagaggaggacggaggaggtggcagaaacaaccccaggccaggatgatcagctctttggtgggaccagaggccaggaaaaggctgagtggcgagggatggctgttcctctggagggaggaaggagatggagcacagcaccctggctctattcccagcacgtgcctgggatggctctgtttctaaatacagcctcgaacctatatatttccagtttccagaatagggaagtcttyttacaagtcagtcaggcagacagacctctcaggctgaaaatggggcaacacaagaacaggccttcaaaaggtgtggtccccatgccagggagcctatgaagagcaccaagccccattagtaaccaggctcaytaacgagagatggatgcggaacaacaggaaagcttgcaccctgctagcagaaaggtgcatggtggctgctctggaaaacaggctgacgctacgagtaagttgaagacaggtgtatctccccacccagcaacccacttgcagagatgcaccctgcaggcactctcaaggtgtaccagaaacacaagcaaaaatgctcaccgcaccccgggctgcaaacaatccaaacaaccatcatcatcatcattagcaagcttcaagaaagtggcatagtcaatcagcagaacactacatgtctacaaraataaacaccaygtggctaaacacgactgaccaagtcagtctcacaaacttaacaaggattgaaagaaaccaaacccaaaagaaaacacacagaggattttgttcatacatagttcaaaagcagagtgccacgacagccatctcgggagagggtcatctgtgggcttccgattagcaagggygggacctggtttgtctcctgcgcaccttctgagctcgggtctcagagctaagccccgggagccaagggctcagtgatgctggtgtctgcacacaccccttggtctgcctgtcttctttgacacccctcagagcagctaacagatgcctgcttcctctggtgcctacaataatgcccagggaagctgggagtctgttgctgatttgtgacctcctctggtcacacyagtcagcatggccatggtttaacctccaggagccacataaacaaaaggcggcaaacctgttatctccctgcaagaaactagctctcctactgaacagtctctaccgactgtccttagggccatggtgcagtgtggctggcaacctcacctcttcacatgtcacagagaggtagccacatctctcccgtggatcacctgagctctgcgttctatctggggcctcgtcaccggaaagtgagggagtaagcgtgrgcagcaggcaktcctggtcttgtggacctaagaatgtaagggttaggtccaggatgaccatggggaaagcatccccttctccatccttccagaacggtaaggcagctctcacttcgcttctggtcctcagtcagtgtggacctcagcagtgaggggaacttcttcagtggcctcatcacagaccagcccctcataagagtttacatggcagcccagggagctcagggccagtctgtaggcctggctgattccgaatgttccacgccctattcctcaccacccagatgatggcctgtttcttttcagaaaggaggccaccacatttctccagaaaaatgcatttaaagggctctgtcctgttggatgtcctcaagcctcttaatctatgtttgcagcagacagcactaaagcggtggtggaccagaggaggtaacaagtcaggagctgattcccagctccccaggccttatctgagcaccagagggagcaggcatctgccagctgtcaagatgctctgacacctgatgctacaatatttttccaagaggcstaacaacttcagttctctgtggtagaacagtccttcacatgcactgggacatagtcccttgcagctctccaaggaggtagctggtaagccgagccaaggtcctcatgagaagtcagtgctggtaccaacatgtgtgttcagtgagtcaccctagtggagggcacagggggcctgtgcaccatggttctcagcaggtgagagactgctcagctctggagtcccaaggtccaggatgtaacacaagacaagacacctgaagatatgatctagtcccagttgctatgtatgaccttggcaaatcctcaaggtctgtgagcttcagttttcccctgcagaaagctaaagagttgagcctgaccagagttatgaagaggccaaagtttccgcaaatgcttagtccaaatttcattttttaaatgcagcttatttaaaaatttgtaacaaacacaatacccaccccccacccaaccaccacaacatttgctgttactaaattcccccytttttttttttttttgagacaggatcttgctctgttgcccaggctggagtgcagtggtgcaatcttggctcactgtaacctccacctcccaggttcagggattctcctgcctcagcctcccaagtagctgggattacaggcacgagcccccaagcccggctgatttttatatttttagtagagatggggtttcaccatgttggccaggctggtctcgaactcctgacctcaggtgatctgcccaccttagcctcccaaagtgctgggattacaggtgcgagccactgtgcccggccgctgttactaaattctaataccttggggcccagcgcattaccatgggtgcccagaataacttatcactgggcagtctcataatagtgcttttcctgtcatctttctagtcagataatttcttagaactacaggaagagccgttcttaacaaatattgccatctgcatcactgatctggatgacgaagtggattctttcaagacagtgcaaccagaacaaaatactgaagggcagggatgctacagctgatctggactgcaggtaccattcatatttgtgttatgcaaacaggcccattgcccttactgagcagacatttaaagttcatctcagcgtgtcggtatgtaaaactgacataaataccattagcagaatggtatttatgtcagttttacataccgaggcactgagacagaggtgggggggttcccatacctaaaatgtttggaaaccagggtccaatgtgatcctatctatactctgagaatctacacaaaccagttctggtccctgctgtcccaggaattctcgctgtagtctcttcctgccacgatgataacgttaatgattcctactaacataaggcttggggtactttcatattgtgagagaccagaatatgccaccccaaaatatgccttttcgcataaagattttgagttgattattttgagagactgcagacacaggagatatcccaaaaacagataagttatcctcttgtaagacaaaattcatgggtgtcttcctttctattaccaagaagagaaggatgactacatcactagagatttctatcagtggagaatctggctctcaaaccttacctttgttaactgcttttcttgggtacctccccataactggccttccccaaaccatttatctttgtttcagggaaattttttttttttttttttttttgagacggtgtctcgccctgtcacccaggctggagtgcagtagcacaatctcggctcactgcaacctccgcctcttgggttcacgccattttcctgcctcagcctcctgggtagctaggattacagcatgtgccaccacgcctggctaatttttgtatttttagtagagacagggtttcaccatgttggccaggatggtctccaactcttgacctcgtggatctgcctgccttggccttccaaagtgctgggattacaggcgtgaaccaccatgcccagccgggatgatggtttttaagcctaaaatctaagccacctcttggacactgactcatttctctgggtatctcccatggatacaacacaagatatacctactattcaacttctgtttgtgttaatctgtctttygttgctgcagtctgtcccaagaactgtgaagggtagggatgaagtgatttcttcctctcctacaatatacattttctggattgatttgatcgtgaccctgaacacgcatgattcttacgctagaagatctgggtattgaaccactacctggatctgctgctgctctgccattttcctctaggcaaggaacaactccctcttcctcctctccctggttgaccagaagaaggaatgaatcaaaacaaagacgcatgggctccacgcagaggcagggcctttgcatgatgccatgcaaaggaataaacacaggactcttccatttgatgagatctgaagcagccaatccaccacagcattctgctcttttatttggtaaacaagcttcatctacattataaacggggcctttaaatcaggatttctgttaaagctgctactgaatttttgcaacagcagcacatcagaaatgacagtccagcactaaaaatagggacctctgtttcacaggggcatcagagaaaccacaagttggagcaactgacaaggggcgagtgcgccaccccgggcatggcaactgggttggaccctgtcctccttttccttcacaacccttgctatgtatttggtgactccctcttgaggcaactaaaaacctgtaagcacaggcagactwtgctcaggcttaaaacagatcacgttctacacacaaattcctgacaaggctctcgtttacaaatgatgcagacagacaacaagatctgtgttttcctttttctaagcagattgagtattctggggccatcacggcgaactcctgaggctctgccattttcaggggatctcaagttttagcagccacagggacttacgaacacaagagagactgaagaatagccacccacatgcttaagcaaacagaaccatggctaaattatgctcaggaattccagctattctgctgcaaaggccgacctctggtgctgcccaccaggctccagtgagggttaatgcaccccacctgacccgaaggaaaagagggcaggggagggcaggagaagagaatgccttgctatgggcagtaccttgccttctggccaatgaaatacaaagatggagaaaaaaagacttggtatgaaatgggagctcaaaaatcaacgtgaacagatggcactttttaggactcaaattggacacaatttcttctagttgtaaaatccttaacaagatggcatttgtgaattagattcccatgaaagcacatacctcagcaacactgtcctgtcttgagaaggcaagtaggtttgtaatggcagacgttcattttaagaacaacctgactggccaggtgcagtggctcatgcctgtaatcccagcactttgggaggctgtggcgggcaagtcacctgaggtcaggagttcaagaccagcctggccaacatggtgaaaccctgcctctactaaaaatacaaaaattagccgggagtggtggcacgcgcctataatcccagctacttgggaggctgagcaagagaatcgcttgaacctgggaggcggaggttgcagtgagctgagattgtgccattgtactccagcctgggcgacagagcaagactccatcttaaaaaaaaaaaaattaaaagatcaggcatggtggctcatgcctgtaatcccagcactttgggaggccgaggcgtgcagatcagatcacgaggtcaagagatcgagaccattctggccaacatggtgaaaccctgtctctattaaaagtacaaaaattagctgggcgtgatgacacattcctgtaatcccagctactcgggaaagctgaggcaggagaatcacttgaacccaggaggcagagcttgcagtgagccgagatctcgccactgcactccagcctggtgaaagagcaagacaccatctcaaaaaaaaacaaaaaacaaacaaacaaacaaaacctgacaacaatctgaacgtattggaaacagcagtgagagagctttttgcaccataaaatggatggtttgcaggaatctcttatatattaaagttctctgggaaaagatttgatttgcaaaaactcaattgtcaacttgccggggacacagtcattccacaaacagggctattcstaaaattttaaagcagatctgtcactcaaattcacaggatgtgctccccaggctcaggatcgcttggcttacagatcacaacaatgggtctgtattcccacccacatttgcttttggacccaacttgggggcttggagagaagggcggcagggtcagcgcacacagaagctgcttcccgctggcagactatgaccttttcatgcattacccacggatgtatgaaaaccattctgcaaactggaactgagtacctccagagaacagcttgtacctgcagaacccacttcctgctagctgagagggcactgcgggcagggcagggcagggcggctgggctctgcttgtatgcttatattcacatgtgcaatttacttgcttgtattcacatgtgcaatttacttcctattatcctggcctctcccatattttaaaaaatgagtggaaaatgaaaaaaatgagtgtcaacattaattgaaagcagcagggtcctcacaaatgtcatctaattgtggccaaggtgagaactgtgagatgtggtgaaggcagtgatgcttgaccctcagtggcaggcccgatggccacaccctgctcaactgtaaaggcagagaacaccaggaaagagtgtgcctgacacactgcacatttctcagctactttatctcaatggtaaaatgtaatgagggattttaggattttttcttttttttaaactctgggaatgactgcccaccctgccttggtaactgactctaagtggctatatggcggctgaccggtcaggctcgctttgctgccactgggagctcggccgtcacactgagggcctcagggaagctggcccccacattccctggctgaaagcagcaacctttccccaaaaggccaggcaatgtgccttgcctccccgccccaccttctagaaataggactaagatttacagaagccaaatttcatagcttcactgtgttctttgttaggcatttcctcccgtctctgagcgaggggaaggcttctattagaaagaagaacatactttccaagagctataaatttttcacctctacaaagacraggcagttatctaacctaatcctcaacaatttaaaggataaaatgaaaggtaatcaagatggctcttccagaaaactgtacttgcactgggagacaaacaccccaagccttggtgtctgggacaagcctccaacactgccagcctcaactgaagcttctgcaggctggggcgctgctgctcagtgacctcacaaatggaagccagcactgcccaggtacagtcacatgctgtgtgatgatgtttcagtcagcgacagactgcgtatacaatagcacagtggtctcataagatgataataccatatttttataccttctctatgtttagacatgtttagacacacaagtatttacctttgtgttatagctgcctacagtattcagtacagcaatatgctgtacaggcttggagcctgggagcaataggctgtgccatccaggcttgtgtaagtacactggaggattttcacgcaatgaccaaatcgcctaaggatgcatctctcagaactatctcatgcacgaatttaaaaagttgtggttttkaacaccttccttattgtttcccattggcaaaactctcccaggagggccagatctcccaatggccatgatggggcctgcagaagcagcctggctggagccaagtatggggattctgtgttataaggcaacaggcatcaaccaagcatcatggaaaaatgtggctccctctgccgacagacatgaacccattttcaccgagctatctaacagaggtgaatacagggcagaatccaaatctgggtaacyagaacactcctgaccatgttacaaactctactgtaaaaacactgtcagcctgtatgtgcattcaagattaaacaggaacctcaaattgccaacttcttttaaaaaataaaatgtgtaactgcacctgtaaacaggacttcatgtgtgtgatcaaaattcctttcttttccatccttcacttatgactccatcttccaaagtaattgcaaaattgaagattccatcacttatacatccacttattcaactgacaaatgtatagcatacattaacatattatattaataatattaatcaacttatcacaaccctgacaatacatagcattgtatcaacacgtatcaactgctgagagctgcacaaaataccctgggtggattctcatttaatcttgttaagaaccttttgaaccaggtgtcatgatgatgcccatgttactgaggtgaaataactgagtcacaggggttatatcatctgccccaaatcacaaagggaatcagtgtcagtatcagaaatttaacccaagcaactgaatggacctgaagtcatgctcttgattaaaacaggaagatgctattggatttaaataacataccatgccatttgtaaagggctgcctacacgatgctcttggtcctccatattcataaattcagtgaacacaatcaacttctatgaggcaagcactactcttagttctctgttacagatgaggaaaataagcctccgaaattaaaccacttacttaaggtcccacagctagagggagtgtggctaagtctgagttgttttttttttttttttttttttttttttttgagacacgtgttgctcagtcgcccaggctggagtacagtggcgcgatctcggctcactgcaacctctgcctcctgggttcaaggaattccctgactcagcctcctgagtagctgagattacaggtacccgccaccacgcctggctagtttttgtatttttagtagagacggggtttcaccatgttggccagactggtcttgaactcctgacctcgtgatccacccgcctcagtctcccaaagtgctgggattacaggcgtgagccactggacctggccagtctgagttcttagctcctacaatgctgcctccaggaagtcacctttaaaaatatctaaagcatccaacagccttctatgagagttgtttagaatgaaagtaccagaaagtgcttctctttttctgaggaactgctgcgatttctcccatggacaataaaaatggtttacaaggattgtgttcccctctaattctggccacatggcattccacagccacagtagtagctcaatttagtatgccatggcacgaatgtttgagcggttcctcatgtcctattcctgacttagtgttttaaagttcttatctgcatcatttcaagtaagtctcttcaaatcctttgaggaataatgtgtgtgctataaataatgtaacctcaatttaaaaataatttcctaaaagatcaacaacataagccatctttcatacagactttgttcttctaagaatccatgagaagaccggacctttggacagctgtcacttctaaagtgtgctgagaatgttcgcatgtggaaggctgggttacacaccaagttatttaaagcaggcataaggttctctctctcctctcggtaagggctaagcttgtgctgaggacttcattacatgccaggacaccacatgaggtctcagtgtaaaaagggggcatttccacaaaagcattttacacaacctcacatctggcccccaaaacacagaaagaatccaaatatcatttcaagaagaaacaaggatgatttttctgtgggagtgtaatccttcccaaaatatgaatgaatacatttttctgttgaaggcagaagtattttttattaaatactcaggaatcactcactagaaaaatggactctgtacagcaagaacagcttgatgaaggtggtcaaggggctaatttgttcgtgcttgagacaccacccctgggtttctacctgctcactgctggccactcagcctgccctacagggcggggacatgctgacctgacccctctgccttcttcgcagagaggagtggtctccggaacccacccacatcaggggcaaaacccaggggtctgtgagaccaggaggatagggtatggacaaacccagccccctcagttctgatcccctatctgcctccactgtttggaggacccccatacacatcctcctccatccagagccctgttaccccttccatgttggtaaccccactttgtccctccccttacagggcacagggtcaccccaccccatcttgctcctttcaggatcctgggtggtccctcccacgcacccttgagggtactggcttactccccatcgtgttgctttgccgaggatagttctgactgacagcagtctggacttccatgcccactaatcttactgaaccttcttagaacaaacacttgcagaggaaggaatgccttgataaaaaatttccaaaaccagtactggtgagatgctcaggacctctgaaaaatccagtatcttcagtgtacgacagcaagtcgcagttttctctacagcatcctccatgtgcgttccatgtaacacatattctccacatgccccaacaagccatgggcaaacgctttccttccaatctctcacctgaaattctgtcctgagatgtgcatgcatcacctaatgaggtggatacttcctgagaaaggccacacatcatcaatgacagggatgcatcctgagaaatgagtcgttaggtgattgtatcattgtgctaataccacatagtggacttacacaaacttcgatggtgtagcctactacatgcctagactatatggtacagccttttgctcctaaactgctaagctgtacagcctgttactgtagtggatactgtaggcagctgtaacacggtggtacttgtgtaacaaaacatagaaaaagtagcaacatagaaaaaataaagacacagtattgtatgggaacaccttctcacatgcagtccatcgctgacagaaacatcattatgtgggggatggctgtatatgtgactgcaaggctcaatccagtaggcctgacatttattttacattcttaccaaagaacagccccttctctctccaaaatgcctaaggtaaattcaaatgaagaacgggtcatttttacaccaacagtaattaggcatccagctccctgtgctctggggcagccttggatgtgggaagcccaccgtccacgcctggggcctccctgtgactgaagccaaaagagccacaaaaggggaaaggaaagcagtcccatggaaacaagagggaaacgaaaatcatcaaagtgtcaaatacaacaggacccagcttcgcagcccaatttggaaacaggtgtgaggaccccacccccaagaggggcctggaaacacccaccccagctgcagggcactgcctgaggctcaagatccagagggagcaggttctgtccaaaattccatccagaattagtgaacagtaaactacggtgagcacacatgccaagtggaattgcttcaaygcgctacacaaagggaggcctacgacgcagctaaatagcccattcaattcacagcggagaaaatctggcccatctgaacagaggcaaatagtagctttgrcaataaaaattatttacctgactaaactcctttagaaagtattcaacaattaaaatattactgacttaacataaaaacacttcacatgaagtatttcagtcacacttttaaccaactccgatagggcatccccttccagaaattagggaagcgtagccctggggagccgccagcgtcctgtgcatgaagcatggggctctgggtgtgctggcgaccttctttcaaacagaaggacctctgaggaggtgaccacgacagggcaggacgactgccagagaccagcatgaggacacagcacacccaggctgcagagagggagatgttatggacacagatggggctatgcccacaccatgcttggctattagctgtgttcccaaagatccaaaccagcagcccaccatgccttcagcacaggtgccccaccgaggacttggcgagaggatctgagccatcttggagtccaacagagcatggtctgagctaggacaccaagaaatcaggacactgggtctttatgagtgaccaggccccttactgctccccctccaaccacaggtatttctcccaaattattctgcaagtgaacatctccctcactaaaaatatgactttgtttcatttaaatccacttgtccacttggtcaatacctatatgacaaggaccaggctatacctgcactgtccaatttggtggccacctgtcacatgtaatttagataaattaagatgagattttaaactattgttcctcagttgcacaagtcacatttcaagtactcaatagccacatgtggctagtagctaccatgctggacaaaacagacaccacttccattattacggaaagttctattgggcagcactagaacggacggttgccatacacaatggtgtggacaagagacagggaaatttctgccttcacaaagcccatgactggctgggtgtggtggctcatgcctgtaatcccagcactttgggaggctgagtcaggaggactgcttgagcccaggggtttgagaccagcctaggcaacatggcgaatccccatgttttgcatctctacaaaaaaatacaaaaattagccaggtgtggtggctcatgcctgtagtcctagctactcaggagcccaaggtgggaggagcacctgagtgtggggaggcagatgctgcagtgaactgtgattgtgccactgcactccaacatgggtgacagagtgagaccctgtctcaaaaaacaaacccaaaaaagctcacaatttgggaaaagcagcctcctatcaaataagccacatcaaataagcctatcaaggctgggcgtggtggctcacrcctgtaatcccaccactctgggaggccgaggtgggtggatcatgaggtcaggagatggagaccatcctggccaatacagtgaaaccccatctctactaaaaatacaaaaattagcttggcgtggtggtgcatgcctgtaatcccagctactcgggaggctgaggcaggagaagcccttgaaccagggagttggaggttgcagtgagccaagattgcaccacagcactctagcctggtgacacagtgagactccatctcaaaaaaaaaaaaaaaagaaaaraaaagcctatcgaataagatgtactgatggtaagtcctacgaagggaactggagagtgagccaagggagtggagagggttaaggctctgataccagacaggaccatctgcctgaatggcaagtgctggagcagaagggcctctgttctcttctattcagagcaaggttctaaccagaagcccacaagcaggctcacacacttgagtgtggcttggaacttgcaaacacagtccttctgccaatccacagcagcatgaggtcaccagctaagcatctctggtcatttcggcttgggctgattcacagcaaacactgacatggagatagtaactcagtgtagccagaactttctgggaggcagcatggagttgtcacagctgtggaatgcctgaaacagatgccataagcatctggtgggttctcaccatgtttcaggctgccgagaaactacggaacagacactgactgagtctgtgaatatcaccgagccaagagccttggcatcctgagggtggtactgttagatgcaggcattcatcatctgctctgagctttcttctgatgaatggatcatactacttattctccactagggccttttgtttgagggtggggaggatgcatggggagagggagagcttgagagctactggaacgacagaactgagttctgaatggctggtccctaaacattggacagacaaaaaccaaatggtcctggatgctggtgaaaacagaaacttaaacaagttaagccctctgctctccaaaaccagtagagacagtctgcaagttttctaaaggctgtgggttgattgcaataaacccctaaaccctaaactaaatactgttcccattttttatgaacgtcttaaaattctattgtacattttcttgtctccttcaacctaacacaggagccacctacttctgtgatgrcattcattgactcagggtcaccagcagtcagatgtgcagggctctgagggtggagggctgctgctgtgcccagtgccaccacactgacggcctgagtgagggggacctccacggggctgctgttccctggctggtggccgtcattcttaaccaagaacccaatgcttccaatcagcaacaggcacgacaaccacacttctgccatgtggaatagattcactgaattgcaaggctctcctagcagaaaactggaggaagaatttgtgcgtgaatttaagctcctgcgccactggctctggcaatggcagagaagagatgggcaggtrgctgtcctcctaacgggggtatccctgcaggaaaaccacaggctgttcaaaggcaggcaggtgagtcaaaacagacgaggaagctctgccttgtcacctcatcagctagcattttaaagccaagctgttcacagctaaatctatgctggacagacttgtgtaaacatacttamggtttcaaaataaataatgaactgttatccacacaaagcttccagtttttctgccaccttcccatatcccagataagtattactcttgggatcctatccttgtgctgtggctagggacagatacagtccatcctagagtgttttggacacaaaacaccattgactacacccaggaatgaggaccaaacgagaacaggatgcaaaaccactactttcccttctgtgggtccctatagcaaygagcaacaatgcacacagcagtacagccacacaggctggggaatcccggggcycatggcttgaagttgagccttggtgagaaccaggactgtgagctgacccattcactctcaaggccttcagttctctgtacgatgcctcatctgccttcattcccacatttagggtcggtaacagaccccacgtggccaaatcccaaaacacgggatgtcacattccagagcatgcagtatacatttgtgtaaggacctatatttgcagatgttctctcagctgaaaccccctgcaagatttcagggtattcctctgacaaatgcaggcctggaaagtaggaaggcttggggcagtagacgatagtggttgtctttgaaggggcacaagagaaaggtaccagacagaaaaatgcagagaaggcaaggtggattttgttgacatgcagtccacagaaagccactgtggctaagcctgaaaaacagcacttagcttgcctcttcttgctttaaattttaacaaacgtctcaagtaaactcttgcctgatgaaattcaccctgatgcctggtgaggaagagtgtgaactgcttcccaggttgcaaagtggtctgaaggttactcatgaggctttggaagggaggggccaagttactgtttaccttttcattaagacccaagggacaactacaaggagatgaattctgccaacagctgagagcttggaagtgggtctttccccagtggagtctctgacgagaacacagccccagccaatacccaattaggagcctggtaagatcctgaagtagagaatccagccaaactgtgccaagaattctgatctagataaagackggtgggaagtctgttgtttctcatgtrtgtctttagccatcaactgatkggcagattctcaagcaggatgataatgcaattcaggactggtcattgagagaagagagctcaaacaaagccttcaaagtcagcccttctctggaattttcttccaaataaaaaagtcatcttgaatattaaaatgttagaaattctcacttgagctaaatgtgtgatgtcatggctgctagacctgatgtccatcgtcttcatgggtacctctcactgtgtgtcacyctatgtcaggctttctagacagctctgcagggagctaggagtaacctgaaatgacttgggatgcttgttaagaaaatcaaatcctgggctttccccctagtgaatcagaatgtctaagcccaagtgccccaggaggctcttatcactaggcaatgaaagaacaggggtttggaccttttggctgtcagcagtcatgctcttatccactcagcaacactgctgcccaccacatcatttggaatgtgatggaaacttttctttcaccaaattatagagcagcctatactgtttaaaagggaaggggaaggactccataaagaattaggcaatatttcaatccacatacttttacccgtagacataatccaactccgctggaattctgtactttctctgcgcctgggagcacacccagctccttctttggacccacaaaggggatggaacaaacagctgtgaggctctgaaggacaggcctgcactcctgccagaaggtgaagctctgtggctttcccctagggtgagctatctaataagctcttcacaccaccatttggcttattaggaaataatttagaagcatttggaaacaaatctgtgcaagaaaaatggaaatcatatataccaggtacacacacagaaacataacctggaaattcattttaaatactcatgctgacatctatttaaaaacaacttgtaatttaaagtcttagatttctaacactaatccagtcaagtggaaaactggaaagcagcattacttttagtctcacaagtaaccagctcaaatcttcaccaggatgtgctcagcccaggcttctcactgtaaagaccaatggaaatgacccgatagcttgcattcgtacggtaatgtgagtaaaccccacgaggctgagttttaccctcattctgtacagggcagggcaggccactgccttctgtgctgagccgcctttgattcgtgtgacgatggggacagaagttcatgcctggctcgccatgcacaggtcacaggaagatcacattggttagatgtgtgagatttggcaaatcagaaaacaacaccttagttaggtacttccatctgacattcatcagatgtaccgtaactgctagtctaattcaaaataatcagttaataggattgctttaaaaaataaaatcttacgcttccagcaaagttttgctactcatgtagaaagttcaaggagctctaaacttcaaatgcttgtgataaaatagaaacaggactacatatatcagtcattcttaagacaattaggccaaartagggctaaaacatcaagcaagctgccccagactacaagcagtggcattataattacctgtttctccccacaatgtgtcggtgccattgacttctacttcatgttccttctccatccccagcaagcactggaccacctgtcagaagtggcaaggtgatttaatgagttctcttwgcaagaggtgcttattatagcccatgtatcaaaggagacagtgtgttgttttttaaccattatctcacactgcccaaggagagaaaaatataatgaaaactgttttcaagcataattcatatgctattcacactttcagttggagaagaattaaaaaaaaatctcagtgaatttcagcaatatggttcaggattactaggtactcagaattctaatgaattccaacatgacccaaatatgccagcctaatcaacaaaggacatggcagatcacacaaagtgcagtttctgcataaatcacaagatagtgaatcagtttttcacaaggaaggaaaacaaagcgatatacgtttttgcaaatttttacaaagtattgttcaaatacattttctgctggtagcattattctttttcccttatgggactcttcctgtcaaagggcgggtcaagtcacaggtatggaggcaggaagcctggcttgcagggagacaaggcatctgtgccctggacctgagcyggcgttcaccctgagcaacagcagcgagcaacgggagaacacgacaaagccaccttccagtctcctagcccacaccctttgtggtaggctgaataatggcccccaaagatgtctacatcccaatcttcaaagcctgtgaatgtgaccttacagggcaagaaggaattgcagatgtgattatgaatgttgaaatggggcgattatctcaaattatcaaggtctatatctgatacacacctgatctaatcaatcacaaccatcctcttaagagggacaggaggagtccaggtcagaggacagaggaaatgagacgacagaggctaaggtgaaagtaaggcactttggagatggaggaaggggccatgagctaaaaaatacaggtggcttcaagaattgagaaaaagcaaggagacaggttctcccctagagacttcagaaggaaggctgacctcccaatagtgtgattttagacttctgaccatcagaattctaagagtaagtgtgtgctgctttaagccactaaggttgcatctatttgtgataatggcattaggaaactaacataccctccaagtcttatggtgaacaaaccctgcttttttcaccctactggctgtgctgaggtgattttcgctcagcatttcctcccaaccagctttaaaacaagggggttagcatggattaagaccaaggtcattcctaggcattcatggtcctcccaatgatgacttttcacacttaaaaaaaggaaaacatctacattttcatatgtgtgtttaacagtatctctctgtgtgtgtgtgtgtgtgtgtgtgtttaatgtttaaaccagaaattagccagccactatttcatgcttgtgtgtrtgtcygcycatgagttttgaatgccaaagtcagccagccagcttcccactcgaatttactaaagtcattttagaaaaagaatcttaccaaatactggcacctctaattgcttgaagataattcagagtaagaaatacacaggaggaagcgagcaaaacattattaaattcacagataaagaaagccaagacacacaggtcaggaggtgacaattaaatcttcaaactgaggaataccaacatctgtcagaaataaatgctctatttaactactgcatggagttttcattcagtggaggagctgtaaatgacaagcattcttgtgtgctatcaaagcattaaagctctatttttaaaaatccttcaaatactcaggaacgattttagaatcaggattctatgtgattatttttaaatgaacacaaggacagaagaaacgaatcaaaggggaaaaaatttaaaacagcaggtctagagggcagagcagggaaggaggagagacatgaggaagagctgagagtgaatgtcatcaaaaggcttcccatagaaaaataagcctgcctgtccccatcacgtgtgcataggagtgtgcactgtcactcacgggaaggatgtggtgcccatagaagaccttctactgcaggtggtcaacgccaaatgctagttcttggcatcctccttctttcggtccttcagtgtgtcaactgacttgctgggctacagcttcttgtttcccaggagggaaacccctgccccactcaccgagctgtggcccatgctggccgccgcggtcagcgcctgctgcagggcgtggctcttcctcagggtgcctggctggggaggacccggcgaccactcacaagtcagcaggtactggagaatgtcaccgtggccccgtagggcactgtggacaagcgcacactggcccttcttatccaagtggtccacctgggggcaggagtaggggaaggttacagctgagcattactttgcctctgagcatgcagatgcaccacctagctgtgtgcaaaccccactccctgtaagcgtacatggggttcacattccaacttgtctttctggagaacatggaaccttagtctggattacttccagatggtaatgaatgtaccattccaggcctcaggttccctttgcaagattcagggtcacaaaacaccctccttactcccatgtccctgcagcaaactacacaaagctcctaactctcttgtgagcatgtgtggagacacagaccaaaacctcggacaaatccctgtatttcccaactttggttgcttgggtggggcattctaagtctgctgtgacaagctakaatttgaaggagtagagccactctctggtcactgagccaggggatccgaagaaagagagggatgtggaaaaacagctgagtgtggaagggcaggaaaggagtccaagtggcatctgattgggaaggaggtctcatgtaggccggtggcctgggcatgctggcaagtaaagggggggcggccacaaagtcagggcaggccagctaggcagaaaaagtgagtgagtgccacacacctcctcctcaaggccccaaagcagcggcagcccttcatgccctgtctaaaccccagagtactgggcctgggagcagagcccagggcctagccttgcatgcctgccaactctggggacgccctgtaccctcattcagaggctttgccagagccccctgacatagcactcagcctcctactccagagctttcagctgtgatggggggaggcctgctggcctcagaataaagtgtaaagcccagctgccatccgtaaatggaggtgcggtgatgtgcagcagtaacatacccaccccaaaggcttagccacacatttccttctccatgaactgaagtttatgtatgtcccaaatgttggatttgagagaaaaaaataaatctcccacagctgttataagcctaatttttttgaactttaaatatcctaattaaaagacaaaagataattagcagtttatctctactgttattcaaaaggcacatttcccaaaaaaatgcttccagtaaacctagcatttactgtgagctcgatatcattctcattcaccctattaaagctgacagctcctggccagacgtggtggctcatacctataatcccaacagtttgggaggccaaggcaggcagatcatgtgaggtcaggagttcaagaccagcctggccaacatggtgaaaccccatctgtactaaaaatacaaaaattaaccaggcacagtggcatgtgcctgtagtcccagctacttggaggctgaagcaggagaatcacttaaacctgggaggtggaggttgcagtgagccaagatcatgcctctgcactccagactgagtgacagagtgagactgtcaaaacagaaaaaaaagttgatcgctctagagtaacttgtatagcaatacatacttacttcatatatgactgaatgcttactcaacagccctgtggtagggactgctgttatgcccattttacagataagaagcctgaagtcatayataggctcaataacttgcccaayaccctagggctggcaagtggaaagatgaagattccaggcaatctagttcctggagctcaggcacatggcttcttcatgagttcatggaactcatcctactgttttaaaaggacataaaatgggataagaagaagagaggggaaaaaagcaaacatttaaaatattttaaaccaatcttggtgctttctagatcgatacttgcaggctttttaaaggctggccctcctcatgcggctaggagccagggtctccctggaattctgccttcccctggacaacattaagcagagttgctgtgtatgagcaaaacamacctctctgaggctgccacattacaaagtgaccaatccctggagcccgaccctttctgtgtatgctgtggtttcagagacaagagagtctggcccagcaaataacamttctagcaatgagatgaagccatttccctgccccagccccaaaagagcaggctgccgcttactctcactcccttcttggtcagcagacacaccagcttcatgtggccagcagctgctgcgtaacagagggcagtcatgccgttctctgacgttccgtccaggcaggcaccaaattccaggagcagagtgacaacttcctcgtggccaaggtgagactggacgcacaggattggggcattatttaacacttctgtcctgtagttcacgttggcccctcccaaaatcaggagacggctcacctgttggacaaggccccccaacaagattgtcacatgtatgtcatctaaacatttctggaaatgggcagtatcctcaattttcggtatcattttaatccagtggttctcaaacttgaatgtgcaccagtatcacctgggaatatattaacaatgcacattctcattggtgggaatgtaaaatagtgtagcttactgggaaacagtaagatggttcctcaaaatattaaaaatagaactactgccccaggcacgtgactgtaatcccagctactcaggaagctgaggtgggaggattgcttggggccaggagtttgaggctgtagtgcactatgatcatgcctgtgaacagcctgctgcactctagcctgggcaacacagcaaggccctgatgtgaaaattaaaaaaaaaaaaatttttaattaaaaatgtcagtagaggccaggtgcggtggctcacgcctgtaattccagcactttgagaggccatggcgggtggatcacgaggtcaagagatcgagaccatctggccaacatggtgaaaccccgtctctactaaaaatacaaaaattagctgggcgtggtggtgtgtgcctgtatctcagctacttgggaggctgaggcaggagaatcgcttgaacccgggaggtggaggttgcagtgagctgagattgcaccactgcactccagcctggcgacagagtgagactcagtctcaaaaacaaaaacaaaacaacaaaaaataacaatagaacggccatgtgatcagtcatcccacttctgggtacatattcaaaagaaytgaaagcaggatctcaaagacatatttgtaccctcatgttaattgcagcattattcacaacagccaacaggtagatgcaacctcagtgttcatcagtggatggatgaagaaaatgtggtacatatacatacaatggattattcctgcttaaaaagggagaaaatcctgccatatgtgacaacatgggtaaacctcggggaagtgaaataagtgaagcaagccagacgcaaaagaacaaatactgagtgaaactacttatgagatatatacagtaatcaaattcacagacagtagaatgaaggtttctgggcctgggcacaggggaaatgagagttgttgcttaagggatatagagttttgattctgcaacatgaaaagtactggacatctatcgcacaacaatgtgaatattgttaacactactgaattgcagacttaaaaatggttaagatggtaaatttccttttatgtgtttcttaaccataattaaaaataaaaactaaacaaatagccaggcaaggtggctcatgcctgtaatcccaccactttgggaggctgaggcgggcggatcacctgcagttaggagttcgagaccagcctgaasaacagggtgaaaaccccgtgtctactaaaaatacaaaaattagccagcgtggtggcgcacgcctgtaatcccagccactcaggagactgatgcaggagaatcgcttgaacgcaggaggtggaggctgcaatgagccaagattacgtcactgcactccagcctgggggacagagcaagactccgtctcaaaagcaaaacaaaaacaaaaacaaaaaaaacctaaacaactgcaaattcttgggccccaccccctgatttctgattcattatatctgggtggtacatttttaataagttcctcgttgatattgacactcttggtttggggaaccacactttgaaaaatcactgtttaacctcaacaaaaccaggaaattcattttcctggtaatgaagtaataattgtggctgggtgcagtggctcacaactgtaatcccagtatgttaggaggctgaggagggaggactgcttgagcccaggagtttgagaccaacatgggcaacatggcaagaccccgtctctataaaaaatgtttttaaaaagaaaaaaatagtcatggtgttaatagtgagataaggccaaaagtaaatacaaatactttatagggatgtgttcctaaaagaaacagaaaatatggaaatgtccacatgtgccatgattgtccgcagcataatactgctagaaaataatgtgctgcttccactaattactatatcccccacttagtaatctccctggatctaggtattgggaaaagctttttatctacaggttttaaaataaaattactgaacatacgcaaattttaggtataataatattttttttttcagatcttcagatcattagatacaaatgatgctcctttaacagctattaagatgcccagtgtgtttctttcaatggcttacttcaatggtcctgacccacatcaatcactgcccctgccaaagcctggcaggtcctccacctgcccactaaatgtgaaaaccacagagactatcatttattgactagagacacatggggatcattaaaagatacagagagatgacaaggcataaaaamttcatggtatttcagtgatagatgtccacaagagtagctgacaaacagaatatttacaaacaaatgggtctggaaaattatactaccaagtagtgaaaccataactcacaayggcatagtgacaggttagaaccccaggtgtcaaatttgaagatgtcttggctgctgaagcttgaacctctgtgatacaggcctccagcttcctctctgatcttctctgcagaatccttccctcactgcagccaccttggacccaacacgtgctgtgacaatgccaagcagggccggcctcatggtctttacccccttttagttccctgactggaatgctcattccataaatataatcacttcctgcagggctctgctccagtgccaggacatgggggagagggtaccctgtgcacccaggccctctctatccctcagcatgctctgttttcctgcttagtccactgcaccagacactggttctacgatacagaagttcacagagaagaaaggcaaacagagcccctccatggatggggatgacccacacatcagtttcttcacactgctgggactgccatctacatttaaggaagaacaggccatgtgcaagtgacaaggagccagccaaccacctgaccaccaccccgctgtctacaccatcagagagaccactgtctagccagatccaggtgaacaccaacccagcctctagggtctcgctgtcaacttgtacttgtggaggaatggatgagagatcagaaagggtgtccagtcctaacactgctgtttcatgggcaacttcaggcaaatgacttaattaatccccaccaagcctgctctacagatctatataggcttgctttttaaaaatgccaccagactctgatctaattcaaaagcattttaagactgcattatgctacaacattaataaaggtgtggctgggcatggtggctcacgcctgtaatcccaacactttgggaggccgaggtgggtggatcacctgaggtcaggagtttgagaccagcctggccaatatggtgaaactgagtctctactaaaaatacaaaaattagcyggttgcggtggcacacgcctgtaatcccggctactcgggaggctgaggcaggagaatcacttgaacccaggaggcggaggttgcagtgagccaagatcacgccattgcactccagcctgggcaacaagagcaaaactccatctcaaaataataataataaataaaaataaaaataaaataataaaagtgttttaaaaatccctttgagtaacagygtggacagaatcagattatgctgaagaaataggattttattaaggccaatgaaaccagtcctcagcaagaggagtagagaagatacacatctggaaatacacgcaatgccaccaaggggcacaccagactctgctagccacaggatgggcaggatcatttgtaaattccctggataattttgccagccagttacattctgtcctcccccatcaaccccataccttcttgagatccatgggcctaaaaaatgaaggattaagtggtgtgagttctcagccagcccccaaactaacctactgtgtgattttcagaaaattcctcaacctctctgtgctttaggtgccacctaagaaaacagcagcatgccatcccattctatctaacaggtactcttttgctaataatggtggaaggtatacttggagtaccatgatgaatyccttacaagagtttacctggaaggcatgtgctcagggcagaggtttcctaaagatgtcatcaattcacacttcctctgcttctgggaataacattttcctttgtcggtgtaatgctgtacgtatttttaccacttaaccctccatcaccttcccctaaactatggttcttaaccttgatgcacactgaaaccacctgggagcttgaaagtttccaataccctggccccactcttggagattctgacttaactggggctggggctgtggtgcccagagctcccaggtgattttagctggcagccagggctgtaaacacatcaagtgataaaggcacctgcagagcaagggcttgctgagtgtcaggcgcccttccagctgtgtgattttggaaagtatcaactgccctaaacctcagttttcycatctaaaaaaatgaggataaaagtttcacttcacttggtggttgtaaagattaaaaatcaatgtgtaaaaaaaaaagtgtatgtatatatatgtgcattaagcatttagcacagcactcagcatctgtacatgttaaataaacattaatcgatgttataatcaacctttcatggagtcttcagaaacgacaagaactcaggtccctgacctctggaaggcacaggagggagctctgccctcctgtccacatcaccctgcatgcccagcctgggctgttcaccagcacagagcagcagggacacctcatgccgagatgagggcagaggtaagtcacctgcaaccatcacatcctcaaggtcggcagctcctgttaacaagcaccaactggcacatccaaaacttcccaggtgcctacagcagagccactgtttccagagatgaggcaaagcactaacaacaattcatgtaaacataataaatgccaagtatgttcccagtacctttaacatctcagtaaggtttctcatcacttgagagacagcctcttttgtgtctccactttataggtgagaaagccaaggctcagagggagtaaggcmgagctgagcgctaagcacaaagctaatgatggtcacagagcagccaggtggcagagcagcagtcttggctgagacggcactgtgctgaaggaacctgtttaaatgattcatcctatagattttcccccaacgatatggaaattttccgaccatgatcacagaagccctccttggacaacactcagaagtggtggtatctctcaacttctggatttaatgaaaacaggaaaacaggaagggagctggggatatgcgaggcaatacgatcatgaggaccagaagaggcttggccagggtggccatagggcagcatcagcattcccactaagtacactggaagctcacacaagcacaattgttttaaaatgtgtccttcctgactatgatgtaggatatgactggatctcccggccaagggaagttgggccaaaggccacacctagctcctgttctcctctcctttctgttgtcagctgagaaaagaactgcaacctaaatcctcctgaggccacagcttgcggctggccaccagtcctatgagatggtacaacaaaaccactggctggatgggactccagtgggccagcggggcccaggctggccccatcctggcctggccacaggagacaacatggttagagactgctggcatgccactgcaactraaatccatctaccaagtaatcatcccagagcaagtcactttaatttaccaaagtggcaaactgcaattattgttcaaaatgacattcattcctgtatgacaacatttaatacactctaaaaaaagttccttaattgcatgcataatttaaaattactgtaatttgttcaagatcctgtgaaaaccgttttccccccttgaaagataaaagaaacagaaggataatgaaaagacttaagattctataaccacattatagaaataatttcggagatggtgtagatgtaggtgacactggagttttacaaaacaaagtaaaaatgattaactcttaaaatcgcacatacgttaaagagcaaagtttataatctcaggagggccatgctcattacactattatgcagtacctttaaatttactgtcttaaaaacttgtactcaacagatgtttcccatttacttatttccatattaaaataaattctatgcccagaaattcattaacatatgaaaacatattgccatttttattctcatctttcttatgattatagaattttattagttatggagaagccgagagatacactcttagctgaaatgaaagatgaaacaatgtgagtgattcggggggaagacctggctccctaaactgacccagggcttccacaggcagccgggtacatcagggcctgaagctgaaaggcctggacactgtctctgtggccttaacaggctgcttggcctctgtgtgcttcagattcccaggctacatgaaatcaggaagaaaaatctaccttaaaaagctgagtggaacatcatgacatgaaagccactgaccaagaagtgaagaagctcttggctccacagaaggccatgctgataccctttccataggcagaaatatggatacatgaaacctcgatgtttgtttttctgtgtacttatctctatgcatcacccatccatgcttaatttcccatgaactctgaagagatggtccagattagtaacgcaggacacttaaaaaatccgttttccctagaaatctctctgatctttgatttcttttgtaaattgcttccttatcacatctgctgtgaaacagtcaccacatgtgctcagagcagccctgaccacccacatcttcctgccaaagaaaagctaaacttctggaagaacgagtaatacagcacccaagcccgtgtgatcagggaagcacatctttagaagctcctctgcgtcctctcaccaccacccagggcagagggaaacagggctgttggaggaacggccagcagccggccagggctgggtctccggctctctgtgcagaaggttgctcaccttcacgttgggagtatagagattcctgagagaggccagggcggcggacagcccctcggtgctgtagccgatccacagggcttggagatggcttgaagaaattcccgtcttcttactgaggccctggaaacaatcgagacagatcttggaaacaatcagagacagatctgcctgagcatctccttcccacctgcagggtcactctgaaagtgggtctgccgcagagggtgcagatacctgcagaaggcacggggtcacacacaaagaatgcctggacatgcgagctttcactacctgaaaccaagggtcaaggaaccagcctgccttcactaggttaactttgtgccttgggagagagatggcagatgagagtttctctttgagtcagagtcttgctgtgtcgcccaggctggaagtgcagtggtgcaatctcaactcacttcaacctccacctcccaggctcaagtgattctcatccctcagcctctcaagtacctgggattacagatacatgccaccactcccagctaatttttgtatttttagtagagacaaggttttaccatgttggaagtaaattagaggaagaataaatgacagaattagaatatcaccatctgagccctgcaaggtggagcgtgcctatagtcccagttacttgggaggctgaggcgggaggatggcttgagtccagtaagctatgatcccaccactgctctccagcctgggcaaacacagtcagaaagtccaggtggtacaaaatcacacaggtcaagaaactcaggttctcgaacaaatcaataataaggaaacaaaaagtaatgaacaaagtggaacctttagataaaaagaaacttatcagagatttaaaggtggaaagaagtaaaacttaagcacagcactctgatatacacttgagcaatcaactatagcaaaatgcaaggaaatgcccaggctgagtcagaacagcggttacttttggagaggggaggcaggaggaggttgcatttgggctgaggtgcatggagcgtttcttggatggctgacagagctgtctaaaatctccaaagcaaaacctcaaaatgacaacaaagaaacccttcccyaagttggtgtgcatctcaccttgaaaatgtgcgccttcaggatgtggtggccaagctccatggtctgctggcggttcaacttgccctcctgacgcgagaacatgaatgccaagagcgcgtgcccgttcctaggggaaggaatacaaaggctcacagcagaagagcccattccaccacaccgcagacccaccctcaattcaccacccattgccttagtcactgatttatgcccgtgacaaagatgtaaactccgggaggctaagggtctcatctgagtcataatgcctagcaaagtgctgagcacttggtgaacactcaaatgtgtttctggaatgcatgcatgaatagacacagagcacagaaccatccctgggcctagccttcaggtcccctcaggatcaccaccactaggggtagacaaaggacaaggtctcacgtgggaaggagagaaaagccaggccgtgctaggtgacagctcatgatcaagaaagcagagaattctaggcttggatggcacacaagtccttgtggtgagaagaaggctaaggcatctaagtgggtttgctgtggctggcacatggtggacatccagccaacagcacccatttcccttttgtgaaggtaccatcctgcctattttcctgcccatttcccttttgtgaaagggccatcctgcccatttgccctccatgtccataggactcactctgtcttcctgtggatcccatgcctttgagccaattagtttctaaatgacacacagagttgcttattccaataggagtgacttctatgcaatgtaaattactttcatttctatcatcctgtcaactttgagctgtttggttggggaaaagcaggtagttgtggagggaggaaaagataaacattatatatgttttaaaacgcatcctcctagtagttgctaatctagatgattaaaagcatgcattatttaaactgcatttgtctttccaggtgcatgcctgcttctcaaataggttataaaccgtgttagagatgaggaaatcaaggcagatggaggccaaggaatcagtttttatactacaggggagggcatgacgtttaaggccacactgcccactgagtctcgtccattgtcttgtaatggcctgaagttttcccacgagcacatgccctgtcattccctgaacaccttccatgtcccagatcttgagcctgggattcccctcctcccttattcccatggaaaccgctgtcagcatctctctagtgctctaggcccccaaggcctccccaggtcctacccatgggctgatcccaggattcattctggcccagttcatgtcagttgggagccactctcccaaccacaggctaagtcctcctaagtctcccagttggctgagctctgtggccaggccaacygtgtccatcacaaagacacactaactatcactttacagggtgatgaccacacaccccttggtggccgggcctaaagtttccagtgctcccagctgagcacagggcatcccacctctctgaggagacaactccccatgccactgctccccacctatactcctgcataccctgcccatagttcctccctgccctcctgttcttgagaccaagcaatccccttctaagacaatctgcattcatgattctgttaatttccaaagcttccaggtatcaagctcttactctatgccagatgcagaaacctaattgaattatctcatttacctgcacaatcctgtgactaagtactatgacccccatatgcttayatgaagaaacagaggcctgaacaggttaagcgacttrtgcaagaccacatggctagatgacagaacagagatttgaactaaagttggtcagacaggagagcctgtgctcttaacctgcggagcttgagtcctccattcattcacagctacaccttatcactggcaccacgtctgacggggggattctatgggggaacaatgcaaggtgcttccattgagaagctctaagcaatgggaggggacacgcaaacgatatgcaagtcagttaactgggtgctgtgaacagattccacgggaacaaagaggaggcaacctgccccgtcactcaggccccggtccctcctccttacattcccaatttctccttctttatggatctttctccacactatctctcagtgatgtttctgacaatgttccaatctcctgtgttattaaaaaacaaacaaacaaacaaaaccacccgccccctaagcccttccacctcccatcccaagacgctggctccctcctctctctcctctcaacccaacaggcggagtctcctaaggatccagsaccctcctccctcactgaaaatccaatggcttcctcttaacsgtcatttcccttcacctcttggcaacacttacatccgtaaggtccctccctgaaaccctcctccacgccctggaagcccagtgctatcttttctctaatgacatgagcttcctcaccgagtcatgccagacacctctccatcagtgatgctagatcttcaactgtcagcttctcctccaacctgccgacccgccctggcgctggaacctgtctgcctgggacagacggctatcttgcaatctcaactgctgaaaactaaaaccagctctgtccctgcaaagcctgccacataccacctgcctttcttacccttcccaagagcaatgccacacctagtttctggctcttcttcctctactctgcccatgaggccaagccacaagagctacctcatgtcagcaaggcccgtctctaaccccagtccccccaagtccccactcctgactgctatagtaggccctatacactctgtgccctgcacactcccttctgccagctctttcctctcctctgttccatgaaaaaaggtcaagtcaaactagatttgctgttgcagaacacggcctgctcattctgatgcgacgtcttcaatagctcctcctgtctgcaacagccttgttctacctactaatacctattaactcctcgagttaacagagaacagagctaataggggactgttccagatgagacttcctgtgcaaccccaaaaaactgatggatcttaaaaatggtcatcagtggcttctagtgcctacagagacatgacaatgtcatgcgcctcctgagagaggtactcaccaccacctactaagtgtccttgtttaaaaatatagaatctgaacaagcctctaaacttcactaccaatttataggaaataggggtgagaggaacacatgaaaaaacatgaggacacaaaattcagatgatgggaaactatacaggatgaactacccagctgccctttttaaacaaataaattttgaggaaaaagaaaaaaagatgaggagagaaactatagattaagagagataatcgaatgcattttatggactttttggatcctgatgtgaacatactaaaaaatagaaatttgagcatggctaaatgtttaagattattaagaatttgcattaatattttaggtgcagtaatagcgtggttaagtatgaaaatatctctaagatgaatattcagttatttaaagtaaaatgtcatgtttacaatttaacatacttcaacaaaaaaaaaggaaacagatgtagcaaatattgcaaaatgtaaatatgtttaagtctaggtgatatgaatgaaaactctttctttttttttgagacagttttgttcttgttgcccaggctggagtgtagtggcacgatctcgactcactgcaaccttcgcctcctgggttcaagcaattctcctacctcagcctcccaagcagctgggattacaggtgcttgccaccacacccggctaatttttcttttttttgtatttttagtagagactgggttcaccatgttggccaggctggtctcgaacccctgacctcaggtgatccacccatctctgcctcccaaagtgctaggattacgcacgtaagccaccgcacccggccagactcaaactattctttatcttcataattctatttctggaatgctaacctagggcataatcaaaactaagagagaagaaaggaaagaagagaggtagtacatcgtcttaagatctgatttaatagctaccagcactcagtgagaagacactcattttttatagataaggaaggaaggcatggagaattaaaatatatttcatgcagagaaaaatatacaagaatcaatggaagatttgaatccagacctgcaaggcaccaagacatgacaggttgttctgtttgtaagtaatttagaaacaacttaaaaatctaacgagggggccgggcgcagtggctcacgcctgtaatcccagcactctgggaggccgaggcgggcggatcacgaggtcaggagattgagaccatcctggctaacacggtgaaaccccgtctctactaaaaatacaaaaagttagccggatgaggtggcgggcgcctgtagtcccagctacgtgggaaggctgaggcaggagaatggtgtgaaccccagggggcggagcctgcagtgagctgagatcacaccactgcactctagcctgggcgacagcgagactccgtctgaaaaaaaaaaaaagcaaaaaaatccaatgagggtatagtgaagtacataataatttgcctcctaggagttttgcacaaccatgaaaaatgaaaatgacacttttctaagacttctaacagcttagtaaggtgcccgtgatgtgttaagcaaaaacccagataagaattccaaragaaaaagaagattggtatatcatttaaaatgctacagaaagaggcagaaataaaaaatgaactgtctttgtctgagggttgaaattttctgctttyataattagggcaaaaatacgacaactgggagttggggaagaaatgctaccatttttcgaggcccaacccaccatcaccatgttttaaaatcacctccccaggcccctttacttacgctgggagcttctccctcttgtgaggtccacatgaagtgtgcctccctctcgcatatcacctcctgcctcccctgccctgtgtgggaagccctgagagcagggtccttgtcccaacaattggtgtctgccacagtactttgcacataactgcatataacaaaaactgttgctgaactgaatccagtagcttccttccaacattgttctatatcctctcaattgaatgaagctcaaatactacaggtgtcttgggaaaatggcaacaactcgcaccacccaggagtgggtgcttccttaaattctgcacccttggtacctctcttgcctccacctagtccaggtcctgccccaggggatgtccccatgcctgcttttaagaacacagtggcattcaggagcccacaggcacccaccctagctctgacctaggctacataacctcaatgcccaccaatacccaaaatgaagcgaagcttaatgaagactacagtccagccactttagcctccaayccagtaacaacctacactcctgatggagtctttcaatttgtttttatgtctctacaaactcagctatagtcaatcttcctagaaaatgactggaatttccctagaaagtaatctgacttggctagaaatgtcacagcacatgtttcacctagctattatggtctggctaaataacctggatgttagtttattgccccaaaccaggttcaaaagataacaacaaaccttcagccagtgttactgaagaaaataataacagccccaacatgaacagcagccaggcctatcaggtggatgttcagtcaatattcacagggaggaaagtggctgtgaggctcccagggctcaccaatgcttgttcacctcttcatttctggatcccagcatctggtcaaatgcctaaggggtcagctgagcagcttgccagccctgttactacagcagggggcaattctggctcacagatagccgaagccactcgagacagcagagacacaggccaaagccagggccaagtggaagttgsgggcttgccatatacatatctgaacgcatctgcatcctcaaactttctgacctctcacactgttaccaagccacacagcagacaggcttccttccccatcccactgtgataacagcggcccaggcagcaaggagaactgcatcccagcctggtccagtccaccacacagagctcatccacaaagggtgaagggtgtggagcggggaggctagattggatcatggtgctccctctgggctcacagatatacctgatccctgggacaagtcactccatgttcaaggggtggcaggggagtggaggtgctgaggacccatgacagtctgcagacacacagggaactccctctagagaagccccctgttcccaggggctgatctcacacattcccatgcatgaycctgcagaagctgggtgggggaggagacggggctccatgagacaatggacagtaaggaaggaccacacaggcaccacccagcttctcttttatccacatgtaccatccataagggagtcctagcaattagaaggcagcttctgtatagagaattccccattgcccatccttctgccaaaaaggaagaaaaataataaaacaaagcagtaacactgaattagtcattctggattgcccttccattgagacacgtgcatcacatttaaatcctttccccaactgcacacgagattccctgcaaagagctgaaagaaagcgcctgccgtacctgggctcacacaggaaggccgtgttttccccgtctgctctccatacaagccactccctgaaggacgggtggcagaacatgcgggttttgtctcgcctcttaatgaggaagcaggagagggcgtccatcctctgctgaaagtcttcccatccctgctccccctggatgtggccagcattaatagcctgaaagatctgctcgtctgtcatggggtggagggatgcgagggccacgttgagaatcggaagtgccctctcaaaggcggactgggtcatgaacttcatgttgcactgaagcaaatagagctcagagagagacacgggcaccaccttgtagctggcactcttaatgaccaagtggcccctctggaaaaggtccagggtgagcttgaggtacaggtaggagccgaggctccgcagcaccaggtggctgctcacttttccaatgagtgtggcatcggccttgccgttcagggagatrttgctgaggatgtcctggctgctgtgcaccctgtgctggacgtaggcgtgcaggtcactgtggatgtctttgttgtctgggaagtcatctaaggaaagcttgacaaatggcagcgcacttatgatttcctgggggagaaaacaaaaacccacagtgtcactctaaagagattccttttttattttaacagcattttaaaccagattcactagttttgtttcaaggaggattttcatggattacagggactcattgttttgtattaaaacgtgtaayaggataaggtgaagataaaaagcttatgtgaaagaaatcctgatgggagatggaatcagtaagtgctatcctgaggccctcatccaaggaccctgagcctagcaagcagagtaagagccctgtgcagacagckgcaacgaggccagggccagtaagggcagtgagactctgcaggtgacctgatacccataatccttacactgtgaaactgcttatataacaaggacaaacaccaaccaacactgcacatctaagaacacggccagacgccaagataaaagacatccttctttatgcagcaaacactggggctgtgtaacccaatcaggaaatctgagtctgcccctgggctgtgtctcaacgacagcgcatcttaacaaagctgcctactttggtatagcacgttattttatgaattgcttttttaaagtaaacttttaaattgaagtctaacaatgaacatatgatttgtgtacaaatgacaattgcacagtgtcactaattttcactaagtcaaatatacctatgtaaccagcacccagaaacaaaacatcctcagctcccagaagcctcatgtgcccttcccatctcttccccattccaaagattaagcacatctgacacctaaaagcaaagaagagttttgcctttttaaaaagacttcccactattgtttctgaagtatttaaatgcacgtgctcatttaatataacaatgtagataaagagggcagaatacaattattcccattttacatggatgctatctgaagctctgaaaacttacacagctgggaagaagaacgtaagaytcctggttcctatgatctactgatggacaaattgtgcttactatgtaaaaaatgactgaaaaatatacaaactgaatgtccaaaaaacacgcatcaagttcaactgaggtctaatttcagtttttataatgaaaaaattccaaatgctgtttttaaataaatatcataaaagggcaaaaatcaaaacctaatgtctaaaagtcttcactgaaaaaggataggtatagaaggagtcaatggttaagacacaatttcagggtttaagtgaggaagaagatggaggagaaaaaaaaaatcaccctacccctcgctgcaaatgttacctcatgcttaagttttgtgaaaaaatagacctctgggaataggccttaaaaatgtttcaccttcagccaggcacagtggctcatgcctgtaatyccagcactttgggaggccaaggtgggtggatcacctgaggtcaggagttggagaccagcctggccaacatggtgaaaatccgtctctactaaaaatacaaaaattagctgggcatggtggcagatgcctgtaatcccagctactccggaggccaaggcaggagaatcactggaaccagggaggcggaggctgcaytgagccgagatcatgccactgcactccatcctgggtgacagagcgagactctatctcaaaaaaaaaaaaaaaaaaaatctttcaccttcatttttcccttcaaaaaaacacaaagccccacagtaaacccttgcaaataactaccagcaggagtagctttaaactctggcaggcctcttggccccacacactccatgacggtaaccagggctagatgccaccatttgaaaagtgaacgtgcaattcgatgccaacaggaaacttacctgacatcttgataaatatacctggggctaaaaaggtcagagtttcacccaagtcyggctctctggactagtttttcaaattcttaacatagtttccaattcaagcagctgaatggtttacaacagttttacgttattaacatttatcactgtaaaattggaatggggacttggagaaagatttgagaattctttgttacctgaaaatttgctcttacagtcacaatcaacttcaaccaggcaggaaatttagaaataattttggtaataaatgaagaaagcgtatctccataatcaggtttatgaaactcagcttcatttaagccatctatcaaaataatgtattcttcttcaggaattttctgctctacaggataaaataattttttcaaattaagaaattatacatttctctaagacagcaacacccagtgtattttagtgcccagtttagtgttagaaactaaaaaggtttacatatggcacaagaaacagttttcacagaagcatattttctattaaatttataatgaaaactggagcacagagccaaaagaaaaccaattctcacaaaacaaacatattgcatgacacatgttagcagaatctcactcgtgtatataacacagttagctcttcataaaccactgtcattggggtgggctacacaaagataatgaacacatacagaggcccaatccggaaaggtcactaggtccccccatgagagctccccagtggattccagggaagggaaactgaccccctcgctgcccccagcccagggcaaactgccctggccaagccatacaaccaacacagcgtgagagctccacgctaccgactcctccaacagggctcttctctgcgagcctgaatctggttttctatttattagtgctgattttctgcccaggcaatagagaagaaatgatgacatatctgttttctatccctctagcaccttccagcagaggtgccatgcgggcaagtaaacaagctcaaaaggtgaggagtccagggcagagaggatgggaaactgaagggcccatcaggtcacygatgtccattaccttgtcggggacaaacaattaaaatggaaacctttagaagtcactttaaggtttcaattcaactgagcagaggccctgacaaatatatatgctggaaaattcctccaaataatccacttattccctcagatacttaggagtgcaaaataygcaacagtcttctgtggtgcaagtcacctaaacagcccacacttacaagctgactactttggaactgctcagtcatcacattcattcttatcagggtgcttcttttaacactataccataggggtggtgtaggagcgacctcatggggctggttctgagaaagaggagtggatgggcacggaggcttcgacatcctctccatgctccacctcacttctaccccagcccggctgaccacctgccttctggggaccacctgtgtctgctgtaccactactgagatggggctgtgggtagctgctgcgaagtaccatttctcaggtttgtgagtggctccagcactcccctcttgaaagctgccaccgggtcctgcacacaggatcggaggctcagcatgctctgtagttggggctcctttatcagaaggtctctgtaggcggccagctgatgggaccggcagagcaaagctgcgatgctgtgcacaaactcgggcaccaggcaagtgtacgtgttgtcagcctggcagtagtggtaggccaccacctagggggaagcagaaccgtcagcatcacctcaccctcttcacacagctccttctgcaatctcaaacaggaacacaactctgcccattcgctggtaacaagatacatagcatctattccccaagactgggtcatttgttagcataattgttccatttattccttccttcacttatgtggtttgcagacctttaactgcatccacaaagccatcttgattagcataaaaatcagcacaagttatttttttatttttgtatttaatataaacaaacagcattcataaaacctaaaacctaccctggcttacagcagctccaagccatcctaatattctcaacatcaaaaagtgccatcttcactaggtttctgttctcaagagcagcggcacctctttaggaaacccttttgctgatcccaaaaggcagatgataaacccagtggctgtgagaccggggctgtagagtcacagcagctccttctcctggtcaggagggtcaagatcttggcccctccccacacccacactgcatcaagggacactgtggaggagttctacaggggcrctgtctgaagaatgaaacccgaaatcaccaaatctctgcccatcgtgtggagagataagttggagttgagagggagctgcccaggtactgagaggaaaaggaatggtccctgttccaagggacctgcagtgtcagcaggctgtttgtgagagggaccccacgaaagggccagacgctgaagtgttgggaatgggaggcgtgctatagatagaagaaaaatccaatacttttccaaaggaggatgataggagaaacacaagtagaaggtaaggaaggaaaagaagagcaaaacactcgtgccaagagctacctgttttttgggagtatctgccttgctgctgtcccactgggtgcggcaagcgcctgcaggaagtaggacaagaaccactagccacagttcatcactgagggcaccagacactgaggttagatgccttgccaacctgacacagatagtcagggatgtgggattagatcccaagtctgcagactctttaaaaggcaagtggcaaaagtaaatgtgcaacagcttttctctggccaacctggagttgccatgagacttttggtttagattaaatttatcatcaacagaggaaagctggctgctctccaactctcacctggacagaaattagcagggatacatgtgaggatcctgtaagcttgtgcaaaccatcatgagatgtccagtaccacagtctcacatggcatttgacaaaaacagcttggcaacccaacagtgggtcatgaaatctatttatttatttattttatttttttgagatgaagtcttgctctgtcacccaggttggagtgcagttgcacaatcttggctcactgcagcctccgcctcctgagttcaagtgattctcccgcctcagcctcccgagtagctgggattataggtgcctggcaccatgcctggctaatttttgtatttttagtagagacgaggtttcaatatgttggccaggctggtctccaactcctgaccactggagtgatctgtacgcctcggcctcccaaagtgctgggattacaagcatgagccgccaggcccggccttgaaatcaatttagagccacaatttttwaaaaaataaacttaggaacactagagtgtattataggatataagaataaacatagttctaaaatgctttagttatgtgggtgattatgtgtgagtgatctctagtgtaagatgtatctcttatgtgggtcacagtcaatggagtttgaaaatcaccataagcagggatggctttgaagtctgcactacatcactcatctcaaatcacccactcatgactagaggactgttctgaaccagtggtcagaaccatcaggggtgatggcgccaagagcagtcatcatccggaaagcagaagggacggggatctggtgcagggcaagattcggttcagctcccctcaccaacctccccacagggcctcctcacaaggtgtccccatggctgctggctccagcagctctccagctccaccgactcacaccactgctgcccagggaaacttaagtagctcactaggagcaagggatgtaactgctttaatgcaggagtgcggttggtgagccagtgatgggtgctaagcagaagaaaaacttcagaaagaccttgatgatcacaaatttaagaagggaaagttagccaaggaaggctctattacaacttcacgagaaacctctgtcagaaagccaaggaaaccaaaggcctcagacaacagagtgcaggggaagaggtctgggtcaagtcaaaagctcccaatttcctgctcacataccaaattaggaagagcacatgcagataagcatggatttgtggcgagtgcacatgctaccttctgctgccttgaggaactctttcaatccattgtttaagatggatcaggtccactgccaatgtcttaaaacagatacttactgtcattcacacttttacttggagaactgtatcactatttcattaaaagctatactttatcattaagcagttgtctctgttttaagctcccttttccaatctacttctcagaaaccaaaccagcaaatctctctatgtggaaggctccaataaaacaagaaagattaccttagaagcaagatatttcactgcatcctctcttggtctctggttttcagcactgatagacccaagaggtgttttagctgtgctggaagcacttgtggaagaactcggtgaaagcaacggagtgaaatgaagatcctgagtggggtcagaggctgcagagaaagacccatttcattatgtacatcacagtaggagcagggtgtggtattgaatatatttcttgatttgtgccagggcatattttaataagcaaggagtgaacatggtccaaaattcagaggtccacatgagagcacaggttcccatctgtctgccacccaactggttcccctccctggagaacagccatcagtgtactgtttccagtttcctctattaaattttttttttytttttctttttttttttttttttttaaggcggagtctcactctgtggcccaggctagagtacagtggtgccatctcggctcactgcaacctcgacctcctgggttcaggtgattctcctgcctcagcctcccaagtagctgggattacaggcacccgccaccacacccagctaatttttgtattttcagtagagacggggttttaccatgttggtcaggctggtctcaatctcctgaccttaggtgatctgcccatcttggcctaccaaagtgctgggattacaggcatgagggcagtggcacaatcccagctcactgcagccttcatttactgggctcaagcgatcctcccacctcagcctcctgagtagctgggacaaaaggcaggcaccactatgactggtgaattttttgtagagacgaggtctccctatgttgtccaagctggtctcaaactcctgggctcaagcgatcctcccacctcggccttccaaagtgttggtattacagatgtgagtcacagcgcctggcctattaaattcttttgtgtcttaaaaatctcgcatgattcacttgttcaccatgtttagagtgggtttattgcatatgaaataaacagtaaatagtcaaacatttggctactctatcctatgtctttataattttggaaaatccaatacagaagacgaaggctgtgccaaacagggtacaaaagaactccacattagagtccatctgagcttgttctaccaggagcccaaccccttgctcttagggccccaaattctccaggacacttgatcaggcctcactggcccatctctgcctgtatctaaaggaagagggggttacagttcaggaggacatcagggaacactggcctcgccccagcttacagctgaatacacatcatgatggagggacatattgaaacagttcacttcacacatgatggcaaacctgatatagtagctgcaacaacttgaggaaaattggtattttatgtctatgtgaacagcaatttcctccatctatcttatgttaataaactagacaagtaattaaacatgcacgtacttttaggtgatgaacccgggctgttggaagcaatctgcctcatgcggcttccgtggcagctcagggccaccaacttggaaatgattgccgtcttcccaaatcccacattgccaaccaccaccgcgcctctgttttctgccagttctgtgttcctcaagttttcttctatctggtgaaagagccaatcccttcccacaaacacagagtctgttgttatgcttggtacttcaaacaacaagggtttcaacaaaatgtcttgtggcttgtagggagcaaatcgtgcttcaaaagaagaaaaaaaaattttagaaaaatgtcataattttataaactaagaaactcaaatattattgcttgtgtgttacactaaatccttagctttacccccactaggatctgtctgtaagcatttccaatctcgttctattaatacttctgtaatacctcaattaccataccctattggacctattggaccaataggaaactagagtgtcctattgaaattactctctagtcttgtcatggctttgaattattctcaggactcaaggcagacacacagaggattagagaaagccatgtgaggggccaaatcatgtctcattggttcatctggaactgcatttaagacgtgcttcttccctgctgtatgaataaaacagaaacatgttttccctagaaatagggctctgctctcatccaggtgtgatgactctgcctgtacagtgaggctgctgtgtacctcacacaactgtgttacaggtagacagagaacatggccaatacagtccaagtgtttttttttttttttgagatagtttcactcttgttgcccaggctggagtgcaatggcacgatctcagctcactgcaacctccgcctcttgggttcaaataattctcctacctcagcctcccaagtagctgtgattacaggtacctgccaccatgcccagctaatttttatatttttaacagagataaggtttcaccacattggccaggctggtctcaaactcctgacctcaggtgatccacctgcctcggcctctcaaagtgctgggattacaggcatgagccaccgcgcctggcctagtccaagaattgaaacaaagcttatactttattagtaataaacacctaatgagtgttaaactacccctcacttcaaaactacccctcacttcaaaataacttactgcagaattactttttcaattccagaagcaagttaatcacatattttaaaggaagaagccccaaactgttgaggatgacctcttagcacacctcacagatatgcttttagcacaaacacactttccatcatgttataaacacagttggcttcaatgctggttatcacagactttcaaagttactgactgagttagtcataaccattatcgcagctgatgccaggataaatacctttaacttcctgtgccctacctccggccgtattgtgccatggtaatctaattgacgtccgtagaggagcatttctctgcccgtctaaataactcagatcttccaatttggttgagcttgttgctgtaatattaaactgaagtttagtatcttcaaaggtgactttaaatttcatacctaagtgactataacttataaatcactaagcaattcagttcaggctttcaacaaaatttacttaaacktcattttgatattgtttgccccagtttatttttctggcagtatcattagttgaaaagtggtaaaaaccaaatgcttctttttcttaaagttatgttgactgagttgtcagaattctccattattcctggaaagagacagaattcaccataaagtgtttgatgaggaaatctgacaatcatgtggcacacagcaaagcttcagtacttaacaccacaagcaggtggcatgctgctagattcttctctgcagctctggggagctttctgctgtttggaattcccaacttattaattaaatgggcagattctatgtgtacaattccacagcaccgagaacactaaaagttggctcagtagtaatagtataatcatattcytaagcttcaaatatatgtgtagacttatatacacattctatatcataccgcattttttggtgttttttattataaaaataagttatgtttacctctgaccaagtcagtaagactcatatcacctaagtatttgttataaagcattaaagagcagggtgcagtggctcacgcctgtaatcacaggactttgggaggctggggcgggtggatcgcttgaggtcaggagttcaagaccagcctggccaacatggtgaaaccccatttctactaaaaaacaaaaaaaattagctgggcatggaggcgggtctctgaaatcccagctacttgggaggctaaggcaggagaatcgcttaaacctgggaggcagaggttgcagtgagccaggatcgtgccactacactccagcctgggtgacagagcaaaactctgtctcaaaaaaaaaaaaaaaaaattaaagatctattcaaacattcatacgagttagattacaaaaacaactaccgcaaaataattttgctaattctcaagaaatcttagaagcaagtacatagtacacgtttttgccttttaaaaacccctcctgttattacattgaggaaaatctaaaattaacctaatttggtttatgggttaagcccaacatgaagtactgttgatcttagtcagattattatctttcaggacaagaaaatatacagtgacttgagggcaaatgagagcctagagggagacatagtgcctgggtaaagccttcttagcactggggacatcttcagtgggaccaaggtgcaggggacagaagtcgagttgggccatctgtcttctgaaaaccctctggctgcccaacaggctctgacccagcatccagctgccgaccagtgccatccgtcctacctgcacccttccatttccccctactaagatctcagtccttctcttcctcactatccatatcatcctctctcattccttcattcaacagccacctgggtggctccaggcctgactgtgttggcatatcccctctcgctgcatcctccaaagggcaatccaacacgtgccctgcctactcatcctcccagcgagcaagaaacacctgaaaccttgacttcacgacagcatgcacctatgcctctgtatcctcctggtgcatatccacagtgtatacacatttaagtgaatattctatgcactttgccagctaccacacaaatctttcccattagaaagactcagctaattacttgttggggattttaaatggatcgaatgtacggtaatccaaggacagcgtctagcttctctctaggcccttcataagtagggtgtataaaatctcccggagggctaacaggactacactgtcttccccaaaccttcttacctccctacagtaacacagcttggaacattttctaggctcctgcctgagcactgagacccttctcctcacatgcctcatggtgaatgcacccaccaaggcacaggtagaaggggcaggcagccatattcataacccgtaattcatttcagagccagaacagtcatgaacatctgacataatgctgcagccctagagaataaaaagatgctttagagcctcaaaagtgttgcctatttcccttcttcccctgactccttagaacagtttataaatttataacaactgaaaggattaaaaatatgtgaccataaaagacattccaaataaaggattgcaaaaatgccctagattgtatctaaacaggtacaggagatgttaagattccacaggcctgttttcagattcccagccactagagcttcggcaccaaaatctgcaacagagcagcctcagcacttccacagctcttggctgattctcaatttcaaatacgattaagccgagctgaaagctgcagcagggccataagccaccacctgccagctatctcagctttctgaggcattttcgaagccaccaatagaggtgccagtgaatagggcaggaagatttcagtggcttagctatgtgcccaggtgctccccaccctctgagcaggtaacttgggccactctgccctctcaggcatgcctacagtagattctcagttgttacctatgcaaaagtcagactcacattcagtatttacccataaacgctttcaaaatcctagacactactcagggccccaaaaacccaaaggtaaagcaataatttcatgctacaataaacccactgctagaatctctacagcgaaattaattatacacttgttgtgcacacacacacacacacaccatatctaacatctggataagaagcacatttcaagatgtggaggaaagtccgttttttggtgagggtgggcttggtggggcaaggcagagggagacatctctaagctgaacaaagaagaacatttgctaaagttgtggtctaacctatggaaagtccatgccaataagtccagggcaatgaccagttttaggaaaactggatagcaatcatgcttgtttcctggaaaattaaacacagtgttctataatccactcagaaagtattttgaaaggtaaaaaatagaacccattacccaacttctttctgatttaaaacatacctttaaaggcttctaggtctgtttttaataaaggaaagaggtgtccatgtcatgcattttgatgtgatatatagttgtccaaaccaatcccactctaataaatatctttacaaagaaaatctgtatagtgaaataatctttaaacctagccaacttatttttataatctttgtcaaaaaataaaaataaaaaaacctgtcactgtactacatggttaacagacaatttcattctctgtagcaagctcaataaaggaccttaggaagaacttctgcacccaatcccctaggggccagccccatgaggaggctgtgaacagaggtctggcatcacccttcctttacctgccaatcctcatatgccaaaacacctttcccaccaaaaggcaatttgtttacctggatcataacatgcaaatacttctaagagatttctgtatacggtccttcacatattattctgattcttctaacactgagtgttctctgctgccctgtttgtagcagcctgccttctaatcactaaatagtgctgcatagagtctatacaacctgaatcttactcttcaatggtacttgaaaaatcttgccatttcctcttaactgagattcaacttcaggggcaggaagggaggcaatgaagaatctaccagactcctagcttgttaacagatatcatgaaataggcctttgctcacgtcctttcaaaatatgcatttagtttaaaaaacatgtagcacacaagaaatgagcaaacccattaggccaggtagactttgctcaaatctagaggtgaaaccctcccattccacaggaggtctagctcaagggcacacgcagaagctaatgaatgcgcacagcagaaatcagaaagctctgctctataatcacggcagcctcctggaaaagctcagctcacacccactgtcacttcacatggcaggagacccataaagaacatcgagcagaaaacaaccccaaatgggatgcttttaacactgttaaaattaacacagtaatgtttcctaattttaaaacagcttgactaaattgagcacaagttcactatttttgttgaagttaataaagtgatcaagttctgggataatacaaatgacccattcatcataactaggtaaatacggtctaaagcgccttgggtgccacatactctgttaaagtggtgggacagtggtgggaggacaggaaagcttgtggaaggactatcagtcaactcgtataatgttctctagtatttctctccagcagacatgccaaatccctcttctggaacaaggccatttcacttcctttgaaagtgaattagagttgtgcctcagcacttttccattagggccacttatttatcagctacttcagagtcccattgtaaaagaacacccaacaaccaccagagtgacccaccgcatcctgaaagcacagtataaatcacagagaaattctctgacgtaggagcggagaatctgggtccctgcagtagtagaagagaaatgttaagtgctacactgataacaaagaatgactgtaacaagttcctcttctaaactcagcacagggcatggagtttagaaactagaaaccttaaaaacaggccccacagctcagatgcagagagctcctttccccacccacctggagctatagtcatccttcactatgcactggagatcacttccagggccccctgaggataccgaaatcctcagatgctcaagttcctactataaaatggtataatatttgcacataacctacaaacatcctcctatatattttaaataatctctagattacttataatacctaatacaatgtaaatagttgtgagactgtatttttaaattcttattattttttatcgatttttttccttgggtatttctgctccatggctggatgaatccatagatgtagaactatagatacaggggactgactgtattctccttgcttgacacacacctggtgaccagtctgactactgacagttgccagcctttgtggtttcttctttgttccagctgctgcatatctcggtaaagcatgtctatctcgaatattttcatttccttgattgagagctcctacttccactgcttacattttaagccgtgagctccattttaactaarttgtacagaaattcggccctcttgcctgtacaatcggcctcaattagacaaaaataagtttgtaagtttggtaagaagawcctcragctgatattaacaaactcactcaacaattcccatttaccaggaggtaataaacagtaatgaattttctaaggcttaaaacaacaaaaaccgagaggagagtttttatactttcttctcttatatacaaagagcctgacagtccaaataatcgatttaaagaattccagagcagaaggatcacttaaagaccattaagtacagccttattgtgtttacagattagtaaactgaggcttagaaaaggtaagtgcctgacccacggccacgaagctggcttgtatctggagtgtcttcccatgtgaagacagtgaacacagggcaccttggtatccctgagataatccttccagggaaaggtgtggccttacctgcaactgagttgggccgtggcattattagtgagctggagccctgagaataagggactggaccatctccagctgaggattctgctttgggcagcgtgctctctgctgacccggtggtctcctcttctgccactggggagcagttatctgccctgcggtcatgaagcactcccttctgaacccctaatcttaggcttccatctttattccattccaaactggagccactccggtcatcattttcggatgaacttgtaattgtggctgaaatgaaagaccaaaatactttgaaggaggccaggcacagctggggctgaagaattaaaacatgcacactgccctccccaggatcaatggaaagttttccagtccacacagatttttatcaaagtatgttccatacaatgtattttggtaaattagaagaatgtggcttaccaggggaaataagctgctaaatcactctacagagaagaggagcgagggagaaactctgataggaagataatgaaaaaaattgtctaaaaagtatcagagttaagagtaaaattatgtaacctggagataatgtatcctctttttaacaaagattactcacaaaagaattcatttctcattaaattcctttgaacctttaaatatactttccaaattaaaaacatttgctgggggtgggggagtgggaacaaacaacagaatggttaatgcagaaacggtgcaggagaaaatctttagaaacaaaaatacaattataaagtcaaacagagaatttgacccttaaagcttataacatctattcaagatgatccagagagactgacttattatttcctcagcaacacgaaatggaaaaccttcccatatccagcgcaggtgaagtaccagcaggagaaggtatactatgactgcagaattcacatttaatctccaagaaagaaaaccagcacagaaaaaaggtacaaaaaaccttttgtaaacatcttggcaaaagagcagaaagaacatggtcaaaaagcgaagcaatactcaccctacatagcttctacaaagagtcacttctaatttaaagatgctgagccatatgggatccccttgcaaccacaggtcatcatcacctgggccactcacactgccccactgttagaactaacgctggctgcgtccttgagaacaggggccatgtccaccgatgcctctttccctatctggattccagtcacctaggccctcaactccacgcctgttaaatgggagtgcacagggccaaagtgcattcagaacccagctcctggatcaggctgctttagccacacaccaagatgatacacactgtatcagaaggctggtaaattagctcagggtcagttatttaggatcaaagggtctgaagggtttagctttgtttatattctttacggtttagaagtaaagacaaaactatttccttgcagtggcccaggacatcctgtcacaattctgactgtctttactcctcctgctgctgcagcctggacttatcaccctctctggttgcctattttaaaaaatcccacataaatgctgaagccttccctagagtatccatggctatcttttccttttctgaatagcacagcacagcacatagtaagtgctcaataaatgcttgctaattgaatgaatgagcaaatgaataaacttcaattccatttgtggtcagagacactacacttaatctcacttaccagagttcaggatctgattttgggtgcccatcgttatgattcccagcatttgccagtgttccatcagcagtattaaaccatacctccacctctttggaatcaatcacagccttccttgtgtttttaaatagaccatttatatgaacataggcatagcaagtatgactctttctatcataaaaatgccaatggtggtgttgacagcagaagctagcatttactgaaggtttgctatatgctagaagtgtgctaatgtttttcaggagtggtctaatttattgataagattattgcttattaatggtaatcctgttaataagcttgaagcataaaaatgggggccatcccataacacagattgtggtgttacaaaccttcacatttaaatccagcatttgcaactcaaaatgcttttctcagacatattgtaataagttaggttcacaggctactccaacatccaagtgacaggaagagttccaggctagggagataggggatttgtttggttttatttttgtggctgttacattggaaagcacgtatttgtaaattgaaaaattaaaccaaaagtcaaagtgctctccctaagtgccaagcacttctgaatcaaaccccaaagatctgagtcctaactaggacctcaagcaggggaaataaggacttagctcacttcctgttacaagtgacagcactgcaatcaggacctcagggacccatggagcagctgaggatggctgggaaggccaggtcagagctcctgatggcaggacaggtggaaggtgtggctctcactggcagacatgtgccctacactgtgcccagcatctcgtggagggggagagggggcggaggggtaacactcaggtcctggcagggagaggaaggaaaaggggtgggggaggaagggctcagctgcaggagcagtcactgcgaagagaagtcccagatggggtaaccatttagaaatgaacatattgtaaggtcagtgtttatatgaaggagactagtgaggaagaagaggcagcccttctgctgccctcacaaagttcctgtgagagaggcattccacggtccacatgtcccagggttctcagaggcagggaggctggaaaatctgaagccactccattgacactccttcctgggattcaatatcagatgtagcctacacaggtggaagcccagacactctcatcttggctcagctccatccgagccctgaggcagatccagctgagcagatgaaggccaaatcagtctggcttccctgcataacctaagaacaacaccaaacatggcagccccggagtccccaagaagagaaagctggttcttccaataaacgacatctttctttcttccaaccttacagaaattcaaactcctaatcaggttaacccagtcaatcactctcaaraatgcttgtgggtacacgtacacatcaagggcagcatcttaactgtgatgacttaaaaaaaaaaaatctctaaaaagtgctatttgacatttcccagagactggctaatgtttatagttgccttaataatttaaaaattctagcattttgttctttggactagtatagatggcagcttttgtcaattacagcttgctatcatcacccaaactgggtctcagccaccctcgagacacagggcattctgaaactgagcgacttatcaggccttaaattttataaggctgtgaggttaggctgtgcctcacaatttagtgttacattccgtttagtctcaaggacagtgtcttatcttcctttgtactagtgtacaggggtagaatacttccaaaacacttttcttttttttgaataatatgggatttcactatgctgcccaggctggtctcaaactcctggcctcaatcagtcctcctgcatcagcctcccaagtagctgggactataggcacacatcattgcacctggctcactttcttaatataacagggcgtatacctgatcacatcccatgagaggaggcagataggctgagaaccatcaaccccaccttatagagataaaaggctccagagaacctgatctctctctctctctctctctctctcwcwcwcacacacacacacacacacacacacacacacacamgtatgtgtatgcacaattagtggtatagctaataccaattcttctgattatacatacagcgtatttttaaaacaccatttgcttgcatggtgctcattacataaaaggagttaattatctgtggctaaaagttcatgaagtctgccttgttaaaaagtcatccactcagtcatcaaatgctttgctctgcaaggctctgaaatacgactgcactctttcttcaccttcccaaagttttttttttttttttttgagacagggtctcactctcttgcccaggctggagtgcagtggtgctatctcggctcactgcagcctcgaacttccaaggctcaagcgatcctcccacctcagccccctaagtagctgggactacaggtaccacaccttgctaattttttatatttttgtagagacagggtgccgccatgttgcccacactggtcttgaactcctgagctcaagcaatccacccaccttggcctcctaaagtgctaggatccaactttaccccttgccttctgaaggttctatgttgaatggacacttaaaatagaatcagcaaaagaaaaataaaatcagtgtcggtccagggccctataggtagtttggtgggatccaaatcaagttataggcttaaatgaacatcaagaagaaagctaactgtaacctgactacagcattagcccagaattgttcaggaactaaggaccagagataccaaacatatgccacaaacaattcatcagaaccttctctttgagctacagagaagacaagggtgaaaagagcaaggggcttgctgcaaccttggcttctcccctctagggggtccacaaggaggtatgcgtctccagacccggtaccattttgggcaatggacatttttgtctttataaacaccaccttccacatgtgttttctctctttccactagctatcaggaaacttargagtaaagctttctgcccacttataagaagaatacagtcttatgaatgtgactcctcaatgcatcttttctcttgccctatttcatactttccccaactcataccttcayggaaaaggaaaaatcttggtttattacatgtctgttttgagcatttcaaattcactggtgaggaattaagtaatgatccttaagaaatcacaacagtggctaagatgaatattggaatactgtttactatatgccaggcttcattctaagttctttttgcacttcaactcactgactctcattaacagccctatggacaggaaagccccagaatgccctaagtcccactctatcctagaatggggctctacatggtttttttttgtttcgagacagggtctcgctctgttgcccaggctggagtacagtggtgcaatgacagctcactgcagcctcgacctcacgggctcaaacgatctttccacctcagcctcctgagtagctgggaccacaggcatgcaccaccagcacccctggctcatttttaagtttttttgtagaaacaaaatctccctatgttgcccaggctggttttgaactaatgggctcaagcgatcctcccacctcagcctcacatggtgatgggataacaggcgtgacccaccatgcscggcctctctacactgctctgatcataccatactattaagacaagacttggcatacatcccaaatacatgtactataaattatgtacatatactattataatagaaaatacgcattttgagaggactctctgaagagagtgatttgtccttccctgggttgcagagaaaattagacataagggcatatgtcaagtgcctcaggcatcatgaatgctcaggaatgttttcctccccacacaactgaagaaaaataaagtagcacttaaaaagcaaacattttttaacctctgtatttagcttagtggttgacaggaagaatttaaagttaaaacactggaccaatgaattaaggatcaaacaagaaaggaacataatggccgctcataaaagtggatgaaaggaagaagtgaatagaaaaggaaaagcccactactgtagcgagactgcctcctgtgactaagaactttccaaattaggtttcactgctgcagaggaagtccgatcaggaaaagatcagagacaagtcaaggcaacgcgcgcagaagtctgtaggcctcttggctgacaggtggcgtccctctcttgtgcacccacacctcacacccagcaggcattcaagccaccaggccacattttggattttcccaagtgtgtaagggaaagcctgcacaatgaaaccggcctgacttaaacctttctggccagaattgccagactgtacttttatttccacccctacctaggcccggccacctgcaaactaaccaaccacagagaacaaagtccctggttcacctgcggccacagcttttaacctgaggggtctagtgaaggcacttaagccaccttgcctggaatgccaacagaatgtcccaggtgggacccccgccccaaccctgcayggtaaccttcagcttcaggagacttctggcttctccttctgcaactgcccagccccatccaatgcgccacagggccctgctccctctctggccttgctctgggagccccgtatgctggcttgtgacagccagatctctgtacgaaatttctagctcagtgctcacctgtgttgcgcaaggcatgctctgctatgacatgcagcaaggccaggggcccgagccgcacattcccagccacattcatcaggctcttcaactaaggaaacacctaaaggaatggctgggagcaggtggtgctgggcggggaggatgggacccaccacactgcccaactgagaagaagtctccagagacaagtctaaggacttaaataacatgacattttccagaaaaagcacagtgttttgataaagcctcacataacctgtgcacagacactggagcttctcacacagtctaatgacccttttccagactttggaaaagagttcgattagtggtatcattatgcgcccacagcatacatcttccgtcagaggtatcaatcactgtcatgtcttaaattcttctcagtaattcacaacttgctcagactctccacagaacagaagaccattttgtagtcccacaagtggacaagttttgacaatagatgctgtgccttatctttattgtcccagtactgaacatgcttgctcctggtacacagtaggygccaataaatgcttgctacaccaatagaacagcctgaagaatccaactacagtctgaataaaagtacagcaggctctttgctgactcaaatcattgccaagaatttctttcccacattaagcatattaccaaattatatacataaagaaaaattcttctcttcacccaagagattttaaaaaaaaggcttctataattaaggatgattttaaaaattgcaggcaacgtagcaaaatgaatattaacccagacttgaaacagtctaaatagttattaccaaatcaatttcaaagcatttcaatttagtagtgagcagggcgatacaggtggcaacaaagcagtattagcataaaatcaaaagggcaggatttacaacaagtcaaaaaggaaaataaagtacaattaattcatctttgtgtgcctctgcatctgattatctcccttggggcacaaagtccaggaaataaaaggtctaaagctacctctggaatcactttcattttataagcctagcaggaggtaggagagagtcaaaggaagataaaagtcagcccatgataatttttttttaaacatcctaagcaactaggcagaaaaataaatattatcaaactctagcaagatactctagcaggatactaaccaggtgtctaatattttactgcaagctacttctgcagaagtgtttctacgaaggtattcccctgtctaaatgcatacctgcctctctgcttcaaactgagcaagaagaaaacaaatgtaagcatgaggaaagcaaaggaaaggcattcagaagagcttgaattctgagcacttaatcacccagaaagccacctagccaggtggaatgtggcggctcatgcctgccagctcaggtgctgagagctgggcaggtagattacatacctgctctgtgtggcagacacacccagctggggagaggcagccactgttccctcagggtcccctcccttcatggaactgtcctagcaccgtttctccaaaggaggccgattcaggacactacaaaaatgctccggagattacacatctcaacaggtaaagaaaggcagattaaaaagacgaatggagagagtgactgacttaacggcccctccctcagccagaataagtccttcccctctgcacatctatcattaatggataggaaggatttctttttattttgataggaaagctgggttttctttgtttcttctcatccaggctctatcctctttcttcctaaatgcagaaatagcctattttcttgaaactaatatacacacttaaaattttatcacgatatgtacataaacacaaattaaatttatctcaaagcactttaaaacacattttcagtgatgctttgtttgaaaatcagattggttttcacacattctaatgaaaacatactttatatttctttctaaactgggattaatacagcttacagtttccatttgtaacagttggaagcaagacatattcaaaggaatgtcactgagaaaaaatgttttctcagacaaggaggaaacacctttaaaagcatactctgtaaagtttttcttttcacagtaagtaactgaaagctattttatggtgattgggtacagttgggtttcaccttgagaagattttcacattgcaaatttgaaaatcagacaccaacttctaggtaatgccaatgattttaacatgtaaagagtaaagaagttcacttaaaaaaataaaaaagataatcatagggaattcagttaatcccattcagcttagacagtatttctacatgacagaattattatacttctaaagacatttatgtcagaagaacttggacctcctgaaagaggataaagcgggactcccctctggataacataatacagttgaaacaaggggcaggaggggtttgctaagccctggcctccagagaggaagactggaggggcccagtaaattcttgtactggttactagcctgccctttctcctcctaagcagtggaaacagaacacatgcagggcaccctgtggcagtcctgatgaaaccacatactttatatttctttctaaactgggtgcctgggcatgtgggaacacaagcttcctgtccctgcatctgctggacaaaaatatttagattaaatataaccaacatgatgcgaatcagcttaaagagtaaagaaaggtccaggaattttaaaggatggtttagcattgtctgaaatttccccaaactgctctgaataaaccatgtgaatactgtatgtggaaccctgctttgagcccacagctgcccaaagcttgcaaggcctcggcagctgtgtgcactttgtaacagtccacccccaaagcctctgccattccaaacccagctctactggctgacaaatattaaactacttaaaatggaaaattaaatggaaagcctcttcctgccttctccaggccctgtgtaattgggagcatgggtcctcaccagcctgttttacaagccactgttaggtcttccaaagcaggaagccaaggtatctcatcttcatctccgcccaactagggtcatggtgctcttgaatactttactctgtgaaacacttacaatgcccaaaagctgccattcccaggctacaccttataaaaacaggcatgctcttcagatggaaaaggcacacccctactccagcaatcacagaaccacaactgagtcatagataacctgctctgtgaagaggcagtggaacctgcacaccctgtattgatttaaaaggaagctcttcccctttctgtccccamcactcctgcctcttcaaagacctgtggctacagtctgcctggagaggaaattcttgcgtcttttccttctcctccctaccacacctccagcgtgtcccttggcaacaggttctaattctgcatgtcacggaaggagaacagaggaacgctgtcaacagcagtgcctccctctcatccctctacagcccttgcaacctgcaggaaaacacagtgggaggcatggtctccagagctgaggtcttctggatgagagggacttaccagccacttcctaattccttctgctttcacctacagttgccacttttcatgctcagccgagttatgggaaaatgttggcttgagcagaggaaaaacacagcttcaatgtcatgaaatgtgctaactctgtcatcatggcagaggttacaacacagacattgaaaggtttgacaaagcccatgtggaatggggatcctgcatagcttctttataaactgaacgttccctctcccgatgcaactcgacactggcaacacttctctttccttaatttctcatttccagcaccatgctaggaacctagtagatagctggattaatgagacccctgtttacatctggagagaaaattaaataacaaaacaagaacaaatacactgaaggggaatattgagacactatggggaacatgtaagaggggtctaatcagtcagctactgggtagggctgtatgagattaagtattaagaacctcctgcagtttaatatttcattgacaacacaaaaaaccaaaccagcaccatttctttcctctgcttagaataccttaaaaattgtggcactgtatctcaatgagagagaaagagaaataaacgaatgggtggctctcagttattaaaagtttgggccgggcacagcggctcatgcctgtaatcacagtactttgggaggccaaggtgggaggaattcttgaggccacaaatttgagaccagcctgggtaacacagtgaaatatgttaaaaaattttttaatgagctaagtgtggtggcacatgcctgtagtcccaactacccgggaacctgaggtgggaggattgcattagcccagaagtttggctgcagtgagctacaattgcaccactgcactccagcctgggcaacagagcaaaaccctgtctcaagaaaagtttgtaactgtcaaagcaaaaaaaaaaaaaaaaaaaaatttggttataatcaaaggcatgtaatgccaatggccaggatgttcaaaagaaaaagcctgtcaaaacagtgctgcactggccacatccttgaagataaactatctgcaggagacaaaatttcagaagaaccgagaatactgtgaagaaagtcatctgcttatctcagaataaataccaaagatccatctatggtggacagctcagaagagatagggcataagaacagaagtaacgctgggaaaaattagctgaactagactaaacagcagctggggaagcagggtaagatgagaatggggaattagcagaacaagctcactggaaggccttcaagctgagtgaaaagaatataaatttgctacacaaaactcagcccaccatttatatgaaatgttcagaataagctacagagacagaaagattaatagattactggttgactaggactggggagcttggagtaggaaayagagtgtgccttctaatggtcacaaggtttcttttggggataatgaaaatgttctaaaatcagatagtggtgacagttgcacaacttttaaaatatactaaaaaccgtcaaatggttcaaatgagtgaatactatggtatgtgaatttcatcttaataaagaatgaaggtaaaataaaacaaaaatccattaaagattctgattcaattgaaaattatggcaagaagccgccttccttaagctgaggggcccctctagaagctatagtgaggtctacaccaaagagcccacaacccaatcccaggaatctcacagaccttctggggcaatctccaaagtgaaaactggatgaacctgctgcctggttttccaaattacacttgaaataaactgcaggtgactaaagaaaataaggagctcaaaggtcgttcattccatttgattacatattaatgtggaagtggcactcagtccacaataaagcataaactatccctcaaagacacgtgcataactcagcaaaaggggagttaaatctttcagaagagctctgcgtgaaactgcaatataatcttggaacagaggaaggtctgaacaatcccctccaggggtcccacccatctgttacctgaaaggcaccaagctggagacctgagtcacacagacactggagcccagctgcagaaacataaatgcagtctgtctgggatggcatataaaaataaagactcttaaattccatggatgattctaatacaaacctgggactgaaaactaytggattaatcaaaatccttaatgatctagagaaagaaagtgtgcaaaaaggtaaattcaatgttgctcaagtcaccgggcaaatcggcgtaagagtccggactggaacccaagtctcctgactcctaggcttcaggacaaccacacttattacgtgggtgtaggggctcagggaggtcatccttagaaaattctggcctcaaaacgcagtcagatcccatgataagaaaccctagaaaacatacgcctgagctatcatcaggaaaataagtgaccttgagattgggataagacgacgtcttaatatgcaggaatttcattgctctgctgtgtgccccagtgggacctgatgcccaacaaatggaactgaatatagaagagcaatgatttttgtttcacaggccagatctgatctggaattccttttttttttttttaacaaatgagctgactgttataaagtaaacatcaaggaatgtaaaagccaatgctccactctctcagctacacatggagtcagtgctgcctgcaaagaacagagcaggcgctggcagactgaccttcacagaccatgctaaaaccctctgaggaagtgcctggtgaatgctctggttgatgagattcgagccattatgttaccgagcagtgtgcttcttacctataattccactgtccttgctttccagggtggaactagggctgctaatggtctcacagggacttttgttggctgccgtcttgctgacacagctattcaaggttgagcaggggctatcggtgctaggagatgcggtgctgcttgttagtgtggagcaaggactgatgccttgactcagagctgtgcactgcaagatgaatggaaggaggagttagcacggcttacacaggatgcttcgacacatgcttttgtttttgtgctaaaacaataaaactaagaacaggaaaacggaagttttaaaaaaaaaatctaaagagatatgtgtgtatagatatggattcatggagctttatctatataaatgtatatgtggtcttccaaattttgagaaagcagtatctttgttcggttcccctcctttgtgattttcctttttattaaaaggtcagtcttagcaataatttagtgaggatgcacatttgtacaacagaaatggcaaacaggcagacttcctttcatttgaagtctgcagaagacaaatgggttatttgacctctgtacggaagacctgggagctctgtttttgtgatgtttcacgaacactgcaacctgattcaattcctcaagatttatgggctctgcaatcaggggaaggagactggtgaccactcagtctcaatcaatgcatgacaccctcccttgcagtgcagagaccttcaccagggtagaagctccatcctgcattgctattcagatgcacacatcacatctgggaggtggcagggtgcatgctgctgctcccttggaggggaagtgctttcctgatagatggaccatttgatctcatcttattttgtctctgcctcatctcctataaatcttttcctcaccccactgaccctccaaaatctcaacagctaaaaargcacaggaaagcgtataccaaagcaaccagatgagaagaacggtgctataaaggtaaaagtactggtagcattatgaaggcattcttttagcctctttaattcatgtggccattattctctgggtggtgactagaaggttaatgtggacattttcttacgttctgcttctttctgcttttccctacctccccactgcaaaaacccagaaccaaactgttgaaataaatttcaatacacaacagcccagaactcatttaactgaacaatggcttccctgctcaaggaaagggagaagatggttattgcttcgttcatcctctgaagaggtatgcaatgtagtgtcttcctcgggcattaccatggtttcatttttgtcttcaatggttatgtgtgtggcacttgggatcccttctcccagtaaaaatcccagccttgtcaacagttcttgagctgccggcgaacagctcggttcattatcggcctttgcttctggaacaaagaaagaaaacaatgaagatgcccctctggggaatttcagtatcgcatctggatgagttcacactacagctgctttgtctggtgattttgtgtgtttctataaaatgcgcacaaagttggacaacgcagcctgtcctctagcaatacattctaattaagggactgtgacaggttaaggaaacagtaaaacaaaaactccaagtgcaaagggtgagtgagaagagcccagtgttatctgacggcaattcctaattccgagtcatgtgaaaacgggtacttcagacatcagcttgggtaagaaaagggcctatctttcatgttaccctcacagagtgccgggtgtccaatgcccacaggaggctgaaatgaagtaaaaccctagtgrcatgctggtagagacccaggctatttaggtgttggagtaaaactgaaatccaagctctcattaaacaagccaggggaacgacgtggaaaatttggtggaaaacttcctgtgcacatcccacagtagtgaaagtcaaaaccaggatttcaacttgacggtcaatcgtgaagaatccaagttgaaacaaaaatttaaaatcacagtgaaacttgtcccaagagacaggacccagtaccactgttgcccatgcaaagatgtagaaaaatcaagctgtattctcagaatgctgcacagcaatgctgggaaagcccaccttttcttgggttctccctgaggttggtcatctggtttttttgtacttaagagaattttatggttggatttgatttaaatgttgagctgtagtttaaccctgtacccaaaaagcccaaaggcacttaattatggccaataaataaaacgatattcacatccttctaacacgtctctcaccttctaaaatcagcatccatcaggggatgaaaaatttacaaagcaagctgcttacaaagctgtaacttaacaataagtaacctatgacatagtcactcaacattttgctcttttttattaattgtctaggtaactggactcatatgaacctattttgcttagatgtgaaaatctgcagataatgggtaaaggttttaggaaaaataaaatgaggaaacaacacagtgatgttgccgttgagctacaacagcaccaacaaagatcaatgctcacttcgccttttgtaaggaaccacaaaaatcaaaataagcagagcttttgcaaaggccatctggcttattgtcactcacatatcagttttgcaagtcatgcacccaggatggcagctacaagggaaactacgctggcagcatcttcaagaaaggaaaagcttcccaccccttgcttactggtaaaagctcctaatgtttggagtaggaagaatggtttgccagcttggatgttttttagctgctctggaaaactgcaggggtaaggaaaccaaggcttgactattctgggttaaaagagccctgatgcttctggaccatgtgagccaaacatgaaggggcagtggccccaagccaacacagggaaaaggagccaccccagggcgggtcgacctcatgccaaagccgctctacaggaggtcccttcctacctcaaagcacattttgattctcaaggtagctgggcgtttgggaaaggagggcgggaaccaaaccagatcagcagacagaggcacacccaaggggtgaggccctcagaacaggatggcaccgccctccctccgcctctgccccgggcccaggcagggcagctactttatctcaggtggcagctgggctggagggagggaacaggacgcagatggaaagggaagaagtgggtgagggggcagatctccgcagtttctccactccacaccccccttccctttcgaaacaatctccacactgctcccgattgtgattatgccccagaatgtctagcttctggttcaacctgaaacactctgtgtagagagccagaaatgactcccatttggcagctgccgtggaggcagagagagcagctgcaggagcttggctccacagaattcacctccacaacaaacagggccatgcctgtggctcacttgggactggcaggaggaccctgatcctatgtaggtcctatgtgcagcagggggaccgcaacaccccagcacagtggctgctgcctccacactgtgtctgcaaacagatactccaggatctcaagtgtttcattttttttttttaatccaaaaacaacttaccatccaacccatttcagataagttggggagcagtggcgattccagctttaatggttgagttgaaaagggacacctaagccgggtgcggtggctcacgcctgtaatcccagcactttgggaggccgaggcgggtggatcatctgaggtcagaagtttgagagcagcctggccaacatggtgaaaccccatctctattaaaaatacaaaaattagctgggcgtagtggcagatgcctgtaatcccagctactcgggaggctgaggcaggggaatcacttgaatccgggaggcagaggttgcagtgagccgagattgtgccactgcactccagccttggcaacagagcaacattctgtctccaaaaaaaaaaaaaaaaaaaaggaaaagggayacccaaattcatgatcaactgttctcttaactgcacaacctggactttgctgctacccaagttctaaacccttacccggggttgggatgaatggacagacgttattttatttacttcatgtttatatccattaaggcactgcaactgtattcttccaaaggcttcccacctgtcttttcatattattctgtcttctaaaatgtcatcccagtgatcatccccttaaaaggtccccttcagtctgaattccttaatccaatgaagctgtctgaatctctcccttccctaatgcacagagccctctctcactgaacttctcactctggcagaaggaccgcctgggagaagtgtcactgagccatcttgggagtgatgagttgcttaggaactcacatggacacgctgtgaaatggaaatacatgtctacttgcatagctgttcactaaatactgagatctgaacagccagatggttttaggctagttactacaaaagcacctccaagtcaaattcaaacagaccactctaaatagcaagtctattttcattcatgtagttaatattaaatcgctgatcaataatgggtgtacattacccaataccagtgggatgagggctggagagaagacttcacttttcatttcacagatttaaatatctgacggctgtatgatggctttatttggagatgagagaatgccctgggaatccattaggcaagtggagaacaatactccccccagcagcacattcatggaaccctcagtattacatagcgtgaaaggctgactgcatggagaaaggtaaagggaagttcttgaatcacttctgactgcctctattcagcttctcacccccttgtggaccacatatgggggcacaaatgctaaggagcagtccacaaactgaccagctcccgactgccatcataactttaaaccatcagtgccctctacaaccatcttctcatcttccgccactgtctgggaatccagggtgttctcagtgctaaccaccrtccagatccttttgggtactgaacctctctcaactgcactttcttagtgagggaagtggccatacccacctcctacaggttgtgaggctcaaaaccaatgtgtgtgagaaacagcttataaaccacaagatgctatagaattggtcattctctctaccaactttaacaccaagagcccgcacttccttgcgattattttctggtttcacaagttcatatctattttcaagtgtgcttgtatgtcttacataactttctgttcataatttttctgcctcaaataggtttttgtaaactcactattccatgacaacaaacccccttcctttttctgcttaccaaaccatcccaatttggcctgcaccttactgctttcattttccattccaatcattctctcttgtttaaagccaggggaggagcgcaggtccctagtgatcaccaagtattatcactccatagagaagtctttcctccattctcgtcctcctcagactctaaagaacactgagtattgctgacgacattcgtcagttcactatcatgtgacctatcaccatgtgacctcgaagttgacttaataccaagtgtccaagatagcacttgtgaatctagtctgctaaatgagacaggcccttggtttgacattaatcctctgcctctatctatccatgacctgcttctcacttatcctcttgccttccatgactcctacttacaagtattttccctgtttctgtctgctccttctcagccattaccattccctccctccttagagttccaaaaacagtatttaaaaaggaacattggccggatgcggtggcttacacctgtaatcccagcactttcggaggccgaggcagatggatcacctgagtgatcagatgttcgagtggatcaggagttcgagagcagcctggccaacatggtgaaaccctgtctctactaaaaatacaaaaaaactaactgggcatggtagcacgtgcctgtaatcccagctactccagaggttgaggcaggagaatcacctgaacccaggaggcggaggtcacagtgagccaagattgtgccactgtactccagcctgagagacagagcgagactccgtctcagaaaaataaaaataaaaaggaacatccatccatggacctgctctgtttctgtcaataatttgttgtttctggtctgcaataccaaaacatagttatcatgcaggttaccttcaaaattttcatgtcatccaccccatattgaaattatcaccaaacttactatttctccattcaaaatgcctcctgaattagccttttcttcttcagtcatccatcactcaacttaaagtcttcatcctcttaagtctagaggactatcagagtttggatcaattttctcatctctatttttattttctccctcttttccttcctctagagccagtaggttcttaagctttttggtctcagaattcactcttaaaaactgaggactgcaggcttaggagggttatgtctattgacatttatcatactagatattaaaactaagaatttttaaactgtatgttagttcattttaatgttataaaacttcatgttaacaattaatattttaattaaaaaactaawttttaacttatgggtacataggtaaaaagctgtacttttgattttaaagattagttaagaagaatggcattgtttttacaattttacaaactttaatgtgcaattaaatagaggacagctggatttgtataacttcttctgcattcaatctgtggggatcagttcttttggttgaagcatgtgaagaactgcagcctcagacagatacataattgggaaagacaggagtctttttagttaattatagaaattcttctctgatacccagccaaaacttgacaatcagcaatttccatttttttttttttttttttttttttttttttttgagatggggtcttgctatgttactcaggctggttatgaactcctggggctcaagcartcctcctgcctcagcctccccaagtgctggaaacagcaatttcttaaaggtaagttccactgttgactcaatctgcatcgatgaattttttgtactgttacagtaagatccaatggtctgttttatactgtaaatggatcttttacccatgcaagactgtgtaacattatgcattgggtcatttggaaaataatggttttacagattttgcaaatgttgacaaatgttatcacataatatcaaaacatcacattacgagagatctcaattgaaaagtcttgggaaaccatcaagctcaatgtgacaggtgtaaaatttcccaaaaaacctaattttcatttgaaatgtcaagttttattatgggcaactaatcctgtcagagttggttttttgtttttttttgttttgttttgttgttttttttttttttttgagacagagtctcgctctgtggcccaggctggagtgcagtggtgcaatcttggctcacagcaaccaccaactcctgggttcaagcaattctcctgcctcagcctcccgagtagctgggattacaggtgcccaccaccatgcccagttagttttgtatttttagtagagacarggtttcaccatgttggccaggctggtctcaaactcctgacctcaggcaatccgcccgccttggcctcccaaattgctaggattacaggtgtcagccaycgtgcctggcctttttttttttttctattgaagtgccaggctaatttcattcctgttgaagaaaaaatgtgccaaatacctacttcagaataaccatgggttgtcagtcattctttcaaataaaaacaatattccattttaaaagtagcgagttcagcttgcaattcaatcatacaagtgctctgcctcaagaaaaccatcagacttccgagcatgcagaagggctttactcagacatcccacttcatcacacagaatattaaaaagatgggtctccaagggtcaagatttaataayattacttttagtgcttcatcaaggacattcttcagtgaattatttgtgaagccagcacttggcagtgaagaacaccaggactaccagtgtagccagtgccttgacatatactaaggtatcagaagttttaccaacaattgcttttgcagcatcagtgcaaatgtcaacaaagggaaatgtaaataccttctccgtattattacaaaagggttttgtactattataaagagttttgacatcacaaacccctgaaagtgtcttggggactagaagtccacagcctacactgtcagaacctctgaattaagtctacaactgtgttaaataaaaaccacagctgcacacatctctcatcctagtaactgatctcccatctttatctgtttaatttgggggtaaaagagggctctctattctcaccaattccatttccttatcacatacctataacttcaagtcacagaccttcacaagtctcctgaaacagccctgttaagcacattaatttttctttttccttttttgtagtacaccttctcttttgattttcctgtagatctacggccttgcaagcactctgtcctgcaaggtataaagtggcaattgttgtaagagacacacagagggaaaaatccatgattaccagaatactgtggtcttgtgtggtcttttcctgtccctcttgctggtgctccttgcaccttagtcccagctcataaatgaaataccagtttctcagccctcttttgtcaacgacctgtttccctactgtaacttgcctagtctcacagcattacttccaagcaaatggctgaccagtttatatcctgagctctttcttgatacccagtttgattttccaactggtggctggacacttgcgaagatgttccaccagcactttgaagtctmcatgcctgaaactgaactcaaaccaaaacacagtccctgctcctccagtgtcccttaatgtggtctcaaaggcgtgaagttgttgtctctgtctttttcagttcccaggtccttgcaattcctcaagaatcttccattcaccacctcttcttcactgaacctgaactaatttgagactttatcctytcacttaattactaaaacaattttttaatcattcttaaccgtagtctctttccagtcccactccatcctactctgttgccacgtactatagtctgaatgtctgtgtctcagaatgggattagtgaccttataaatgagggagcttgtttgtcccttccactacatgaggttacagcaaaaagatggctgtctatgaaccagcaagtaggcctttgccagaccccaaatctgcagactaccttgatcttggactttccatcctgcacaaatctaagaaataaattactgttgtttatcaaccactcagtttatggtatttttgttatagcagcctgaactaagacaacaggtaaatcttaaggcatagctacaattaagtctttccatgctcagaatctccatctgctggccaagcatagtggttcgcacttgtaatcctggcactttgggaggccaaggcgggtgggtcacctgaggtcaggagtttgagaccagcttggctaacatggcaaaactctgtctctactaaaaatacaaaaattagccgggtgtggcggygggtgcctgtaatcccagctactcgggaggctgaggcaaaagaatcgcttgaacccaggaggcagaggttgcagtgagccgagactgtgccactgcactccagtctgggcaacaagaatgaagctccatctcaaaaaaaaaaaaaaaaaaaaatagagaatctccatctgctgaactcctagttcatcacacagcttggattagtcattacttcctcctttattacagtcacgccatatacaggtctctaatcccctgccagactctaaggctccataaagacaggacccatgcttgataacccatctcaaatagcatttagcatagtgttttttcacagcatagaaactgaatacttattcaaggaaatgcagaatgaatggatactctacttccaagagtctctcttctgtgcacacataccaggtatgccccttttctatacttccatcaaataaaacctcattcaaccattggttgaatgttgcactgccattctaagaagctgaaaattaaagcaggatcaaggttacctcttgggaaagaaagggttttaagaaataaaacatgactatgcatttttttcaatcatattctttttttcacttttttttttttgagacagggtctcactctgtctcccaggctgcagtgtaatggtgtgatcatggctcactgcagcttccacctccctggctaaagaatcctcccacctcagcatcctgagtagctgggaccagagaggtgcactgctatatctggctaattttttgactttttgttgatatgaggccttgctacattgtccaggctggtatcaaactcctaggctcaagcaattctcctgccttggcctcccaaagtgctgggattataagggcgagccaccacacccagcccctttatgctttatacctctttaatcctctatacctgtctgaccatctaaaatggtaataaaaaacataaggtatcaaaatatttacttaagcatataactaaagaccctctcctcccagaagatagtttcacattgaattattctgctctttcatatgtgttagctttatttgcttagtcagactgccaggaaaaaagtttcgtcactgactgacatgaagatatcatttaaaaaaagtttcatcatattttgagattgatcttcacagagcaatgacttatgagactaaaaactttctagcccctcctcaaaacttgccctagtagctagaaatatattaatgcaaacctaaataaattatggttacccctaaatcaaagaaataaagcgtggatcctgttataayaatcatctctaatttatctgaaggttttttttcccttaacgcagatattgtttgtgggtaaatgagctttcccctaaacgatatgttgatttagcaataggaagcttactcattaagaacttattctacctgacacacagcttattaggaccatttgacatgaaaatgggctttgtattttgtttgatgattttattaagtcatccgtttttcctagagtagaaaatgctgtgtttcaaatatatttaaacatactaagatagaatgttttttcctaaagatgtttccaggtgagtgcaaactccttcctttccttcctttcttttttaaagagacaaggtctcactatgctgctcaggctgttctcaaactcccagtctcaagcaatcctcccacctcggccccctgaatcactggaattacaggtgtgagctacagtccccagcttgcaagctttaagaaacaagttatttgcttacaaaaaaaaattcatcttcttacatcatcgaacccacacttcccagaaggctaaaacgtgcatcacacataaatgcaattacttataaataagcarattcaaaatgttctttggtttgttttcctttgatttaaaatccaaacagagagctaagaatcaagagttgatggagctacatgaccaaagcaaaagtgaggcaggaaagtatttcaagcatttaggaataacctgctatttcacgagtccatgggaaatttcaaaagcacttcacaaagagctgttttcagtggagtctgttagtctggtgaatactggcatgctattattgacagcacccagaaaagcgtcttagaaacttaaacaagaatgtccaagggaaatatagataacagaagaccacattttaaagtaaaacttaagtgatgatgctgatattaaaccctaaaaatgagggtttgcccatcatgtatctgtacacacctgggttaacactcaaactcaattagttttagtcggctctatcatttcctttgggttcagtgatctggataaaatttacactttgacatggcagacttaattaaccccattgaaatttaagggactccatggggattacaaaacataccattctatactaattgtcctgttcgactttgttaggcagccacctctcctcatcaaccaagagaaagctcaccctgctgcggcatccaccaacatcatggctatcttcaggcaagaccatgcacccacagacgtgaactacacctgctcccgagacacttaacaaaaatgaaaacataccctgcttcttaatttcaggcgaaaccgaaatgtctggtcctgtatttgtagcccatagatctcataactttggtccccatgaagactaaagatgccgaatcagaaagctcaggtctcaggagtgagcacacatgcaaacttcaggccactccagcaagaccaattgctgcatttgaaatttagctcagcccacagccaagcataagaacacttccattcgtcaagaaaggtggccaattctgctttgagcaagggagaaaagttaacaataggaactatttataaccttttattgcctaataaaaatccaaattttctacccccactcccacaccaggaggaggaggtcccaatccctgtacagaaccttaacgatactcccagccagggaggaagaggttacataatggagcctaggccagccaaaatgccaggggcataattgaccagggctacaaaggctttggtgggtggggaagaagggaagaggtaggtagcaggcttaatctgagccaggcagacagcttagacatttgatgactgatattcactacagagagagagattttactttcctttcaggacaccgaggagagagagaacagactgcctgcccacgtgaacgcacaatcaagagaggcctcatgtaccagcagttggctatcctaaccagacaccacagtggaatctccaccttcaccagcaacattyggtgtgcacaaatcctcagctcaaatcctcttccctcaaccacacaatgagtgcctggacagaaaggaaaagggtggcatttctcatgccaagacacctgcaatagcacctcttgcctgcccagagtgcccagtgcctggycccatcttttccccatgtcccaaactccccttcccttcccagttttcagcttttgctgatccttcctcacagctcatttttagctatatttttaccaccactccagtatattgtcttcccatgtcctacttattacccactccctgccatacagcaccagcaacacaaaaggcacacacaggttaggacataaagggtctgtatctcccaccacccacaattaggcagaggaaggtgccagatatgccaaagtaaaaatatggttgagttctctttcagcattgctacataaacttttgtccacactgaggataaagcaagcccctttacatacagcaagattcctagtcccatgtttctgcagaaaaacagggtggaaattcaaaacacccaaattaaaggcaagagagatgtgagttggggactccccagaaaggaacaaacaggaaaattcttgaattgattttttaaaataaacaactatgaatatatctgttaaaygctgcaaatttgtaatgtcacacatatttccaggtataaaatacatatacatataaaatgtctttaaaaatatttccatcaatttggtttttttttttttttttttgctcctacttcaacatcccctaaagaaaaacttcagatgttaaaaaaagcagccttcaaaagacaccaaatgctttttttaaagctagcaattacatgctttgtccagttaaggtttcagcttttcagccaaagcctgttgttgaattttctcaagcagtagaatattaaaaacaaaacaaaatcttggaagcaatctactgggtgacgcttcctatcctccaagacctggtaggtcaaaattcagaggaaataggactcaatccttaaataatgcatatgtacccacttaactatttatacgccaggtatacaatttccaagaatttgcgttagccaaacagatctctgtaactgctggaggggaaaatacctcccaaatacattctcagcaaagcagtactgcaaggacactcaagtttcattcagaaatgaagtgtcattgtataaaatctttggtagagggggaaggaaatcactgaaattcttaccatgctcatcaggctctgttggcttggctacttctctgaatggcattataactgcatctccaggcactctggggctttccacatacttgggcttcctgacgggacctgtartgggaaagatctgagtgtggctaattttttccagatgcaaacaaagccttggaatgtacagtgtgtgtccttaccaggacccaaatatgcctagaggaagagccagtgccttcccctcccttaaacacgcgcgcgcgcacacacacacacacacacacacacacacacacacacacacacacacamaatttcagtacagacgagggaacgtccagtctggcctgccaaagaagaaaagagtaagctcagatttgagaatgtaaaccctaacaaaaacaaaagctgctctcttgctgtgaagtcgctacagctgtcttcactggtcaagtgggtgattttgacatgttcaaacctggactgctttgtgatgaagggtttgattttcctctaactaggacaaggatgggacaaagacaatttggtagcttggtatctctaaagtcaggaggcaaggattacaaacagccggcctgtaacagcaacacagtctgcgcaccagccacaagaacacaggcatcttatctggctggtgacgcacagtaactgtgcggggcacagcagccagcaagcgggtcagacataggagagaccaacaggcttatctcctacctcctgttcccacagcccctgcttattatcagaaaatccggaattcttcgtaagactggatggaaccctcacatacaatgatgcagccgttttggaaaacagtttggcagtcgttcaaaaggttaagtgcagagttactacatggccctgcagttctactcctatgggaatgtatgttcacacaaaaacttgtacacgaatgctcacagtaacgccatttgtactagctaaaggtacgtcaaatgacaacaacaaaatgttctttgcccacacaatggattattgggcagtagaaaggaatgaagtatcgattcatgctacaacatggatgaagcttgaaaacattctgctaagtgaaagaagccagtcacaaaggatctacatgattccattcatatgtcatgcccagaatagccaaatctttcagaaagtataaatggttgccaggggctgggggttatgcaggctatgcaggcctgtggggtaatggtaagggatatgtgacttctttctagagtgaccaaatgttctaaaattaggttgtagggatggttgtacaactctatgaatatatttaaaattagtctattgtatgctttaaatgggtgaactgtatggatgtgtattatacctaaacaaaactgcttaaaaaaaattaaaaggctaggcacggtggctcacacctgtaattcttgcacttaggccaacacagaaggatcacttgagcccaggagtttgagacaagcctgggcaacacagtgaagacctggtctctatacaaaaataataacaaagaggccaggcgcggtggctcatgcctgtaatcccagcacattggaggccgaggcgggtggatcatgaggtcaggagttcgagaccagcctggccaagatggtgaaaccccgtctcaactaaaaaaaatacaaaaattagccaggcgyggtagtgggcgcctgtaatcccagctactcaggaggctgaggcaggagaatcgcttgaacccaggaggtggagtctgcagtgagctgagatcacgccactgcactctagcctgggcgacagagcaagactccatctcaaaaaataaataaataaaaataaacaaagttagctgggtgcagtgatgtgcgcctgaagtccaagctactcaggaggctgaggtgggaggatcacttgagcccaggaggtaaaggttgcagtgagccaagatcacaccactgcattctagcctgggcgacagggtgaaaccctgtctcaaaaataaagaaaatactgcctattctgttacattttggtccaaaatcacttccttgattctagtgttccttggttgccttaaagtggcttttagcaagaccacaaagataggaaacattttacatcagtaagagaaggggtagtagaagacatgcaggcaggaatctacaactatcccctcttcttagccctgggccatagccctgacagtcccaggggcccagttccaccactgtgtcatgatggggtgatgcagatagaccatccttctgtctcaaacgtcttctgcatctaagaaattctgttcaaaagatggtttatggcgagagatgctgccatctaaaggcatactacaaaagcatttatactactataaaaataatccaattcctagccagctacatgggtgtactacatcttaaactagactgttatcaaataagctaataatactttacaaataaggacggtatttcaaacttcaggaaccatcgtttttaaatgattcatgtagtatttaatcacttggcggtcttcataatttaaccctgtcataaagggaacttttacaaagattaaaatagaatggttacaggggacacacaattgcaatctaagtgcgggatgtaggctattcaacagtatccagactttatctacaacatatatatatatccacacataaatatgcgtagggaaaaagacttgtgggggtttgggggtggagctaaactatttgctgtgtaagagacataaactagaaagaagggcctgaataggacagatacaaatggaatcaattagctgggtgtggtggcgtttgcctgtagtcccagctactcaggaggctgaggtaggagggtcttgtaagcccaggagttggaggctacagtaagccgtgattgcaccactgtgctccagccaaggtgacagagcaagaccctgtctcagacaaaaaaagagaaaaaaaaaaaaaaggaaccagaacaaagacaagaacccatatayacttttggtttgccacctactctctaaggtaaaatgaactgctgacatattttcccttcatctgccctcatccatttgaaggacctggggaggtaaagctctttgttattattgcctgataatttgcccaatgagcaggcatggccactgctcaagaagtgcctgtatttctgctccccttaactcttcagggtacagtaacagcaaatctaaagagatctatttccaagctccaatctacctacccaagagagtcttcaaaactattctctaatagtaagcactttcttaaaatgtgggctatttcattaatgtatgatggttattgtaaatgtctggatcctggaacccagtatcacccagagccttcagaaagcatccacgtgcctgcctgtttaactgtcttagaacggttctattcagatccaacccctaactcatagactcaaccctgaggagccaggatactcaaygcagggactcatgagttgggcagacctaggttcaaatactgtacccaggcctggcacggtggttcatgcctgtaatcccagcactttgggaggccgaggtgggtggattgcctcatgagttccagaccagcctgggtaacatagtgaaaccccatctctacttaaaaaaaaaaaaaaaaaaaaaattagctgggtgtggtggcatgtgcctgtagtcccagctactttggaggctgaagtacgagaatcacttgaacccaggagatggagggtgcagtgagctgagatcacaccactgcactccagcctgggcaacagagtgagactgtctcaaacaaaacaaaagaaaaacaaaacaaaacaaaacaaaactgtacccctccctcctcatgtcccctaactcgggccttaatatgtcccagaccctaaaggtgagcaaatgaacctcttgctacaaggggaaaatccacgcacaaagaccaggcccacctggttcccaggcacactaaatcacagtaatgtcacatacgaaaggagacctagaatataacaaagtaagtaaaatatatattcagtggtcacacaaggcaaagcacgcacatacattaattcactcattcctaataactctgggagaaaagtacaatttccctcatttttaggtcaggaaactgaggttcaaataagttgttcttatctgaactcggcccacacatgacaaagcaggaaggaattcacaccctggtctatgcagttttgaarcccaggcactgaatcaccattgagcacttatacaactatcaaatctggattaaatatgcaattctagaaaaagcccaggcactgggaacttccaccacccagtcatcaacatccatggacgctggctgcagaggcagcaaatcgtttatgcatcctacttgtctctgatcttcccttttactagaggaaatattaagtgaatataaacaactgttctcctgcatgatccttgtatttaaattgcttttcacaaacagctgaacataaagtgctgtaaaacaagataaatttataaccataggttttattgtcccccacaatcactcattagagaatttgtgcatactttgcattaagcagagcagatgatacgtgtttgcctccactccctctcaaaacaccattaaagttgtagcaaaaagattaaagaaagaccagtggggaaaggagaaagagccactggccagaaaccaagcctctgaaggtaggaaacagattgccaaggagcagtggagcaggtggagcagaaaggttagtgttgggtgggggcaggggaaggggcggggggagggggagtgatgagggctcagcccgggccagagcctcggtgacagcaggcccatcggaaggcaggggcgcgggtgacatccagtagtgtggctggttgaaaactactgaaggaaaagtgagaccccccaatcccagaaatttcttaagcctggaacatcccttcccctccctcatcctggaggccaagtttattctctggaaaggctcaattctaagaccatggagagagattcaagagctaaactcatgagtgccgttttcttttcatgttttttttaaacttgtaactgctaaggaaaaagtagattaagaaatattctacatgcagactgatgggccagagacgtatctcccacccccagcccccagctatgagatctgacagccaagcttataggccacggcaggaagagatgggaggattcctctctggggaagctcatcaagagaagaaggcctaaagataatcatagttggggacccccyaccccaagaaaggtagatccctgaccatcatgctgcagcacagcttgccctcaacgtacccctttcaatcagcttttagcaccttatatacaaataaggagccaaggaccaccaggcaggtgaggaaagacctaccctgaaagacagcaactgacacagattaagaaaggaactctgagttgggcacggtggtgcacgcctgtagtcccagctacttgggaggactgcctaagcccaggagttcgaggctgcaatgagctatgattgtgccaaccctgtctctttaaaaaaataaactaaggaatgagagaaaagaagaaacgccctatagaaagaaaagcaatactgtttctattacacaaaaggatactgggacaagggacatctggagcccatgatgtgggcagctaagcaggctgcggctacagaacaactgcaggccacacagtcaggagccatcacagtcaccaagcgccaatcacacatgaccacctattaaaccacaatgacactaatcgctgtgccatctatacggaacactcccccacataaagcagccacagtccttatcaacagagatccagactgaaaaatccatctccccaagccctcactcarggaaaactactgcccagcaccttcccctcacaactttttgtttaaaaygaaatattcaagcataagctacttttaacttcccccttttacttaaaccaagtgttatgagrttaatccccccaaattaaccagaatgtaatactacataataattacccagaaagcatgatattccagctactgggtatgttttaacgcaggaggctcttaaaaacaaaacaagacttgtctgtggataaaaacatgaaataaacaacaacaacaacaacgagaacaaggaaagaccgtctggtattagctgacaaccagctcctctaggagctggcatgtctccagggctgggctcccagtcccccgccgcccccggtactggtatcctgctgccgccgcttttccagctgtaacgtgcacaggcttcaaatgtagattctgatgttcaaggtgtgggctgggaccacagatgacactttggtagcacgaacggggtctctagggaagaccgctgtttaccacccactccagtcaggttcaagtgaagtgcagtggctgtgagtggagcaccaacgtgttcagtttacaagatttaagataaatgggcattaccctccatcataaattaaagctacttcatctgaactctagatccttctcctcattccaatttccccaggccactgcccctcccctcacaatctccactatgtgatacaggagaaggtggatctcaaagttataaaggacccttaaaattaaaaacaacaaagtgccaaaagtaagttacacagccataaacccaaagatatcaagtatgcagcttgcaaaagaaaaaaaaaacaacaaaacaaaacccaagcacctgtcagcttctttaactgtgtagcagggcctgtgtcagtctggaaggatgtggccagaaccctcccttaattactccactctgcagcccagaaggtacagcactctccccattcagaattctgcctttacataaatctccaaatagactttcccagcggccagttttcctgctttttgacattttaatcacacagctgactattttgctgcttagaaactgccacataaggagtattttttaaaagagatggtagaaataaaccaaacccagctttatctcgaggcagtgaaagggagaagggcagggattacctttcatttctgagtgtttcggttaaagataattatatatttatatgaaagcaatatttgggacacagaacacctgaggctacttattgcatttaaagtggatcttrcatttttcatgatatctggaggctgtgaaaagtgacactgtatgttatcaatcattttagggatttttttgcatcctgaactttcacagtaaaggttcctgccaattttatctgatctaggttttcattccacagtgggaaatttcacaagaygaggaaaataaagagatgagtaagataatattttgggggcagggggaacctttatcactaaggcaaattgcattaaatagccaattcctaatggcaaaccgtggtaaactaccagataagtcttggattttaaggagcaagacatccagacagagcttctaaagtttgacccctcttcccctgcccccccaacaaaagagtgcttggtcagggaggagaatgaggtgacatgcaattagggactgaaaaaagatgatgacttggcctacccaagcctgtgggataaagggagtctttataacaggaacatgggctggctccctgtgcttytgtctcttgcctgagttgaggcacggctrgggggacagaaggcaccgyccaaagacaccatcttacagggtaagagcctcttgggaagattcaccttgggggaaggagacagaaaatgaactgaccaagctggaaaaccttggccaaagaggagggcaatttcaaacacagcctggcatccatcccttggatatctcccatgagaggcagaaggggattaagtaactaaactgctgacagctctcctccagggaatgacaaaacgcagcaccaggccccccacaactcctgggatacagggtatggatgaaggacaaggcacctggaaacagaagtgcaccagctgtcccagcagacaccctctgggtacttccagaagcattcaggaacacttttacaagggcctggggccttgtatgaaaaggtagtggcaaaagatcagtgtgatttgagtcactactactgggacctcatcctaatccaaagacaagtgagatctagggaaattcagactgcaattctagggaagaaaaaaacagaagacaaaaaagtgtgtcacctgctgatagtgaagaaaacacaaaagtcacctaacaccactcttaataagcctccttttatttatttcaaataccttgtttgcgaagatccactgggaaagggcagacagcctttattcattggtgcaacgcctaagacattgtgaggatgtaaatgttcacaatctggtaggaaaacagtatatcaaactggagccatgctccttttttccaaattgtatcttaagttccaggatacatgtgcaaaatgtgcaggtctgttacataggtaaacatggcaatggtggtttgctgcacctatcaacccatcacctaggtattaagccccacatacattagctacttatcctgatgctctccctccccccgtgccctgacgggccccggtatgtgttgttcttctccatgtgttctcattacttcatccatgtccctgcaaaggacatgatcttgttcctttttgtggctgcatagtattctatggtgtatatgtactacacttcctttagtttatcattgatgggcatttgggttgattccacatctttactattgtgaatagtgccacaataaacatacgtgtgcacgtctttacagaaagatttgtgttcttttgggtatatacctcgtaatgggattgctaggtcaaatggtatttctggttctagatccttgaggaatcgccacactgtcttccatgatagttcaactaatttacattcccaggaacagtgtaaaagaggtcctgttcctccacagcctcacgagcatctgtttcttggctttttaataaccgccattccgactgacatgagatggtatctcattgtggttctgatttgcatttctcaaatgatcagtgatgttgagctttttttcttatgtttgttggccatgtaaatgtcttcttttcaaaattgtctgttcatgtccttcgcccactttttgatgggatttttttgtagccatgctcctttcaataaggtatcattaaaataaatgttaacactttcaagttccagtttgtagtctacatgtttatagcatcatgagtacaataagctcctagtacaacaaagtaacttgagtaacatttctgctttcttccagtgcaatctgtcatgctgttctcacactgtactaaaattgttatatatgaaagcatggaaatgcattaattcattttatttactcaacaaatatctgtgacacatccactgcataccaggcacaagggtgagaaccacagacatgactgaactctcgatgctctcggttaagatggcaagagtctactatatcatttgaattttatttcaaaacacttcaacataagctgggatatgtccagtggctgtaagccaactgcctaaaagcaatgaattgtcttaatctggaagacaggctccaagagtagttaaccagcttttaatcaaaaagccacactcaagagacactactgcaagccagtctgctagctatccttatcaccaaccaagagcaggttatgttaactagtatactttgggtcagaaatgggctttcatattggttaaattactgactttgttaattagtattacagctgttggaacattttcagtggtgaaattgatgatatttgaggtaagggagttgactggaaatgtcagaaacactctgcctgtgtgtgacccaaatataaaaatctagcaggccagattgtaataagcctcagaaatgtaaggctcaaggttaagaatggtgccctaggtttgataagtaaatggccccaggtccagctgctgattcccaggaattgttaagtccctgatgtaaaatggcaggaaaacctgaattctgcctttggtgggccaaattctaaagatatcattccaagatcccatcccctcattactgaatcaaacacaatctgggtacgaccatgtagggactctgcagatggaattaagaatactaattagatgaccttcaaatagattatcctggattatctgggtaagcttgctataatcacacagaccctcgaaagcagaagtgagaaaaggcaggaggaagggtcagacactaaagtgtgagaaggaagccacctttctggcattgaagatgaaggaagggaaccacaaacaggaatgcaggcagcctctaaagttgagaagaatcctcagctgacagccagtaaagaaatggggacctaggccgggctcaacagctcacgcctgtaatcccagcactttgggagaccgaggcgggtggatcacctgaggtcaggagttcgagaccagcctgaccaacatggtgaaaccccatctctactaaaaatacaaaaaattagctgggcgtggtaggcacctgtattcccagctactcaggaggctgaggcaggagaattgcttgaacccgggagtcggaggttgcagtgagccgagatcacgacactgcactccagcctgggcaacagagtaagactctgtcaaaaaaggaaggaaggaaggaagggagggagggaggaaggaaggaatggggacctcagtcctacagtcacatggaactgaattctgccctcctgaatgagcctggaagtggttcatcccctgagccttaacagaacaccaccctgctaccgtcttgattttggcctaaggaaacctagagaagagagccagatgtgcctggacttctgtcctaaagaattgtgagataatagatttaagataagcttgtagtaatttctcagggcagcaataaaacactgacataatgtctatgaaacactgtctcatgtgctacaggtaaacaccaaatgcaagctgctgtcagagcagactcctgaaaaggacaaagctggagcctcaccaggcgtataaagcaggttgtgtggctgtgctgtgacagcctastaataaatctgtatgggcagaactccacctaagccttattttcattcatgcctggttgtgagctcacaaggaggaaatctctagctcttacttcctctgacttttggtagtaattayaatgtgccataaagaatctaataccagctgggcatggtggctcacgcctgaaatcccagcactttgtgaggctgaggtgggaggatcacttgagcccaggagttcaggaccagcctgggaaacatggtgaaactccatctctacaaaaaaatacaaaaattagctgggcatggtggtgcgtgcctgtacttggtgaggagggcggggggtggggagagctgaggcgggaggatcacacaagtcgaggctgcagtgagtcatgctcatgctactgtactccagtctgggtgataaaatgaggccctgtctctggaaaaaaaaaaaatgcagctgatttccttagctttgtaggaatggttaagaaaatagctacaaacaattgaacaaccacaaactttgatttaaagatatccctggaggaaagatcgatcttcctagaatggctaatttcagagtttgtctaaggaactcaggaagtaggccttaagccacagggctcttctgttgtttgcacaaggaggaagtgagccctccactgcctgaagtaactgactccaaaaggaaggcaggatccttgagaattttctttccctgtgggttcagaccagcccctggaccaacagcaacagcatcacctgcgaacttattagacatgcaaattctcagcccctccccagaccacagagtgattccgatgccccactcaggcttgttttttgtttttgagacaaaatctcgttccgtcgcccaggatggagtgcagtggtgcgatctcagctcactgcaacctctgcctcccaggttcaagtgattcttatgcctcagcctcctacagacaggcaccaccacacccggctaatttttgtatttttagtagagacagggtttcactatgttggccaggctggtctcgaacaccagacctcaaatgatccgcccgcctcagcttcccaaagtgctgggattataggtgtgagccacctcacctggcctcccactcaagtttgaaacccactggcacggcctgtctggagtagctatgcaagaccttgcccacagcccaagaaagctcaaaattcaagtatgaagacaaaacagtatgatgttaaatgacttgggaaaaacagcagcgggagggaggaaggcagcgattgagctgtacctgaggctgggggcacgaggggrgactggcgtcactgaatgggaccacagaggtgggaggcagggggttttactctttccatttcctaaacgaagtaaaagcagttggaggaagagaactttgtctctgtttagcttctttacagtgtttagcacagagctatgtactcaggtggggcacaaatatatatttcaataagaaaaagtttatttctgctttttaagtaaattatactcatttgctataaattagtaacttctaagaaatcctgtaatttgggaatgtcttctccaatatttactcagtacagtggctaccacagaattccatttcatttctgtcagggcaggagattcagaagtaaggggaggaatgtgagaagggagatatggggaggtgttggaggggttgaggtggggtgaggggagcgtgggtcccagcccagtcccttgaaagcttccactgattagaaggtgctccacgacccctccctaaccagccaggagagggtgaaggcagagcagtcctatgtctcactcaatagcactctctctttccatcctccacagtgaccaggtcaagactatcccagccttctccaacaaatctaatacacgcacatacacactccacccttcgccctatacagaaaaaaatcaccatcggaagggagcacctgaaggaaattcttcagccccatcctcacacctacctgctctggcatgcatctgcatacatccacacacagcgaatcctctacctgcactcatgggccaagatcagggtgcagagatcaagggcaagaacagggaacagagatgcagaacgcaattgtctctagagaaatacctgtaagcactgttgctcttaataggatttatgagtttaatcagattaggtccaaagattagctatggatcatagtttcaacctgactaggttgcactgagaccattaaaagggccagcttggacaatgagctaccactgcacaccttttaggatggctaaaacttaaaaaacaaaatataaaaactgctggtgaagatgcaaagtaactgaaaccctcatactgttggtgaaaatgcaaaatggtagaaccactttggaaaacagtattactcygcaaaaaaaaaaaaagaagaaaaaagaaaaagaattgatayccactacaacatgaatgaatcaactgcattaggctaagcgaaagaagccagactcaaaaggttatacacaattctaaacacgacatctgaaaaggcaaaactataggtttggaggacagttcaggggttgtcaggagttgggtgttgactacaaaggagcagcatgagggaatattttggggtgaaagaactggtatctttgtggtagttacacaactgtgcatttgacagtcacagatctgtacaatgagaaaaaaaagttcatttttgctctatgttaattttaaaaaaacacattaaattttttttttagttagaaaagagggtctggccacttcaatgataatagtgatacccagttataggaagtccccaagtctcaaatcctgggtaaacatctctgacccatgtatagagagcaacagctaaaggccagccccagcatctatcatctccttccacctctgtaagaaagccctaatttttcactattttaaaaaataggccaggaacagtggctcacacctgtaattccagcattttggaagaccaaggcgggcagatggcttgagcccaggagttccagaccagcctgggtaatatggtgaaaccctgtctctacagaaaatacaaaaattaggtgggtgtggtggcgtgtgcctgtagtcccatgtacttgggaggctgaggtgggaggattacttcaacctgggaggttaaggctgcagtgagccgtgatcctgccactgcactccagcctgggcaacagaacgagagcatctctcaaaaataaataaataaaaagtttcaaacacttggaaagggacaaaagagataacagggtgtaccttcagtgggcctggatgttgcttatgtaaagcagaccctccgacagtatctttccatagctgtgtacactcttgactttctattgactagtttacaggtctgtaaattgcagaaaacttggcagtgcaaatgattcctgtccctagcaatgtttgtccataccaattctctggcagacaatataaatctctataacccaaattcctaaaccattaacatctttttggattccctaattaatgaattatgctattgcctttctcgtaactgctgggcgtagtggctcacaatcctagcactttgggaggccaaggcaggtggatcaccagaggtcaggagtttgagacatggccaacatggcgaaaccccgtctccactaaaaatacaaaaattagccaggcatcgtggtgggcacctgtaaccccagctactcaggaggttgaggcagaagaatcacttgaacccaggaggcagaggttgcagtaagcgaagattgcaccattgcactccagcctgggcgataagggtgggagtccgtctcaaacaacaacaatagcggagaaaattatgctttagcaccctagtgcaattaagtgcataaataattgcatttcccagcctccttggcagctaggtccacagagccaatgagaggtgagccagcatcaggtaggatttcaaggaagactgtttacaaagatgagccagctgggagaaaccccattttgctcttctctttccttcttctggcaggacatgtggacatgctagctagtactccagcaaacatgttattagaccatcaggttaccttgtgttaggaaggtgtggtaaactgataatggttcccaaagacatactccctggaacctatggtatttgctacttgatttggaaaaatcatctgtgtagatgtgactaagttaaggatcctgagatgaggggcttatctaggtgggcctcaactgccrtaagtaaaagagaaaggagaggccagacacggtggctcatgcctgtaatctcagcactttgggaggcagaggcaggaggatcgcttaagttcaggagttcaagaccagcttaggcaacacagtgaaaccccatctctacaaaaaaatacaaaaattagttgtggtgtgtgcctgtagtcccagctacttgggaggctgaggtgggaggatcacttgagcttgggaggttgaggctgcagtgagtgatgatccattgtgccaccacaccctatcctgaaatacataatttttagctttaagtgaaattcattctaaaaataattaaaatttttttaaacacaagattgacacattgaattttaagtcttgtgagaagccatatttaaaatttttaaccataatgcactgaatagcaatgcaaaattcatatcatttgtacataaaatgcttctctcaacatcaaaaggctcaaaatagtccctccaccatgtaaagtcaatctctccctttcagaatactcaatggaagttcaagattctaaaaaaaaattaaaaaaaaataaacaaactactccctcaagtccaagtccaccattgtctactccctatcccacagtgcccaccctgctggtaaggactgccatctcatttctgttaccctctgaattctagaaccttccacatgctatcacagtcatcctttccccacagcacatacactattgtcacctacgtccttgtccatgtcccccagcagactcaactcctgggtgtctctggcatctctggcatctgtacaaagatgctatctctgaagtcaggagtagcccacagtcctgttgcacatggtcagaaggctggcatgtcagaccacatgcaaggggcctctaacaatcccacaacaggctgcacctgagactgaaagaaaaggcagtatgaaggctgggcttgcgagcaagaggcactgtcctcctctgacctcattgttgatgagctcacactggcaagcacatgctttccattatctgaaacacctcttccctcttgcaaacatcaagcgcagcagcaaagccatatttgggggctcagccattatctgtttagagtctaaaaaggacaaattgcactcacagattgcataggtaaccygtgacatcagtgagaggggccagataagccacgaccgcagctcacctcctaagagtgcctgctgccgtcccctgcagcaacccaggccatcgtgacctctcagctaccgcatctgacttcctatcagtgttcagcattcaggacaaaacagagaacagggtttccacattaaacatgctacagctcaggttgatgtcgaatttttattggttaaagcaactacagtcattgcttaccttactctaaaacaggtgatcaagattttacattacagttagaattcctgaatatacaatgatttattacaacagagtggctgcttcttgattttttttaaaaccaactgaaactgatctccatcttagcacctgctaacagtcaatcaggtcaaccacaggtcatatgaaaccatcttcccaactcccccacctccactggttctgaagagtgggtgtaaacaatgggttaaacaatccaggatgcagacagctgttaatcataactggctccacattcccacacattacagtggacttcagtagactccctggctacttcctacataggctcaaacctcttacgcatgtgtacaaaaacatctgaagacatttgggggcaaagaagaatgaatattaaaataactgcccaatctgcctataccaaagaaaaatatgacagaggcttggggttataacctattctacttttacgcctcagctattgaacaattttgaacaatcagagacaaaaaggcttaccagaaaatacrtgattaacagtatgtcaaacaaagtaactacagagattttttactttaagatgtctgctgtttgtgtacccagtcatgtacaaaggcaaagttaggaggtagcttctctttttctttaagagtttaaagtgtttcttcttttctaaagtactttagctactcgaacagcatgcagacagggtaagaatcacagaacctggccgaatacacagctcattcagcatcaaccacaaggtggcgctgcttcaatgctgattcagatgcacagccctgctagagacgtttctccaccatcaaggctacatttgcttgtgtcctttccaggccggccaaaaatgctttctccttaaggtttcaggtaayacacatatggctaacagtctatattgagaaagtaaaccactgaggcacagcaactccctacccccatcttaggacagactctgactgcacctgagaggacttatctcagcctcccttagttaacaaggcaacaaagtggggcagaaaggcttgcatactcctgaatcacacccaagtacaacactgggagttcatcttcccgggaatccatactgatgaaaataaatgggaaacaagacaaatctcctatgcagaaaaattccaaacaatttacatagatcctccactctcatggtggtggtgtacaccaccatacccctaagtgtgggctgcacacagcgacttcctgccttctggagagtacagcacactccacatacagcatctatgcatgcatacaaatgcgttcatgttaatatatggaagggggagggaaggaaacgaataacttcaccttggagcaacctggcacccactacgttggccaggtgatcgaagtcaagacagtgataagccaggtagctactgtgtacatcaaaagatgggagcagaaggcacttcacttctgtggtttctgccccaaaacctgtaactccagtctaatcatgagaaaaacaccagtagagaaaaacaccagtagagaaaaactccagtacagaaaaattccagtagagaaaaactccagtagagaaaaactccagtacagaaaaactccagtacagaaaaactccagtagaggggcaacctgcaaaacaccagcccagcactccccaaaactgccaaggtcatcaaaacaaggaaagtctgagcaaccaccacagccaagaagagtctaagacctgacaactaaatgcaatatggtgtcctctcggatactggaatagaaaaaggacattgggaataagctttaaaaaaaaaaaaaaaaaaaaaaaggaataggccgggcacggtggctcaygcctgtaatcccagcactttgggaggccgaggcaggcgggtcacgaggtcaggagattgagaccatcctggccaacacggtgaaaccccgtctctattaaaaaatacaaaaaattagccgggcgtggtggcgggcacctgtagtcacagctactcgggaggctgaggcaggagaatggcgtgaacccaggaggcggagcttgcagtgagccgagattgcrccactgcactccagcctgggcaacagagcaagaccccatctcaaaaaaaaaaggaataaagtacagactttagtaggtatcaatatcagttcattaactctgacaagtgtgtcatactaatgtcctatgttaataagaggagacttggtatggagtgcacgggaactctgcattctttgcaacttctctataaatctaacgctattctgaatttaaattttattaaaaatagaagttcacccaagctttaatggtaactaagaggtctcgtcacatacaggagagtccttttactttctatgttgtatttaggttgtgttcctgacagtcctttcaccctcagcatagaggagggtaaagcagcaaacactgcttcactgaaggtcatgtgaaggatatggtggaaaggcagagtgtgagggctcctgtgccatctgcacctttcgagagtgatcgaaggccactattccgggtggcaatgaagtaaagtgaaaatgacccaggctttggaattagactgargttcaaatcccaactggttatcaacgagcagtctaaccttcagcaaagttataactaagctcttggggcgctccatcaactcactgtaagtggggttcatacctaagctgcaggcttgaaaatgttcatgcagtgtctagcacatggttgaataaatgctaagtttccatttctcctttcctttcctgagacaaaagttaacattggccaactacagcccaggggccaaattggaccactgagtgtttttatacataaaatatcactggaacacagccatgaccactcatttacgtattgtctaaggctgctctgtactacgatggcagagttacatagtcgcaacagggactgtgtggccctcaaagcctgagatatttactatctggcccttgacagaaaaagtttgcctattctgctcaaaggtcatcaattgccatatttccaaaagctaacaggtcctttgttttttttttkttgttgttgttgttgttgttgttgttttttgagactgagtcttgctctgtcacccaggctgtaatacagtggtacaatctcggctaactgcaacatctgcctcctgggttcaagcgattctcctgcttcagcctcctgagtagctgggattacaggcatctgccaccacacccagctaatttttttgtatttttagtagagacggggtttcaccatgttggtcaggctgttctcaaactcctgacctgatgatctgtctgcctcggcctcccaaagtgctgggattacaagtgtgagccaccgcgcccagccactaacaggtacttttcattccttatcatacttgaccttcacagcctctgcgtcagatgccctgtttcaaaatcctcttttctctcttgaggccagcaaccttagctcagactctgcactcaactccttggtgctcttcacaagcatggcttcgtggagcactcaaagttcaagataggcaaagtcaaaccactccacactgtagttaattacaccagcacctacacctgtggtagggcagaaacagcattacttggaatcccaggaccaacgagggctgaaattctacctttcagaaccttagaattcctacccaaaacacaggaataatgcccaccttggaaatactatgaaaattaaactggggagaaaaacaaagtcatgaggcacaacagaatattttgaatcttgacctatcaagaaaaccaagctrgagctcggcaagcttcccaatggcatgcaaaaaatgagttaagggtatgccaggatatggattctctcagctctccggaccgttgggcagagtctggggcagtgcccgagggacagttcattgattccatttgctgtacaaaaatctcctatatgtgccatgagattaaaaggactaggaagcccctgccttgagtactttccttctgcactttcttccttccctaattctcatgtacaaacaggtcaccacaacctaaagattctttttcctaaaactttttcaaatcaacctccaccacactgcacattcccctgcagagttaagccactatactgcatttgactcaaggagtcccagtctcaaccccaaggaggcctgtgtgaaacagttaccgtcctagaaaccaaatctatttatttcatccctcttctgcttaactctgtcataggacatcactgccaaaataaaacacctggctcctccaatgacacacacacacacggacacacatacacacacacacacacacacacacccttaccagcttccgaaaggagagtctcgctcttctccgtgaggtcacaacactttgtagacacctcaatgtcttcactgttgtcatctcttgccaaactgggaggtccccagagcttagagccaagtatttatttacctttatatccaccacatctctagtccagagcccaacacatggctggtgctcaataaactggtataaaacaaatgtttatggaagctcatgaaatcactgcgtgaaagactgaataactcagagtgcctctgaggccatttgcaaaaataaagatcaccaccaaaagtcatcatatccacccayacaatgtcctcttacaatgaaagggatcctggaacaggctctcaccaaaacaagtccaggagaactgggggagtaagagctcttgagatgaccacagaataaaatgaactttattttaaagcccaaagggcacacaaactaataatttccaggttgaaaggaagaaacaggaaaagtataccataaaaataataaaagagtgtcaaaatgcaaataaaaatgggattctcttaagcagtctgatatatgtttcttgctcatttcggggaaacatgttgaactcaacaggtttattttttcctttctgggtrtcacacactactctactagcaacactgtcagtaagtcaagatttcaggctacagttaagatgtttccccccaccttaaaagcacctgcttgcctgttaaaataccacaaactrtaagaaaaaattaastgtacagtaaaacctaaaaccaagtaaatattagtaaatattacatcctcagaaactaatggatagctccttgacctggccactgatatcatttcttcctgacaatcttatgggactcaggtggcccctgcaaggcatctctttacagccaggccacatctgtcctcccctcaggaggacagttgggtgcttggttggctccctaccttcagtccccataatctttggtatcagctcgttgtcttgtgaactgcttttcacactcctctaaaacttggttccttgtgctctcactgatctttatcacttttaataaaagctacaataggactaagaataaataagcataaagcatttggctggaagcaacacacacttcaggaaatgaaaaccaattaagtatctggcaagacccttcccacagaagctgtagatgggtcagctcatccacagagccgtgcccacaattcaaaaactcagatcccaatgatgaataatttggttttcatggtttcaacaatatttgctaacccaagtccaaatgtcagcaattagatttttttgttcaaaaaatttttaagagactggagtctcactatgctgcccaggcttatcacaaactccttggctcaagttatactccagcctctgcttccccagtaatcgggattacaagtgcactgctgtgcctggcaagcaattagatttcaagagtcctccactgaaggagtggtgccttctctattctccaggtgagagaaacagactaaaggcaaaagaggatgatacaggagagaggacaataaaaggcagaaggggcgatttaccccaatctcagatgtcaggaccagtttgatggaacatggcaagggcagcattcttccaacatattctaggagccaggcactttacattccttccaatcctctcaaagacccatatggtaggtaggttattctcctttctcaatgaggaaaccaactattagagacattaatttagtactcttctaaggaaacagagccactaagaacaaggacttgggattgamcccaggtctgtctgtcctcctacaatacaataycctgggtagaatttttctgtttaggaggcagtaaaagggacaatatactaaaatcatctaatgcagctaagatttgcttaaacttctcatgcccataatcccagcactttgggaggccaaggagggaagattgctcaagtccaggagttcaagaccagcctgggcaatatggctgaaggcaacagggtgaggcagagaaaacccttctctactaaaaatacaaaaattagccacgcgtagtgacacatgcttgtagtcccagctacttgggaggctgaggtgggaggatcgattaagcccaggaggaagaggttrcaatgagccgagattccccagcctgggtgacacagcaagaccctgtctcaaaaaaattttttwaaaaaatgccrtaagtttaaaaagaaaaaaatctgcttaaacttcacaaccttaaaaaaaaaaaatactggctgggtgtggtggcttacacctgtaatcccagccctttgggaggccaaggcygggggatagcttgaggctaggagtttgagagcagcctggcaacacagcagaaccctatctctataaaaatgcaagataaaaaaattacccggccatggtggcatgtgcctgtagtcctagctactcaggagacccaggtgggaggactgcttacacccaggagcccaggagttcaaggatgcagtgagctgtgattgtgccattgcactccagctgagcgacaaagcaagaacctgtctcttaggaaaacgagaaaaaaaaaaaaaaaaaaggctgggtgcagtggctcacgcctgtaatctcagcactttgtgaggccgaggcrtgcagatcacctgaggtcaggagtttgacaccagcctgggcaacatggtgaaatcctgtctctcctaaaaatacgaaaattagctgcatgtggtggaatctgcccatagtcccagctacttgggagggtgaagcaggagaatcacttgcacctgtgagggggaggttgcagtgagccgagcaagatgagatcacaccacggcactccagcctgggcagcagagtgagactctgtctcaaaaacaaaacaaaaacaaaaaacaaaccaacaaaaaaacccaaaaaacttactgagaatattttgcatgcctacattcaaattttaatgtacatatgagtgcatacacattcattcaactctgagtgcacatatctgctctaatagcaactgtataactgaaaaaagtgaattattttgtaaaaatactttcaagaaaagaaatccctactgaattttcactgaagagctgtagtccacaatctctttctgactgacacaacaggagattytagtttgtacgtctcacttcaagacatacaatttctgtatcaaatgttaacactagactctacaaggcgtacaatgggcatatatttttctgtgattaccaaagaccttcaatatccaagtgttacatccaaagtcctggtgaaacatcaaacaaacttcaaacagcccaagatagaagcctccataatactcgctgtgttctcagaggacgcctccatctggcatcatggtgcagttgtgaccagggcacaatgacctcacttgcattccattgtgtgcactctaagaggaggaggcagcactgccaactgtggtgcagactcatctgctggtccctcagcccgtctcagccccacgtgcccctcctatacgggattctggtgtaccaggtatgtgtttctggtacagtgtaatcctgagtacaagctatctacttcatctggtgctcgtccaaataaacaacaatctgtttaaatggcagaacaacggctgtgccatcargagacagcatgtctgcagatggcatttaagccatctgagggatgttcaagggtaacctgacacaaaggcttctgcctcaagtgctgactttatcacttacctgtgtaaggagcacctgtgtttctctgctgtgttgcacagctttgaacagtatgtagctatgtgctcagtttcaaccggagttttgttctcattgcttggagagcaaacctggaccaccttgcagcatttatactctccatcagcttcatgaatcacaggctctcatttccatagtgtgcacatggcagcttcacaaattacccaggcagggcaccaccaggcatcctgcctttttgctttacctgtgtttctcttttctgccaagaaccattgctttcttagacctttatactcacatcaccagttctaagagctggcttcctgtatagggtaattctacatacataacattttaatcacttcacacaaatcatgtgcaaaccaggaraagatgaataatccaagaagctggcagcagggctagaagtggaacccactgtgttccactttcatgtcctattcccagggaacaaagccccgaaggagggctgtgctgcatgtcaagacgacacatgcttgccagaaaacacagaccagagggtggaatcccactggagggcatttgactgaggataaacaatcaaggggacagatactatgggaatccattcatggcgaccaagtcacacgagggaagctgaagatgggctccagggaagatggtgacatggaaattgcaaccaccacgaccctacactttacagtctacatcttgtttaaatttcacttgtcctatgtcttagttcaggctgctacttttcacataccacagaaggctgggtgccatggcacacacctgtaatcccagcactttgggaggctgaggcagaaggattgctttagcccaggagttcaagaccagcctgtgcaacatggtgaaaccccatctttttcaaaaaatttaaagaaacaaaaccaaacatagattgggtggcttaaacaacaatttatttctcagtttggaggctgggaagtcccagatcaaggaaccagcagaaccagtgtctgaggacagtgcctactcactgtacagcagtgcctccttatctgcagaggatatataccaaggcctccagtggaaactgaggatagtactgaaccctgtatacacactatgctttttcctatacatayatccttcgcttgcactaaatggctttgtgtcactcatttcaggggacctctcttgcagaattttctccatagtctcaacgctttctcttggcaacatgttgccaacaaatggaactcattttctgttcttgtcttcaacccataaatggaatgcctttttcatcttaactaagaatttatcacacacagtggcagtaacttatgcagtttgaggtatgacagcaaaactaccatgaatttctttttcctttgtcataatttcatggaagattcattcttactatagatcttagcaacctcagcatacaatgttttttctttattaagtcaagaacttttgcctttccacttaaaggaagcactttacagcttctccttggcatttccaaattgccagcgtcacyactcttgtgctttggggccacagttaagtaaaataaggttgacttgaayacatgyggtgtgatactgtgacagtcagcctgacaactgagagggctactgagtgattaacaggagggtagcgtgtgcagcacatggacactgggccaagggaagattcctgtcctgggctggaaagagctggatttcagcatgctactcagaatggcatgcaatttatgacttatcaattatttcaagaatttctcatgtaatatttttgaaccacagttgactgcaggtaactgaaaccacagataaggaagaactaccgtatyctcacatggctaacagaaagagctctagtaccttcctcttcttatataagggcattaatcccatcatggaggttccaccctcctgatttcaaaacttaatcacctcccaaaggccccatctcttcatagcatcctaattagaggttacagtttcaacatcaattttggggggacataaacatgcagtccataacatcttagaagccccattattaccccatgtttcagaggaagaaacacctatggcctgctcaagcctacagagccgggacatgaatccagctgcgtccacctgcccatgactggggcagacagacacactcatgactggggcagacagagacagcctgcatctgtcaggacccttcacatctcattagctgaactgcagtctcaccagttctggatttagggtggtgaacttactctcctagcctcttcraaaggtcagctcattagctgtactcaggacctgtgaccaataaagaggactttgttggtggtggaagtaacaagaaaatcacatctcctttgaagagtgtttcctaaattatacttctcagagcccttgtccagaaaaggggctccctgcatggcacagttaactatctcgataggccccaccccaggcaaggctttctggtttcagtgctccagascctaataatgaagtttttcccaaaggtaccagtttcccttttgtaaggcactctggttcccactgggctctcccttctagaaatcaccactctgtgttcatcttagtttcccacctccacttggcacaaccctggctgcccctctgcctggaggcagccagccacccctgccaacagacgcagacgcacgcgcagtcctgtcacagcaaacctgatgagtcgagctggaatatcaggttttctttcctgtttatttctgctttacactagtgctcattagcactagatataatcacctgcatgggctcctgtgacttctgtttctctgtaaatcagaaatgatgaaaaagatctccaccaccaaggcccctgccctcatctattttctctgaggtgaaaacattcatttctgagcatggtactgggtttgttccagccgccatctgacaccaccacagggtgcagctgacactgctgtaaagtgtgactggataaaacccagtcatcattaactgcaggcggcgggaaacgggcagcaaaaaatgccaaagcgtgaaaatgggagagagacaggagtggaggaaagcaaggctgagtggctactgacaaacccagttgaagacacactcccttttgctcagcgcctggacagaaaagccctaagagggaggctggacctaaagcgtcacttttctctggatatggggaaaggtacattcccagctttctaaatgtaaaggactgttacatttaaaattgcctatgcgtccattagtattttcaaccaatcacatggaactgatgggcatggaaatactaaaatcctattggttttarcagttacttacctatgctccatcaccaggataaagraagtgattggattctgaagatacaattggatcctgttttcagtgctcccaagggggaatgacaagatgtcaacaaagacaagacagcagtccttacagagaatgtcacagaatgtcagggcagagacgcgaaataaagggttatgcagagcaaaaaggagacacagtgctacagatgctcggagcaaaaggatattacttctcacctagagaaaaggagaggcacagagaaaggctggaccaagcaagagatgcaagccatacccacggtcaactcctaaggagaaggttctgacctaggcataggaatttccagaggawgagcaatgggggaagaggaacaatagggctgggtgaaggcacaacaatgatttggtcaagagaagacaattcagtggggaaagaacagtcttttcagtaaatggtgccaggacaactggtatccacgtgaaagagaatgaagttggtccctacttcacatcacacaagaaaatgaactcaaaatggatcacaggactaaatgtaagagtcaaaactgttaggggaaaacagggatatgtatctttatgaccttggattaggcaacggttactaggacatgacatcaaaaagacagactaataataaatttaaaaccttgtcaaaatttagaactgctgtacttgaaacactgtaagcggctgggcatggtggctcacgcctgtaatcccagcactttggaaagctgaggcaggtgaatcacctgatgtctggagttcgagaccagcctggcaaacatggtgaaatgccctctctactaaaaatacaaaattagctgggcatggtggcacatgcatttagtcccagctactcaggaggctgagacaggagaatcgcttgaacccaggaggtggaagctgcaatgagccgagatagcaccattgcacaccagcctgggcgagacagagcgagactccgtctcaaaaacaaacaaacaaacaaacaaaaaacaaaaaagccaccaataaaatcaaagtaaaaaagacaatcctcagaatggaagaaaatacttgtaaatcatttatctcataaggaatctgtattcagaatataaaaacaattttcacaacttaataaacctacaatgagatatcagttcacattctctagaatggctataataaaaaagacaatacaagcattggcaaggatatgaarmaattggaaacctcatactcagctggtagtgayataaaatagtacagccacttaaaaaataatttggcggcaacttaagaaggttttacggaactaccatatgattcaacaatttcactaggtatatacccaagggaaaaatatatgtccatataaaaatgcagacacaaaagctgattgcagctttatatataataaatagccaatgtggaaacaacaaaatacccaccaatggaagactggataaacaaaacgagtggcatgtaggagtacttcattctattttattaccaaacaatattttactgaatgcagtactgatacatgccacaacwtggatgaacctagacaacacgatgctccataaaagaagccagtcacaaaataccacatattatgattccattttaatggaatgaccagaataagcaaatcaagagacataaagtagactcgtggttaccaggggctaggaagtagggagtgaagagtaagggcagggcggaatgtgaaatgactagtaacgggtatggggtttttttgctttggtttctttgaggaggagataacaatgttctaaaattaagactgtggggatggttgcacaaccctgtgaaaatgctacaaaaagaacatcgaactgtaaactttaaatgggtgaattatgtggtatgtaaattatatctcaataaagctgttttttaaaaaaatgcaatggaataaatcacaatggaaaaatacataaatttgactggagaaaatgaaaaacttctgtgcgtcataaaacactgtaacctaattagatggaaaacgaaccagaaacagttttttttttttaaacatacatgactgatacccttaaaacaatgaagctgtgctaaatcaataagaaacacatattgtcctagtagaataaaggacaactatcacaaagaatttccaaaagaaaaagttaccaatggccattaagaatataataattcatctacaatgttaaacaagtaagttttggcccagtaaactcactttcatagtctgataaaaatatcagagatgcctttaaatcttaatatacaagaatgttattttttagcagaaaacaggggacctcttacctgtccaatgctgggggaatgggcaaatgtgttactgttggttacgtactatagaaacaaagcaggagcgaccatcaaaagtggttgtcttttgcggggtatagagggactcaatactttcattattttgtacttctttttgtaattccactgctgggaacctgctaccccaaggagatatcagagatgtttgtaaatatcactggacaaaagtattcctgttggaagttctaaagatgggttgtacaacaacgtgagtgtaattaccactgaactgtacacttaaatggttaagatggtcaattttgttatatgtatttcaccataattaaaaatattcacaccaggaatagcgaaaacaaattataacatgctaattttttwaaaaagtaagtatctggccrggmggggtggctcatgcctgtaatcccagcactctgggaggccgaggtgggcggatcrtgggatcaggagatcgagaccatcctggctaacacggtgaaaccccgtctctactaaaaatacaaaaaattagccaggcgtggtggtgggygcctgtagtcccagctactcggaaggctgaagcaggagaatggcgtgaacctgggaggcggagcttgcagtgagcccagatcacacyactgcactccagcctgggcaatagagcgagactccatctcaaaaaaaaaaaaaaaaaaaaaaaagcaaatatccaacaatcagaaatgtttaaaaatcaattataaratamtgaaacaatggacaacaaatatcaaactcttcaagtaaactggaaattgctcgtgataaaatattaagcaagagctgggtgcagtggctcatgcctgtaatcccagcactttgggaggccaagttgggagaatcacttgaggccaggagttcaagaccaaactaggcaacatggcaaaaacctcatctctaggaaaaaaaagaaaaaagcaaagaattaaattagctgggcatggtggtgcatgcctgtggtcccagctacttgaggctgaggtggaaggatcgcttgagcccaggaggttgaggctacagtgagccttgatagcaccactgcactccagcctgggtgacacagcaagaccttgtctcaaaacaaataaaaaaaacttaagtgacacaagcagcacacaagagggttacataaygtggtctcaggtttaggtggagcagatttttttcaaaagactagaagaaaagatgttcacagtagttctttytcgatgggatttccagattttctacaagaaatacttgcgggttgggggagggagtgccttcrcagacattaactcatggtccaagaatcaaagagacaatatggcttctactccacagcctgtcaatttagtggtttttcccttaacaaaacaggcagagaagttttcaaaactgctacatcagctatgtccactgtgagacagaactggaactggaatcggcagaagcggaagtggccggcactctccagtgtckccatacaaggagtagggcagtatcgcccacttgtcaccatctgctgtcttactccatcacagcatttcaaagggttgcttctcattcattcatgatgttttgattgtttgataatgggcccagagtgatctgggaaaataaatgcagatactttataaagtatctaatgatattactaataaatcacaggaaatgagcttttctcttctctggaaaacagcagcacacattacaaatattgatgaatwcttaatccaaaaagacttgcaactgccacagaactactttaatggatgctggtccttgttttcattaacagaaaatatatttaccattaaaaacaaaagttttgaaacaatactcagaaaacaatcttctaacaatgaaaaaaaaaaccaaataaatggaggaaggtggcagaagagtaaataaaaataataacctcaatatgagtggaaagtaagaaactcaatcatgtaayatgcagggtcacattattgcaaggttaattaaattatctctggcccacagttcccaagatccaggaagtaatcatcaattgtattaacatacatatttttattattacaggctgtgttgttcagagtgtcttcttacaggggtttgtagtatttgatccttgcaagaataattgttccagyccctaacagtttctggattagcatcaattagtgaagagtttctatacaaacaactgaaacaagtttggtttttttgtttttgttttttaaccttgaacaagagaggaattggcaggggtggggggcatcttacaaatcagaacaaaagtcatcaaggtagtttcggagcacatgtctgaatgatggcacgaccctggagcatgacccactgtggggccrgcgtggaaggagaggaggggagtggctccatacctctgggtgctgcagacacactgtattgactctatcattagcagcaacagtgctagcttttaaaatagatgagtctttttaaatccagtacacattcacaaccatatgtcagttttttttttaaattattaaaaccaggcaggtagaacattagagctctggatacttttaccaacaaaatggtttaagcagaaatctgtgttagacactgaaaaaaaatactgttcatcatttgatgtattgagtcactgccatttttaaacagcatctctgccctaaacttttccaattaaaattaccaagataatgaagccaaattaccactgtgagacactaatttgctgtacaaatttgggcagtgaacaagcactgctccgttagagatgtatctgcttagtttatttaattatcatttggaccaaaaacatctaatagagagaacatcccaaatccrccagaagcttgtatgtttcagaactattaaccttctattctaaggccttgcaaagaatttagcaaaaataaatttcattcctatggagaaaaacttgaggatattttcttgaaaaaagacaaaaactaatgtggtccacacacatataaggagacatggcttcatcagggattcttctgcctccatgcctgtaacctccatgaaacctttctgggtagccacactctccaggcttgccatgccattcaatcccacctaaagtcccactaaaacactgaatttgtgaataaaattatatctgacatgcagtcttccctgaagtctctcaggttttccccagtcctaaggcccaagcaacattaattcatttgcagtagcacagactataggtaggcaaattgtacaaaaggtcaaatctctgcacttggcattaccttcaacagagatcccttaaaaatatcgatagtttctgaattatctctattatctattatatagagatgaggtataagacatcttgtttgtcctcaagcatcaracagaggaagcacataatgtttttaagaagaaaaaactactcagtgatacttttaaaagcatagtagggcagactttattcaggaccatcttaacacatatagggaccaatgcagtaggattttgcagttagggaaagagttgattgagctcaactccaaataccgcatggggaagtgggaatttatagccaaggaacagggtaggtatcggtgcatgaaaaattactaagaggcaacatcaggggtaggaaggcaattcttgttaaagacaggtcagggtgaccagatgtcacctggaagatggtggaggatgaggaatctaatcagatttgggtgggggtggggaggcgttcttgctaaacttagtagcatgcttcttagctaaacctggattttacaagaaaatgtgtgcgcacacacacacacagacctaggagaaagttcaggagcatgactacagtgtagccaagcaaagtttttttgttttgttttgttttgtttttttttttggtcaatatacccactaattcaggggaaaaggacaaatgacgtacctgataataaagaaaaagtaaaacactgtgcatactttttgggaagagtaattccaatcaggataacccagtatgacaggcagtgtgggaactatgatttgaaggaagagaagaaatgtgacaaagagatacagcagtgagggagggcaaagaaggaaggacggacattccaggaacttccccaaatactgataaacaggtcaaattccttggcacaggaaattacttcataccaaaaaggttcctgagttccagctaattaatggattgtaaacaatgttgtcctaaaccagaaaattctgcaacaataaaagattttggacactcacaaattcatagcaccgtttctaacattcagagcctttaagggtgccctcctaattttacccrcacataaacctcaaagatctactaaatgagtcagcataggtgatctcaagtaatacaaatattaccaggaaatcagagaaacagataccatttcacagccctaggcacatttttgatagattctgaatatgtttacatgtaattgagaagaatccttacactggcatatgatcaactgggccccaaattatccgccttttgtaaacactccacaaaccttaaaaaaaaaraatccaagaatttttaaaactcaaggtatcagcattttagaaaggctttcctcacatgtgaatcataacctctcaaagttctgttttgttttttttgggtaatgttaagtgtaaaacacattgatagagggaagccaaaatacttccaaagtataataggaataatccaaagtctgtttcccccacccccctttacaagtctgagttttcacaaacaaactttatagctgttcaaatgctagatgatgtaatcaaatgaaatacatcagtatatactaggtagtaataaatagactattgtcagatgacatttgcctacatccataacctttaaacacaccacgtatgagtttggattacagtcatgtgtcacttaatgatgaggatacattctgagacaggcgtcattaggtgattttgtcattgtgcgaacatcctcaagtgtacttcacaaatcaaggtggcatagcctactatatacctaggctatatggcatagcctattgctcctaggctacawacctgtacagcacgttactatactgaatgcagtaggcaactattaatgtagtggcaagtatctgcatatctaaacatagaaaaggtacagtaaaaacacagtattataacctcatgggaccaccatcayacatgcagtttgtcattgatcaaaagaaacatcattagtcggtgccataactgtatagtgctccttaattcatcagcaagaaaacaacaaaattgctggttaacatcagtactgataacaaaatctttaatctttataaaaatctagcctggtagtccaaacaggatgaatctattaaaaccatactttttccttaaattaaaaaaaaaaaaagatttatttcttctagaagatactgcgacaaagaaaaaacattgtcccagaagatttctcatrggcactagttttgcttattttcaatgcaggtactacatatataaccaaggcagctccttcattgcctgtttacctggggattttttgttcactcttgattgcaccaagtgagactgtcgaggcagcaaaggtgaggaaggcagagacatcgagacacctttggccaagctcaccctataggtgtcctctgctgtgggaagactgctcacaggagagtcagcactgtggtcaaggtgcaggactgragaagtctctggaccaaagtcacttcctagagtagagagagaatacttaggttaaaccatccattcattataagttgatgcaaatttaactcctataaactatattctcagaatataattcccacatatcagatgtgtgtattgaatttttttaaatgacttttcccccactactcttgaaactttttaccctgtgagggaaaactcaagcatcagtgaactctgctccatgtgcctttctgcactaccctaactgatctggtttcaatccctaacaaaggatccaggaagccactgatctgggattagatcaaggtcaagtatgaatgatccacaagaagctttgatctcagaaaaggaaaaggagagggcttactagccttacatgagtatcagtaaaacagattcagataccaacccttccagaactcccaggcctccactgctcctctctaataagaaaagactaagtgagagtgtagtctacatccacattcctccccagcaccatcccttggctcccatcccatctactcaacactccccatgacacagggccaccctcctaaaactcaaacagccccaaaccagtcatgggactggaaacattgctcacttattaggcagcttccgcttgacactccacccctaaacaagcttgggaacaaacaagcttactattaggaaattaaacattgttaaatatggtaaaccccaagtttctcctcaaaaaaaccagtatgtcagtatgttcagctcttattctttgattctccattttaaagtttaacttcctggttctctttggcttctcgcttctagtttcagtcaacaactttcccgccaatcctaattagtagttcacgtctgttccctggttacctgctctgtcctgactcatcccggtcacctgctctgacctaagtcacctttagttacctgttcctcaccgtccttcccaccaaaccccgccattctggctcatgcccctgccctctttaaaacagtcagtcagaactagcttagactgtgtggtccaaccctagccaataggggaacaacacagcagcaggggctacctgcgtcaggaataagaactcctgcccctcccctgtccaggtgtgctctcgccattgttccatctgtgatgagcaccctttctgcagaaagtaaaaactgccttgctgagataattaaatttatgtttgagtgctatttctttgtggcaccagggaacaagcatttctaacaacattctagggtagacagaaccttaagaagcagaaaggatgtaatcacaatgttaaaaaatatatacaagaaagagtatcttggctggaactagtctcccaaaaaaaaaaaaaaaaaatacagccagtcctcatgtattcagataacacattttcctctgactgcttcttcccaccaatcaccttccccgctcgttagtrtgtactaagatggaactgaggatgtgcagggaaagaatgtaaatcattacctgcttcttaaaaagcatcttcaaactctaagtcacagagagcagaatttgaaagatgtataaactttcccacaagcacaccagtctctatgacaaaagctatccaaccagtccttgccacgccttcctggctccaaaaacaaaccaaaaaaaccacacatacacacacacaatcaaagaccagattttaaaaaaagaaacaatgaaagctgcctagctaggcaggaactaaattctgcagatttttgtgtacaaggctcaaaggggatacaaaccagaccatcaagtttcaagtggtatcactgtgcttgttttttgtgttaggagtcaagaggaagtagagtcaccccctccatataggacatatgccttatatgagacatataggacaggtacatgccttacttttttttttttttttttttgagacagtcttgctgtgttgcccaggctggagtgcagtggcacgatctcgactcactgcaacgtccacctcctgggttcaagcgattctcctgcttcagcctcctgagtagctgggattacaggcgcccgccaccacacccggctaatctttgtatttttagtagagacagggtttcaccatgttggtcaggctggtcttgaacttctgacctcgtgatctacctgccttggcccccaaagtgctgggattacaggcatgagccacagcgcctggccagcacatgccttacttttaaagggaactcacagcagagcagtgaacagaaaagccccacaatgggcatgtcagcaaagtcagataattttagtctctcctgggttacctatgcatggacggtttttataaacctgggaaactaaagatttatcactcactgcccaaatgactggcatttgaagaaacaagacagatcagaaaactcactagggctgggtgcagtggctcatgcccataatcccaacattttgggaggccraagcaagcgaatcacgaggtcaggagttcgagaccagcctggccaacacggtgaaaccctgtctctactaaaaatacaaaaaaaatagctgggcatggtggtgggcaccggtaatcccagctacttgggaggctgaggcaggagtatcacttgaacccaggaagcagaggttgcagtgagccgagatcacaccactgcactctagctcgggcaacagtgcgagactccatctcaaaaaaaaaacaaaaaacaaacaataaaaaaacacctctcactggcgttacaaaaataaggacattcatgcaaatgcccaggacaaagttctgtcctcaagggagagaagcagacaggagttagaggcctttcctcctagaggctgtgtggacagcagtggcccccaggctggcccccacccccccsccacacacacacaagcttcatccaccctcttttgctagctagcactgtaagataccattgtcaccaatccccagaaccacaggggccagtcttatagcactgtgcatgagtctggaatctttgagaaaccacctcgaggctttcggccaggtcacgagttttcccagctgctttcccttcaactgtctggcgaggaaacagatcttaaggcagagctaggctgcaccatgatgccagcgcgcagtggagccggatgccctctgacccgacaaacttgtaaaagctgagggatggttgttttctcatcaccayctcactctcacactgagaatgcaarcaggtgctgtgcctacaagaaccacatcacgtcacctaattcatgggtgtacargcaagaatcaccaagagacagatcagaacttgsaaagcactgaggccacagccccagaacattacatacaaaagacgtgtgggggaccttgaagaggtgacactggttttccatgtggtttgaagagagctacattgccctgtggctgttctcacataggctaaatcacagacccagctagtcaaatggctgtgggatggcctgacaggccacaaaggcactgtctcccctactcacacatgagtattactgacctatacaaaaacaaataaaaacccagatttcaagtcctttaatttgcatgaggacacaaaagaagggagaaatacatgtaccaccaccagaaataaacagcattgagaaaaggtttattttcttaaatacttataattctccaacatgacacaagagaaattaggcattgaagggaaaaagaattaaaaagtttcctaattataaattctgcccataaactttgtttataacaagcaaagcaaatattttcattaattgcaaatgtggtgcagatgagtttccaaagcatgctgtaagcatgaggaccttcagcctttggagcagctgggctccagcactatgattttatgcaggctgcaataaaacgaggcttaagagaagagggagggggaggggggtttccatttcaagtttactttaccatctcactataatcactctcaaacatgttgttctgtttggtttgtttttcagaggcaataaaagatctctaacttccagtatcctttcattagaaaggcacaaagtagggagagaagttttatgtatgaacaggaagcacaaagctgggtggatctagcactctggagccaggagctttaactgcacaagggcaaggggaatacggtcaaacaaagaaagcatcacgatgatgccacgggcagaaagtgaaaatctcttaggggcatccacgtgaacaatacaatattggttctgggcaacaagacaccagagattctccagtagatgtaacattcctcagcagaagcttaaagacatttaagaggaattaaagatgtttcactgcaacaaccagcacagctggcatatttcttaacccttgaatagatactgttttcttttaactatgacctattttattccccaccttgattaagtgatgggaagcacatttcaatcacccttcctgttactgcaggcagaaatgccaggtaggacgatgcaacctctccagggtatgaaaactatgttatcaatgactagtaatttacctcctccagcttcactggcaggtgtttccattggaacatttacacaccacagacagtcccacctaccccaaaatgctttccatcgcacagcatcaaatgcaatcacactgtctcagatgggagactggggcctggaaggtaaccctgaggaacagggatcacagctagaacctccccacaaccggtcagctcaggctctaacattctcaccacttcacacgtttaagagctttaatttggggaaaaagatagagatccccaaaacgacacatttttagtgagtattttaaatacataaggmgtcagcacactttgctacaaagggtatgacagtaaatatttcagactttgcaggttacatatagcctctgtcactcatacacacacactcctttgcttcttttaaaatcatcaattcccttaagtccaaaaataaaagtccagaaagggcaaggggacacacagacatctataagaacctctctgttcgtaataaataaaaatatatacgcatacaagtaagtcaaagtcatagtttgcaaagataacaaaattatcaaagggaataaagccatccaataaggcgttttaaattggcagaaatggcttttgataacagttctttattttaaaatgtttttaccattacaggctgtgaaaagggatttcaattcataatggaagaaaatgtcaatctgggagatgaatgtttaaaggcagctatgcagaatggcaacatccaacatcacagattaaagtacatagagtgcagcattagagacagctttaaaaaatgagggcaacgaaggcaaggagatgaaagtaaaagcatatttcaggaagggaaggcctgagaaaggcaagggtgcacttagacactcaggtaaataggtctgcagaggcaggaaataagatttccatttattgtgccactgaagtggctgaggtggggtggggcgatagaagcttagaatagaaaaagaaagatgttctgtttatccagctccagaaaacggaacttgtgcaatgcatttaactagggcattaaatgtgttagggcaccttttgtgcagtccccgccttacagtgcactaatgtttcttaaaggttgtataaccacataactctacatacayacacacacacmcccccccctatatttacagaaaactgaaagatttcttccacaagatccagtatcatttttggacccttcagaagactacaactaaaagcacttgaagccattttatgtcttatagaatctcctaacattcaggcagaacattttgaaaataaatgcatccaagaaaacaattttcaaaaactttattcagacaatcatgattaattctcaaacaataccactaagaggcaagaaagcagctaacccctagggtacaagaaacctagccaacaggacagcayatccttgtcttcaaaaatccacccagtgggatctaaacagagatcagtaaatactgtccgcatggttttattcttaatactcaatggttatagaaccaaaygtacaaatgtgccttatcctgaaacagatgagtaaacagactggcatttcctctctaattgtcaaagttttccttttaagacatatcagcatgcaagagtttctgtgctttaaaaataaatgacctcagaaaaactcccacccccaaactcccagaggggtgcaatttaaaataaatgctctttttattttttagatgtattaggtgccaggacagggttctgggtgcattatacatatattatttaaacttaatcttcacagccacgccacaaattaggcattgctattagcccccttttcagatgaagaaactgaggcacagaaaggatcaagtatcttgcccaaggccactctggcatrtatcagagctgagtctgaacccaggcagcgggatccagagtccactgtctcagtattgctccccttggagaaggctactgagaraggctttcaacattatgtcattttgcatacttaagaaggaaaaccaaaaatagtatatgtaggtctacgcacagtactgggccaccacagaggggaaraaaaaaaaaacaaaaaaacaccctgttccctcgtctattttcacttttcatgccggctggttaattagctccacagcactcctgcagcactccttttgggaggtacccargcccagtgatcattaatcttctctcagtcacacctcatgctgtcaccatacaagcgaagtggatccaggataggtgtttagtcatcaagcaccctagtttcctctcctctccgtgggtactggacatttattaactcttgcagcatttgggcctgctgcttctgcagcacagtggcgctggctccggtcattctgcctggcccaatgaarggtgaagtcacgagctagctgtggtggaaggcaacctggcaggattcaccgtcaatctgcatggaatttgggattctacatttccttgccagcacagacttgtccaggtctaccagtcctgtggaacacactgcagcttgaattccgtggctctgccaggcctactgatgctacaccygattcagttyccaacaccctccacacagagggacccccgatccctgccgagcgaggctgttttaactggttgggaaaatggcacaggtgatggtccttaaagctcaccaagtgattttactgtgcagccaggaccgagagccacagaagcaagaaggtggtcaaaaagatctggaatgcttatgccacttcccaagacaaagaggtcgggagaaaaggaactacaaggcctactgtactaagtaatgcagatgattaaaataaaagtttccattccaaatgtacattccttgagggtatatgtgtatatatatgtgtatctacatatgtatgtaggcacacacattatgtttacatctatacaaacatggacacttgtacatgcatggagggtctcgagaaggatacacatcgaaccagtagcagtggctgcctctgggaatgggaactgatcaactgaagcatgggtgttaagatacacacgtttagatggtttatattttttcctatgtgcacatttcctgtaaatatttaaatgtacattcccaaggattgagccatgtgtcaattttaagatctttaggataaatgggccacctactaaggcctaacttggcaagtgggtgaaatgaagctctattccacaaagcatgtgctcgaagtgacatgtgtgtaggcactgctcggaggcaagcttgtttgcagctgactacagtggacacgggcataacaggaagaagagtgccagtgccctgctctgaaggttggatgccagcagtgctgagcctgccacagtcctgtcattgatgggctctgggtcagctggcatttcttctcttcccacccttctgtttctcttccaggtcctggtcatctctgctgttggtggttgggtgtgggcacacttgcagatgcctgctcacatgggacatggataatccaaagcactaggaaaacatccagtctgccagggaggaaagagggaaagagagacatgagggttggagtgtaatgggaggacagggaagaaaacagatgctaaaaaggaaggaaatgaggcaggacaggaccaaggaattgagaagtaaagagaagagggggaacagccgctcaaggagcagggaggggtggaggtggggtgcaggcgataaatgcatgaattcctgtttctttttaaaactgcatctggctagcagtcctggcaaggcctctcccaataccctagtaaaatatctaactacaaagtaagaaaactcacaagtgcaaaaaaaccatactaaaaggaagagactgccagaaaaggaaagaatttccagtrattttaaagatgacaaaagrggatcctttgttgttgcaataaacaattggtggcctaaccacactccagtctataaaacatcagagcccagcccactgtggaarggggaggatagcaaacccctgaccctggagtcggcctctgtatctccaccctgtgcccaccagcaggaacaacagctccagatcagtaaaacctggctgattgcatcttttctcttttgataagcctcccccaaccaccacccaaaataatcaatgacaggactgagaaaacatagcttattagtgaaaggaaagagaacatctgcttgaacactcaaagacgactgagaacaaaattctgtgaaccgcttggtaccatcaatagaatataagatggcctggcctccagacccttcatagagtgtttctttcctgatgacaatccataccgggggtgtctaatcttttggcttccttgggccacattggaagaagaattgtcttgggccacacgtaaaatacactaatgatagcygatgagttttttaaaaaagtcacaaaaaaagtctcataatgttttaagaaagtttacaaatttttgttgggccgcattcaaagccgtcctgggcctcatgtgacccacaggccgtgsgttggacaagcttgagctatactacagactaaggcattctatactatatatctatactatagactattaaagataaggaaagaaaagcaggaaatttaaaaagcatgatccacatttcaggtagtcaaggaaaactgatactatagaaaacttagtccatgataaagagaataagctcgggaaggtttccccaagaagcagagggaaggagctaaaattttaacaatgtgagaaaatattatagatatgggaaacaaaaacctttctgagaagaaataaggacaagataaagtaatttttctaaaaacctaagaaaaattatcacaggtttccaggtaagcattaaaaaggtgttttactaggatacaaacaaaacctcggagcctctgaaaggcaccagagcccgactgcactcagaacccttgtgttagtttcctggggctgctgtaacaaagttccataaatagggtggcctaaacaacagaagtttactttctcacatttctggaggctccaagtccaacatcaaggtatcaggcaaggccatgatctctctgaaggctctcggggagaatctagttcatgcctttctcttcctttctggtgtggtcagcaatccttgatattccttggattatagattcatgcctcaaatctctgcctacgtcatcacatcacattctccctctgtgtctgtgtctcctaaggacaacagtcatactagattaggacccaccctaacctagcgtgacttcatctgaacttcctgacatctgcaacgagcaaatttccaaacaggatcactttaacaggtatcaagggttgagacttcaatgtacctttttggtgaacacaatttcacccacaacccttgtcccctcccgtccaacaccgaaagcctgaaatcaaaaaagcaacattggccaggtgtggtggctcacacctgtaatcccaaccctgtgggaggcaaaggtaggaggaccacttgagcccaggaggttgaggctgaagtgaactgtgattgtgccactgtacagcagcctgggcaacaaaaggagaccctgtgtcaaaaaaaaaacaaaaacaaaacaaacaaacaacaaacaacgacaaaaaaaaaaacaaacggaaaaacaaaaaaagcaacatctacaaaacttgagggagaaaaaaagcacggccaaatcttctaaaactgcaccaggctattatacatgatatcaaccagaaaacattctcagatactcaaaagctcagaaaatgtacaacccatttatccttctgaaagaaacaagttccttcagagaaaaaacagaatccactactcaacagtggggacattatggtttttaaaaaatataagaaactgtataaaccaatcctggccttccagcacttcactcaactgcccctcttccacagccttctctttcaggaaacgggctttttgaaccacatccttcaccccacagtgcagaaagaatctcttactttatctggagacccttaaagcaataactgatgctgcctgccagaactcgctaacaatagcttacatttttcacgattgggatgctgggcaaggaaagctytctttacccccacccacccctctaaacaagcagagtagcacggaacaccacaatgactgttttcattgccaaggaactcaaattaaaaaaaaaaaatcagtttaccatatgaacattttcaaaaacatgtagaaaaaacatttaagctagtatacacaatcttttataatggaaaaataagtaagatacatgacccaaaagttcgaaggcagtcagtaagatgatggtggttattttgaagggagtggaagtatgaacggttttttccccttccttttacattttcagtttgacatatattctgacatgttttataaaataaaatatactttattttccagtgaacatttatttgaaactcaaatttgtatccatctccctttatttccagaggttcccctgcaagctgccacattggacacctgccaagttcttgaggctcctgctgtcatgagtcctcttccaggaaggtctcacttttcccctattcaggcacctcgagctatgcccactgttgttgctcagtctgcctgccacacacttgcccttgtccatgtagctccaactgaccatatcccagatctctctaatgtcagatggtctttcctattgattgttctcacaatgaagttctggatcagcttcaccctacagacactgcagggtccaagatctagtgcctcaccctaggtgcttcaaagcacttaaaaggagcctcactgccccagctatctgcaatctcaaccagttaatgctttaacattaaactttctcaaaaaaaaaaaatccaaatacaccctcttaatttataataacagagaactccacatttttttcacagcactttcttgaaggtgacatgagaaatgacaacagtagtggaccaccatgctgcacctgtcacgtctatgttaatagtgcccccggagctgtgcaatgaggccaacccagggacaacaactaaccacaggataccccactgctaaagccattctccatcccaattactcaccaagccctgagattactgccagaggccacttatcctcgaacttcacatactgtttcattcctgagtaacatgacaggatttacattgagtactgtttcacctatgtgtgtatgcctgatagagtttgaacatctgcccctttgaaatttcatgtggaaatgtaatccgcactaggtggggcctagtgagaggtgttgggtcacgggggtggatccttcatgaatggctcggtgccctcccagcagtaatgagtgagttctcactctattagttcactagagatctgattattaaaaagagcctggcacctcctcccttgccatgtgacatgcctgctccccttggctttctaccaggaataaaggcttcctgaggcctcaccaaagcagatgctggcactacagcctgcagaactgtgagacaaaataacccccctttctttataaattacccagcctcaggtattcctttatagcaatgcaaaatggactaacacaatgcccattgtgtatatcggccctaataatgatgatcaagctggcagttcttaagcccttcctttgtgtgccagacatcttgctaagcactttacatctatatatcaagtccattttgagttgctataaaagaatacctgagactaggcaattaataaagaaaagagagttctttagctcatcgttctgcaggctgagaagttcaagggcaaggccatggcttccccatgcatcacaacacggcagagacagtcaaacgggaagtggacacaagcaaaggggaaaagctgagaagtatcctggctttgttacaacccactctctctggaactaatccattcccatgaggactcacccagtcttcccagagcaagaactctgacttgttgcaggagaacagcaccaagccattcatgaggttttggtgagaacaaaccacagcaatacattaacttgaatacactaattattcaccccattccatttaaaatgacactgtcattgcccccttgctgcagatgaggaaatcaaggcttggaggagggctaagttgcctaggatcccctaccctgaaagtggcagatccggaattgaacmcagccagtttgactccrgagtcagaactcttaaccacagtaccacactggactgtcccagatagcatattccctaaccaaggtgtatactgagcatggagcattgcttggtgctaaagaaagtctgacttagccccagataatttagcaagtcatgtttccctgagtgataattgtcaggaacattctgtcatgttggacatgctgacattttgggggtggaaaaataagtggaagggaaaaagacttttagaacaatactctaagcagtacaccaccccctcactaactactcaaatccaaactctggcagtcccgtcagcaaagctgtctgccaaaaggcctccttacaagagaagggagagaataaaagggagctgctaccatttatcttacttcaactccttacaaggaaaacgggatcattttgggggaaaaaatgcctcaatgtttctaggcagtatttaaagtttcttccccacaaaaacatgttcaaaaatactaccaacttagctcacattctagaaaaaagcagactaaatctgccgtgtacatgtggctatataacaaggtctttcccaggcctgtattggggggggagctaggagtgacgaagaaaatgaaatgaccgaatttttttttttttttgagatggagtcttgctctgtcacccaggctggagtgcagtggcacgatctcggctcactgcaccctccacctcccaggttcaagccattcccctgcctcagccttctgagtagctgggattacaggcattcaccaccacccccggctaatttttgtatttttagtggagaggkggtttcgccatgttggccaggatggtctcgaactcctgacctcatgatccgcccgcctcggcctcccaaagcatttggattacaggcgtaagccaccatgcccagctgatgactgcatttttctatatcttatttgtatgcatcttgtatattttgtttactttatccctattccaccatcagcaccaaaaaaaaaaaaattcactgctcagttttccaaacagcagtctcaatgacatgtctcgtaaaatatcttagcaacaatgtcaatattgtctgactacagctaaccatattaacattccattctaatcatgaattctcaaatataaaatggaatgtgaattacttacttcattcattttttgagtgttactctgggaaaagagccctctaacaattctataaattggcatgtaaattaagcatcaaaattacgttcaatagctattactttttgtgtatctaacttgcaagtatcagtatgaaaataagcaaatgttgacaaggaaatcaacataagtataagaaccaaacaaaatacactgacaaattactttgatcaaatactcttcctttgttatttctctaatggaaccctttcactcatctgcttgtatatttgtattccaagtttatctttacagtaactgccaaaaacagagtttactagataatgagggatcttctaagagtttttaaagtcacatacaacatggctggtgggggcaggccctgtggagacacaggaacaaacagcataccagtgactcccaaacatggctaaccattcaaaaattgttatttaaaaaaaaaaaaataggccaggtatggtggctcatgcctgtaatcccagcactttgggaggccaaggccggcagatcacttgaggccaggagttcaagaccagcctggcggtcttgaaccaacatggtgaaaccccatccctactaaaaatacaaaaattagctggacatatggtgggtgcctgtagtcccagctactcaggaagatgaagcaggagaatcacttgaacccaggtggtggaggttgcagtgagctgagattgtgccaatgtactccagcctgggagacaaagcaagactctgtcttaaataaataaagaataaaaatataaataaaaatagatgcttggaccccaacactaaattcggtaggtcttaagggaatttgagtcacaagggcctaggtgaaccagccaggtttaggaatcactgcactacacaattacagtagagcccattcttgtaaagccaaaggtgaacactgactctttgaatgtgcatgcatctttgaagacacacaggtttctggttttaggtccctgcattcaggcctcatatccctgcccccttctgtctcctagtgaacacatataccccaagcctgtttacagcaacggtccctacagcactctgctaaggacatgcctattaccatggctttttcccccatctgctccagatggaaaggcgagggtcatgtttgccacacagacaagtgagctaggaaacaaaaatatcctagatgccaccacttaccaaggtcaaaaggagagtgtaaaggagcagaaaagcaagccaaaatggtatagaaattacctaaattataataaaagcaaacatttgtaagatgcttactgtggttcaggcactgttctaagcaccgtctttttttttttttaacaagtttaaaacatgtattttaaatacaatttacaaaatacttaatctgctgactcaggagccctcggtacagggttgggtggcagtgggcagctgcccgctacaccagcagagcaagactgcaggggtgtggccctctctcccatgcccttctgttcagacacccaaggggcctgtgtgcacccctgggatcacacgaccagaaaacaggaccccagaggtttctttagtctctgtttactagggaggctgagtatagccctgctggcccatctctgagcagggcacccccagatggggcagagcagggtatggcttggctgggcagggcagggctgggcagcaggtgggctctggaagggtctgatggtagcatatagggtgttgcctcctgcctgcaggtggggagcaccctgatcgagtgggctgagaagggctggtcactggacctggatcccccagctcctttggttataggctaacatcagagaagtggctcttgggaagcggttagctggaaggtctgaggcctggcccatggggccagggaggagctgggggaaggggacagtaccgtgaaggcagataaaggggcagcagcctcaggtttctgccccgcccctccaatctctctagggttttccaagccaaagcctttcacttactttaaaatacaaaaggaaaaaaaagcatataagcaaagttacagacaactatactcccatacacaaaatccaaactgttttctcatctcccatcaatttctccccaacacaatacagttgcccgttttcttttttaaactttttcctgccacatctccatttgggaagctatgactgctggtggtgacatgcacacagagggtagaccccatcttcggccagagggaggtaggagcaccagtccctgccacattctcaatccacagacacccacagccagcctttactttggccctactagatggcagtggggcaagaacaggtggtcccagtggctaagcagccagcacttctggccttcccacctagactatctctgtacccttctctaattgaaaggacagtctcactttgggccagaaaccaccattacatgagggatggacactatacattttgaatgtggacacttggttatgacastgcaactataaagatagccaattttcttccttgtcttctcctgaagataatcctccctcttactgactgaagctctggttccagctctgctcacgggcaatgcctggctttatacagttataaggccatgctatggactagctgctggctcgacagctggcccttcctcctgagaggaggatgtggtgggacatggcttgctgggcctggcctaccattcccacagggagcccgaggtggagtgagcctgtgaaaattagcttgccaccttggcaccataagctgctctaatcacaataccataccaaccaaccactccaaaacctacctgctggtcaggagttgggaggccgtctggctggctgagggatagggcacagtgccacggaaggcatcagaaacccaagaggagccgggctgtacacagagctgctctgggcagctgcactcttagcctcttccacctcaaggagccaaagcaaatctcaggctccaggggcagaggaggaactgtcttcattccaggccctcgctctggaaaaaggggtgatgcgtagcctaggcctttggggaaccagtctatcatcaatctttgcaaagctattctttttccaactttattcagaatgctctgccttcaaggtacagattttacataggaaatataccaggtatagttactgagctggggtcatcaatagagatggagcaccamagactcttaagagttctagccatgctagagtgggaagatctatccaccttctgatcgtacggggcagaagcctccaggtcctggagccaggctttctcctggttttccctgtgctgatggcaaatactgaacaagtctcacatcctttacttctaagcccagaaatgcagtctcackccctgacactctctgctctcttctagaagcagtaagcctgactggtagggaaaccaccctgaggggtatgggaaggggaagtctgttcactttccctgtctcccaaaatacaagaggtggggtaacaccctccccaggctctccgagcctacagagctagcccagtctccaggcaaggcccagatgccctgggacttagctcggggagggaggtataggcatggggtgcccatttgtcccgggggttgcagagccctgccccttttctgggtggcagtaggaacacagaagctaaggtcaccaaaatcctatgtttttagggaatttcccagaaacattttcaagtagactaccaaactaccctttctcatttaaaaattcgttaaacttctaaaacccctcccatgcacttcttataaattagatatttgtctaaacaaacaaaaatagkggcaaaaggatattttcaaaggaaacttactttttacatgatgaagacatgcacttgggggtgggtaggtgtgagttctcatttgtgttttgaaatcccaaattaatgagcatgataaactgttattgcgggcactggctttaccctaagtggcactgtctgagtccgtgatgggttccctcaaccttccactaactccgcccaccctttccctttctattgatttgggacagcccttgtcaacaaagcactgtaatttatttaatcttcacaatggagaggacatagatactgttattatccccattgtatagatgcaggtgaacccaagcagcctggctgctatactgcccaaaacataggctttggagacaaactaggttcaaaccatggctctgacactcagtaactatgtagtcttaagctagtactttgacctctattaataagctattgatgatgtaactgtttataaacatgcagcacactgtytgaaacacagcaaacmctcaaaaaaaaaaaaaaaaaaaaaaaagacacacacacttttcagccaagtgaggttgctcacacctgtaatcccagttactagggatgctaaggcaggaggatcgcttgagttcgggaattcaagatcagcctggacaatatagtgagaccccatctctttaaaaaacaacaacaacttctcatagtgctatcatattttctccaaaagattcactttttgctgaactgagattcaccttctggtttctaatatcttgagcattatctcatccctcccccaaacatttaagtaccaaaaacccccaatataaatctaaatatctctacaaatatattttattgttccttgcttaatgggcatttcccaaaagcaggtataccataggtttaaaaaaatacaaaaacaaaacaaccctatatcttcaacactatcatgcctgaagttttttaaaaaaatatttaaccctcataattacttaatgatacagagcaatactaacttcattttgtaggcaagaaaacaggttcagaaaaaattattcaaagaaaactgtaggcatattcaaacagactcttacgttacttaagttttttgaaaccaaaccagcagagttattcacccttaagatgctgcttccagaaatcagaaggattagaggtactgttggaggagtccaataaccatggtaacaatttaatggatggagggggaaaaaatcctccagaatctctaatcttcagaatcttggagctaaggatgtagctctaagaggtttaatcagattagtagaatcaaaactcacagacaaagcagggaaataaagagagctgacctccatgaaatattgctttgtaacctcttagttttcaacagtgaatttacagaactgatacaaaatccttcacttgatcctataaaaaataaaggatgacttacatatatcttttcaggctttataattcaaaattaaacaagacacacatttgccttgcttagaactttagctagtaagctatcagatgattaaccacttaccaaaatattaaaatagctattgaacccaagacaaaaataggtaaacaaacaggtaggagagagtaagaaatttaaattttaatttttgacaaatactgacataacatatactatatgccaagcatgggcttgagccctttataaatagtaattcatttaatcctcacaagtgaatcacagggcacagaaaggttaagtaatttgcccaagttcacatagctgataaactgtggagccaggatacaaacccaggaagtatggtttcaaatagcccataaacatataaaaatgtgtttgagttcattctaaagaactgcataattaaaaacagacacaatttttgcctctcatgctggcaaagatgaaatagtttgatcataacctaaggatatgaaaaaacaagtattctcttatattactggtggaattgtaaacttaccacctttcaaagggacaatttgacaaaacctagaaaagttttaaatgaacaaacctgttacccaacagaatttcttacaactattcttatgaaagcacaggcagttatgtacaaggagattcactctagaactgacttgtaataaaaaaaatatatataacttaagtgtccatcaacagaagaatgagataaattataactacccaatgcaacactgagctactttttagaaggctatatatcgatatgtgccaataygaaaaaaatgtataaaatgcaatcatcatagtagtttacagaataagatgtattataaagtccatgtggggtttcttaaggatcgatatatgtattgatgtgtgtccatatgcacatacatatatgcacagaagcacagaaaatatcttgaatgatcatctaagaaattgttaacattaattgcctttggggagcgaaaagagaagcagagaagaaataggaatagtgtctgttttaataccatcatataggttttgtttttataattgtgtacactattacatttatggagtttgaatggctttacaaaaacaagtgattttagaataggatggaattaggacagtctcaaggataccaagcaaaactttgctttaaaatactgagaccccacctctacaaaaaatttaaaagttagccaggtgtagagctgcacgcctgtagcgcagcaactagggagcctgaggtgggaggactgcgtaatccagaagttagaggctacagtgagctatgatcgcaccactgcactttagcctgggtgacaaagcaagaccctgtctactcagtgattcagtctagatcaagaccatgtaagaatctcacaaataatccttctaggaaaagaaaaaaaaatctaaaggaaaaaaaaaaacaaaatgaacgtccctgaaggaagaaattataaagaaaattttctatcttctatctcagggatagagatatagagatataacatagagatatgttttcctttatgtttactcggtgtgagataataaaggaagacagccggagacatagtataaaccactaacgtacaaacactacactctgagtccatctttgctttaactagctatacgactttgggtagttgctcaatgcctctttttccaggtcttcctcaagcaagaaattgaactcaatttctaagatcctcctagatctaaaacttcaaaatgtcattactttatcatagtttaaaaaagaatctctacacataataatctaagagcatgcagccatggatagaagtttgcacttatgattatagcaatttattaaggaaatgttgctggaactatccccatctactgttgggaacttaccaggagtcaggcttccagcacatctgggtagaggaggaactttgacatctttggctgtgcacaaagacagaatgttatcaagtactgtggatggcttgatgactcaatggggttgcttttatgcttttattttggtttctttataaattcttgaatataagccaatcagactagtggatctctagcctcagcacaaacatgaaatgttaacaacgcagagaaacttttacctatagaacataggcagtttcaccatcagcgacttcagtaaaaattccccaagaagctttctggataagtcatatagaaaatttgcattactatacacaacagccagattaggaaaagggaagaacaagactaayaagcccctcacaatcccaacagaaaaaaacaagtacaagggcatgaaaaagacaatcattgaagaagaaatgtaacagagcaataaatactggaagaggtctaccaatctcaaagaaatgctaattaaaaacaatgaagtgcaagttttaacctataaaagtgacaaagattactaaaacccacaaataccccctagtaataggaattgtgcaagcaggcacattcacatactgcttacacaggtggcaaccaacatgagctttctagaaaacaatttggcaagaggcactaacagcttataaaaagttcatttcctttccctattaactccatgcttgaaaacatattctaaaataaaattcatacaaaggtatgtattttccagacggttttttaaatgaaaaaaatatggaaacaaaatgggcccaaataaaaccatggtacattggtacaataaaatcttaggcttttttttatacaaaaaaatgacattgtatttaaaaaagataaagcaaaaaatacagaatatcttgggttatttgcttgtaagtattatgagtgttttctattttcttttttttgtggagacaaggtcttactactctgtcacttgggctggagtgtgatggtgtgatcacagctcactgcaacctcgactttccaggctcaagcaatcctcccacatcagcctcctaagtagctgagactataggcatgttccacaacacctggccagttttttttttgttttttttttttaatagacaaggtctcactatgttgctcaggctggtcttgaacgcctaggctcaagcaatcctcccgcctcagcctcccaaagtgttgggattacaggcatgaaccacygggcccagcgtatttttcgaattttgtacattgagtatataaatattaggcatggattcaaatactgatattctcatttttacttctctagtagtttaaagaaaatcttaagtgtaataaacattctaattgattgactttttttcttccttagtacataaaataatggtgtttcatgaccaattctccagggtatcgtgtttataataacaacattaaagtgctatagatgaattgtgttcccaaaattcctatgttgaagctctaactcccaatgtgacagtatttgggagatggggcctttgggagacaattaggttggatgaggtcagattagatgattgggttacatgagcacatgatgagattagcgctcttataagaagagataccagaaaacttgctatccctgtctctaccatgtgagaacacagggagagggcaacccctacaagcacccaaccatgctggcaccctcatctcagactttcaagcgtgcagcatggcgaggggaaataagtttctattgttaaagccacccagtcaatggtgctttgttacggcagctcaagcagactaagacaacacgaagatgtactatcaaaaatcaaaatatttttaacatctcgtacttggaaagaagctttctagataagtcatatagaaaatttgcttagtggggcgtgaagagcaagccctcacaaagaaacaatgcattaacataaattccttaattttggcaagtgaaataaaaacacaatcatcaggaagaccctgtgtgcaggtggctctcttccatccttaacctggagtctacctccaggctcttagcctctgctatcagccagtttcgtgatctacaaaaacccagacaagatctcaaaccactacagccacctccatgcatgtctcacatcagagacatcattcctgatgacatcccagggcataaagatcatcaccatgtaccaaatctagcagttgaaggctccaaactcccttaaaaatgggcaactccctgacaaactttaagagtgtgaagaattaaaaccagctgctcagttgctcgttttacctttacccactgcactgtggtcaccagaacataggacaagaacaatggtattttcatggctgatgaggtataactagcctgcccctaaaaggacagaggggagtgggagagagaagacacacagatgctgcgttctaactctgattctggatgtgaataaggtttctcaatttgatgctgatccagagctagggctacccagctggtcacctgatggccaccctcattaactgcaagacaactggttggtaaacacaccatccccttaagactcttatgaggaatactcagtttggatcaccagccacgaaataaaagccaatctacttcagaatcctttgtagcccgtctccccactcaggaactacacttgccagtagattatatgaaatcaagttttttacattcctgtaggatagaaataaaaccttagaattccccttctaggaagtgcaaatagaaaacatggaaaagcaaagatgaaactttttatgggaattaagttacatatacatggaactttctgaaaactaagtctgtacaaaataagacctttgtgttttacagaggagttttaataaaaatttgtgaaataaaattagatttgataatttaaaaatgaactcggaattgctcatttgcctactactgatctagcttcctatggcatttatacatacacatacaaaaagcagctcaagtaaagaagcattgtttgagagttttatcacatgctttatgatgattcagataggtggtgccttgctggagatcttatgccacaaaaaggtcttattagtccagggtgactgacttccctttcckctggggtccagagytttctccaagtatgccccccaccaggaaaacaggcagttcagcatgaaaccagcttgggccttacatgtaggtgcctaatgataaacggtagatatctgttccctacttcccctaactctttcatcctttatatttccctaaaacacatggaaaagctatgaagaggtcgggggacaagggccctccatatataaagaccttcattcacaaaggatgtgttgagataacattttataaactgtacttagaaatctattctcgaaactgcttgccaactcccgaaatccctttaagcaaggagaaaagmctttcagtttaacttcataaagagaaaaccataaaatgcaagtacttcatagaggttaaaaggtaaaatacattattttgaaagcataaaccaccacagggcagacaaatgactcagagcttccccagttttgttataggggaaaggctgaagcygggagaagagcctttagtatccagaggagatgccagaatatttgggaataggaagtcatggaaagaagcttctagaacatcactcttcatctgagatcagtcctgtcttctccataacagaaaaggaacaagaagcttttttttttttaattattatactttaagttttagggtacatgtgcacaacgtgcaggttagttacatatgtatccatgtgccatgttggtgtgctgcacccattaactcgtcctttaacattaggtatatcttttatttatatatttttaagggttttgttagttctttaaggtatcacacagttttctcaagaaagaaaagatgtactggatatctagcagaggccaaatgtcaagctaaaacacttttgcagaaaggtattcgtattcaaccctgacaatacaactataaggtagtttaatcaaggttaagaaaatatgtccaaattcaagttaaataggaggtgatcgagcagggatgtgagtctgtgtcctctaatttcaaagtccatgctttttcttgactttgtgacatacatgagggacaacaaagaaaatctgatgaaggaacctatcaaaccagagggaacaaccagcattcctgctcctattaaaaatcaggctgggcacagtggctcacgcctgtaatcccagcactctgtgaggctgaggtgggcagatcacctgaggttaggattttgagaccagcccggccaacatggcaaaaccccacctctactaaaaatacgaaaattagctgggtgtggtggcacatgcctgtaatcccaggtacttgggaggcttgggcaggaaaatcgcttgaacctaggaggctgaggttgcaatgatccaagatggcacccactgcactccagcccaggcaacagagccgagacttcatctcaaaaaacaaaaaacaaaacaaaaaaacacagaagtcccattctatgtttaaatcatgttctaacattttgcagaatttgtttaaatgccccagtaaagaaaaatacaatacctttatactgaattatttctgcttgttttgttgcttgggaaacacttttggagaatgttaacaagaagataccaaatatccatagctcagcaagagagtcactgcactaaattcctaaatagtccacaaccacagaaaacgggcagtggcagcacagaataatcaaaagcagcttcgtattttctacataaaacaaagcatcatttgtattgaggcatgtttagaaggtaccactgaaagccaggctgcagcctggaatggcttaaaataccaagtttaacaatcacatcaatggcttttaaactttagaggcaaacagcttccttctacttgaaattcaaagtgaagaattagatgcaaagctaatagattaattcagtacacacacaggcttagagactatccaatgccttaattaacatcattacaagtgtatttagccaaccacctgggttttaatgagagaaaggtaaaggtcaaaaaaaawtttttttttaacaagttgcttcaaactaagtccccctactggggaaaaataaagcacaaataatttaactacaaataaaagacttaacataaacagtttttattttggcacattaaggaactattccttaatcagtctatattttttctgtattttaattgaggcagtactgcaattaaaagttcactgaactttgctgttctgcctcagcttgaacctacttcctcaccaatactgaacaactaggagaattacagcgggcaaaacactacagattgaagactggtggaaggcagaagggacagaagtagacagggaccagccttctctagagagcaagaggccttgaccacctaatgcttccagagtaaggacaaaatctccagggtttaaagaaagaacagaaacactaccaactgtgagctttaattacatcatagatgttagatcaaattatgtttcatttcttggagaccagtagaaaaaaaaatattagctgagccatttactcgctatgtggtagtaacagctaccataatgagctgcaattagatatctgtgcttccttagtttttgaaggggagggaacctgcccaatgtctatgactgaagaatcctccacaatgcatatggtggtggatagtaaagtccatcttgtacaaatcttagccaagaagtccaaacacactcttccgggctctctcatgcagctagatccgaggcacgtgaaccaggttcggccatttatatgcacctgcctcacattttcaaattgtccttgattttcctttaagcactttctcttccagatggatttttgaatcaattttgtagtgttttaaaaaaacacacaggatttttagagccatgaaactactctgtgatacaacaatggtagatatgtcattacacgtttgttcaaacccacagaatacacaatatcaagagtgaacctgatgtaacctatggactttgggtgataataatgtgtcaatgtaggttcatcagttgtaacaaatgcacaactctggtggaaaatgttgataatggtggaagctatgcrtgtgtgggggaaaatctctgaaccttcctcccaattttggctgtgaacctaaaaccactcaaaaaaaaaaaagycttctttaaaaattggggatttcattagggattaaatggaatgtctacataattatggaggagctagatggtttaaaataatgaatcagrttattcagaaaaacagtatttccttctacttattcaggtcttcctttaagtccttcaataaagttttattttctttaatgtgaggctgcatagccagtcacagtggttcacgcttgtaatcccagcactttgggaggccaaagtgggtgcattgtgtaggcccaggagtttgaaaccagcctgggcaacatggcggaaaccccatctctattaaaaaaaacaacaacagcaacaaaaccccacaaaaattagccaggcatggtagcgtggtggctactcaggaggctgaggtgggagaattacttgagcctgagrggtcaaggatgcagtgagccgagatcacgccactgcactccagcctgggtgactcagcaaaaccctgtctcaaaaaaaaaaaaaaaaaaagcttgcacatatttcttcttaggttgataaagtttttgttctattgtaaaatgggactttttttcctattcattttccaaacagtgttgctgtacaaaaagatactaacttccagtgtggctcttatatctactgtaaactcctactaggtccagatttaatatcacaatactcttaatcttaagagtctagtaattatttaatttttaaaactaagtaactgtttaatagtagtaatatgaatgttttctgatagtaaaggtcacttaaaattaagaaacgtggtaaaggttgtaggcctctctggagagcttcaaaaataaacacagtgcctcgtttgcttattttagatcaaggtcctaacataaagcagggagaggaaaaaaaataagatgccctcatctggccttctccctgtattatggtttaatactgatttttgctcccttaggccaaactcaaggtcaagaaaaatatagtgctcatttgcactgatggaacagcaggaacaaggtgaatatgctctctaaaaaaacatggtaaagttttaaaaattacattctccaccgtgcctctattgccttctgaaaacactttttgcccagctataagcatttcctaggtaaaaatgcataatcacaaaaaagagaggaattctgctattttgagtttactcgatgattttcaatagtttaagtttcactgtacataatattgcaaatatccgctgggcgcagtggctcatatttgtaatcctagcactttgcgaggccgaggcgagtggatcacttgaggtcaggagttcaagaccagcctggccaacatggagaaacccccatgtctaccaaaaatacaaaaattagccaggcgtggtggcacgggcctataatcccaactactcgggaggctgaggcaggagaattgcttgaacccaggaggcggaggttgcagtgagtggagatggtgcacaactgcactccagcctgggtaacagagtctgtctgtctcaaaagacacaggctgtctcaaaagaataagaaccaacaaacataatattgcaaatatccttatatacatatagtttgaattcaatacctgctaaagttttacctatagatataggtgataacttttttttagggataaatgagggaataacaactgttcaacgcttctgaaaaatatttggtttccattgaaggatactaagtttatctcagttactgcatttttccaaattctcaaaataggtttaacataaaagtgtagtaaaagattgcctgcaaaaacaacctataaaggacatgaaaagctgaactcaagtttttagacatgtctcctaaatttctatgattatgagttcaagtacatgggaatgaattttcttatgtctttgcaacaaagattggttttaattggaaacagtacagcaaaatttttccatattgcaggagatattacctaagtttcagagcagtcttggtagactagccagctttaatttatagaaaatcttagctatgatttacttatataatgaggactggcatggactcaacatatgagtggtcaaattccaagtatttcccccaacaatcctgtgatataacttcatcaggatttaaaattccatctgctttgttgctagcctaatacaaccaggttatagttaagagcaaaaaggcacataccatgcagatattttatgggaaacgttcccattggtctttcaagttggtttgtattagtgaaaaagccagtgtggaaattattatgaagaaatgattcagaaaaagcaatagttgcttttaaagaccaaagggagaaataaacccaaaatcacatgctctgaaactggaaaagtttcaaatgcaaattatgttcctgtctggtgtgtctgaaagacatgggtgctgaagattattaatatattgctatttcttctaagtatggcactggtcaaagaggatggtaggcctgttttgaagaactgttaccgactggtgagtttaggcttggggaccctggtcctgagaaaaataacccactggttggcagttccaccccaacagacagcttaggaggtaactttatgctggaaattacaaaggcttctaaagaagcaaataaagttcccatgattggtgacagatgagccaaaactgaaaaagttttttgttgttattatttttaaacagctttcagaaaactaacaagaaagacattttggtcttgacccagcagagggtgaatgtccccctggatggaaattctgtgaacgaaatttctccagagtaacaattctaatyaattattcaaagccaggggttgattttctaaggttaactatggtctcctgtttaggtcattaaaaactggtttctccttttctttggtgtctgctcacccaggcattgatgagaagctttaacagcagccttgcaataaaggctctacttttaaggtgagtttgtcattttgcagacttggtttaagggataattagcaataaaaataaattttgtctaggttctatataaccaaaaacgttagaaatccacttattctcttatataagtatggaaacaacagacattaatattatcacaaggcattgcaagatcttttgaattaaagagttaaccataattttatgatgctttagtaataaacatacttcttaaaacagaaattaaaactgaaacrttatttgacatagtaactcagaaaaccagtcattctccaaggagactggattaacatgggtttacagagtgaaatgtaacatttcaggcaagtcaattcatgctaacatatttttattgtgcaatacaggtagacaatatatagtttttctagcgagagaaaaatggtgtaccagtgagtattcaccaaaataatcctagaataggttagcacaaggaatgtaatgctattaaagtcacagtgacaatatgcaccagaactctacaaacaagaatgaaattcaagccaaattaagtagttctcattataatgaaaacaagcagtctggcattaagtggggctccacctgttaggagtaaaatttgatactccaaaagatgaggaccagtcagccagcagttggtcaaacacataaaatgtaatcatgtgggaaagggaatgggatttctagaaactaaattcctgaacacacctgctatccctcaatgtctttaactttgactccctccagatctgaatgacctattaaaattatgaacctttaaagtttctgggaaaggatttggttataacccaaactcaattctcaaagtcacttcttataataaagttcaaaattatgtttcctgtcctttttcttttttaagagacagggtctggctctgttgcccaggctggagtacagtggctttatcatagctcactgcagccttgaactcctgggctcaagagatcctcctgccagagcctcccaagtagctaggatttacargtatgtgccaccatacccggataattttttaaaatttttttgtagaggaaagtgtctctttatgttgcccaggctggtcctggaactcctagcctcaagcaatcctcctgccttggcctctcaaaatgctgggattacaggtgtgggtcaccatgtctggcctatttcatttctcatagcctccagcacactgtttgttctaacccaggtaaccctctctgacccactcccaaagcaacaaatccatccggcctggggtgaggagcagcttgctgcccgctgtccatggctgagcttctcattcttgcacacatacctgcttccttcttgcctccctttcctccctctcggctcttcttcagcacagcctttaacattttcaacacttgtttctaaggagaaaagaaacagagagaagaggaattaaacattgaaagttggaatataacttgtgtcttgacaaaagaggtaacttgtgttcaaacaaacagaccgcttaatattaaggtaccctaagccttacattaattttctttgaataaactatggtgggaaactaaatgctgaagacacaaggaatgttctataacttttaatgaagtgctcagaagttcactgttgttagaaaagctaaaaaaaaaaaaaaacaatagtgcattctcagcattccacatctaattaaggttatgaggctaaacctgggtacagtactgcaagatatttggcacagtttcccaatcccagttcatcaaaaggcggcactagaacatgaaatcaaaaagataatgaaagaagctacatggttaaaggcaatgttttacaggtgttactaattatataatcacaaggaaaacattttggaaggttatgaaatgaggcatatcttataaacatttgcaaaataaatacagtgggaacacattttaaccctgatcagagaacccaattaaacagcacacaccacagtgggtttttacaatatataggaagttataactttggggtggggaagggaagtaagtagaacaggcctgtggcactacggccagatcctttaaagaaaaggctgtatctttaagcagggttgtactgagcttgtaaaaacacaatggcccaggtctaagatgaaacatgaaaccatctctacagcaagagacagacaaaaggaccattatttcatcatgaagccagtctcctttaagctctctctccccactgctaactcagatgagatggctgaacaaccccagatggtaaccaatcttagtgggttgtgttaccatcacacctttattaatgcactaagggaagtagaaggcaagcaggtctctattgaacaggcaagaaaaggggtggggaggggaggaatgaggacggggaagggagcagaggaagggaggcaaggagggagaaactcctatgtaggagggctcccacatctgcctagttagcacaaatgcctcaaatggcctcagtgtaacacaccacacaccacctctcagcccccagagtaagcagaagttttgtggcacccgttgagaagggtaaggaatcccaatgtgttgccattcatagaatcacacaacataaaaaggcagggtgacctttcttatcatttggtccaagcctgtatttgttttcccaagccttttgttttactgatgaagaaacagagacccagggaggctggcttgccaggggtcacgaagctaattaacagcagggccagaatccaaatctgcagcagcccagcaggaccaccttcctcccctccaccaggccggtctctcctcacagatcaatgaaagctttgggcaacaacaatcaaacaaaactgagtgatactagaaagatagtatcttaggcagaatttggaaaaagccatactgaaggttatcrgagtaaaatcatcttacacacaagttttacatactgaaggggcatggcttagagcctaattctgtttttgaaaatgctgcttgaataaaccctggtgaaaaaatttaggtttcacctaaagggcaaacactaaagttggaaggcagcaatagtttccatatggaaccgatggaaaacacaaacttctcttaacaagcacacttcagagaaacaatgaaaaacactgtagtataaaaaaatggtagtaaaagttaataataaatagataggtaaacacagacatattcttcaaccaaccaactttggggtttataatttagcaaaaactacctaaaaaataagagaaaaatactgacagagccatgccaccgaagctcatgcaaggtcccttgcaccaagccttggtgaactcttccagagccgtgtgtttacctggatcattgaccaagctcaggccccaccacatccatgagctgctccygattaatcaccyaggtcatcaccagttggcagtacacctaccaggccactcagaataggcatcacacggggcaaggactaggtgacactgactctggtatctcatcccagacaccctgttttcctattttggggcactcagctattttcaggatagacataccttccacatcagtggtcttaagtgaaagaggctatcaaatatctgctatagtatttcttccagttcctgttttcctccataaatagcaactcgaggtaaatagcttaaattttatattcttaaaaaagctattcaaactgcgacctggagcaactttaactgattatacctgagtgcaaaaataaggaaccatcctcccctcccccagactggaaaggaaaaaagtaagtcttcccagcaagttaaattctgaaactaacacagatcagagtggagctatacaaagtcacctggaagtttcaatcgtctctggccttaaacccataactggaacttaacagtcaccaatggacatacaggctatgcccactgaaagggggatggtcacaaatagcatttataggaatagaccctaggggccaataatgacagtacactccagagaagactatctggtatctgcacacttataaacacatacccctatatccaattctggaaatggacacattgggctgttggagctaggtgctgtcacacattggcatgatacaactacttcttgttctggttctgttcacactgagagacacctcgtaatttggctcctttcttagtctgcaaatagtagggagagagtgtgctggtccagttcacacaactgtctggcttgctgacagacaattctgagaataaattaacaaatcggtactccagctttaaacaaaagctctcatgagctttgctttcttttttttttttttttttttttgagacggagtctcgctctgtcgcccaggccggactgcggactgcagtggtgcaatctcggctcactgcaagctccgcttcccgggttcacgccattctcctgcctcagcctcctgagtagctgggactacaggcacccaccaccgcgcccggctaattttttgtatttttagtagagacggggtttcaccttgttagccaggatggtctcgatctcctgacctcatgatccacccgcctcggcctcccaaagtgctgggattacaggcgtgagccaccgcgcccggccgagctttgctttcttaaagggagtcactttgcccagtctcatccatttaagacatggagaatattgagtttctgaggaccaaagagaaggcagtggtaaattcctcaatggaaatggcaccttgaagcccacctgtgtaggcagccagcaggctctcctcttctgcatcatcacacttcccttccagtagcaacttcaactactgtcatttttcccctaaaagggtgaacactgagctgtcatgcacttgaaccaaatagaaatgatgcaaaccagcctttctgacacagtaattcagactcagcagattaaatgacaagcccaacatactgtatggtaaggaagtacttatggataagtatcataggataaaacataagaaataatgttcttttttactatatgtgtatgtgtgtggtttttgttttgttttttgtttgtttgttttgagaaggagtctcactttattgcccaggctggaatgcagtggcacaatctcagctcactgcaacctccacctcctgggttcaagcaattttcttgcctcagcctcctgagtagctgtgattacaggcacccaccaccacacccagctaatttttgtatttttagtagagacggggtttcaccatgttggccaggctggtctcaaactcctgacctcaggtgatctgcctgccttggcctcccaaagtgctgggattacaggtgtgaactaccacgcccggcctactttatattatagaccaaaggcacaggtataactcaaatactgaccaaacaatccctcaagttctgccccataaaaccttagcctctatgacagcaagtagaacaaaggtactgttgaactcaaatacttaagaataagtctttgaaaatgtgaagaacgtcagatgtcatttctttccattatatatttttgaggaagagagtgtaggggagaaaaggtatcttttcctcacccatggcaaagttcatggctgacacccctataacaaaaagattaacaagagaaaggcataacaaatttattcaaccaaagttttgcatgacacaagagccttcagaaatgaggatccagagacttaggaaacttgaatttttacgcttaagtacaatgaagaatggacagccacgtagaagcatgattgaacaaaaagggaatgaggcctaataattggggtgggggcccttagcaaggcctgcttgtccagattcttcttgtcctctgggtacagggcaggacctctctggaatgagagtcttataactcactgtcaggtgagataggtcagagaattccttgatgaccatgcttcaggggagaaaggcaaggggaggtcagagggacctcctttcttctgcagtttctcttatatgccaaggtgccatattggggggtatcctgtcctgagccccaacaaaaggaaagaccagcctctttgttactacaactaaaagttactacaactaaaactgaataatagaagtaaatttcctgtaacgttcattgaggagaaaaggtgaataggtaacattactctgagagggccaatggcctgaagtcacctaaatttctactatcattcaacatgtaagttttccaaatgtcacatattcttcttttaagccccccagaagttaaatagactatcaaaagcttacttttacttctggtatttctccttcagcacaccaagtctttggggacaggcacaacctctctacattatgtatttgaattctgcacagcatgttgtgttggcatataaaatataacaaaaaacaccctagacaaaatagtaagatgattccaaaacaagacaaaatctatttcagtctgtaatcacaatggcaatatcagaaccatgaccaccttgtctgagatcatagaagagtactagcagtaaaacgtttctcttctggagtgccatactgcctatttacacaatttcaagtcgaatctgagagctgagggcagggactatgtttattctttaacagatacaaacagaagccagaacacaggcttcgcacccaccctgttctcagtatttgttgacaggctgcaatgaatacagatgtaagatttcctccaaatcaagcaattaacaaacatttatagcagtttataattgacaaagaatattcctatatattcacacttgcaaggaatgcaagaaaattcagttaaatccatgtgacatcagacaatgagatattagggaggaaaatgctgcatttagcaatatctcttcatatccacatctgaattaaccttaaaacctcagtccagttaccccaaatacctaaacacacatactctgtgcacgctctaatgaaggggcttctcccatcaaactatccacctggcctcaaagcaaaattctctgaagatgctgcttttgtcaaaaataataaagccagagtagcaacatttacaagtgaaacactgtaaactaaggtacacttaattaagacatttttcttctttgcttcaaagaagcatcaaaaacatcctctgtgttagaagcttgaaaagttcttaaaacgtagttagtctgactcacgtaactaacagtcatgccttctgtataacacctttagaactgttcttcatattagcaacaagaaagtggtggtggtagcagggagtctgaagcagcctacaaaataaataatacagactaaagcaaataagaaaaaacaaagcgtaagagaccaaaaaaaaaaaacaacaacaamaaaaaaccacacacacacacacacacacacacacacacacacacacacacacaagaggtctgctagatggtacactggctgttatctagaaactcatggaaaaccctgtacacagaaatttcctgaaagcaagagccatgtctcatcactcctaggagatcctaggaggctgggaaaaaccagcccttgatgagtttttgacattccaagatttctctcacactttccctcactttagtagagaaatcctaggaattgacagagaccttgccaatatgactggaaacaactaacggaacttctccaggatccagatgcttcatccagaaaagtgtgtcagggtgcgggggatggctagaacaacccgtaaataattgtgataagtaaagaattggcctttggttcttcttttttttttatatatttggttttttttaagagagtcttactctgttgcccaggctggaatgcaatggcaccatgacagtgacagttcactgcagtcttgtcttctcaggctcaggctatcttcccatctcagcctccagagtagctgggactacaggcatgtaccaccaagcccagctgcttattttttcatagagatggaggtctcattaggttgcccaggctggtctctaaactcctgggctcaagtaattctcttacttcggcctcccaaagcacagggattataggcatgaagtacagcacctagtctggtttttcttaatttgcatagctggaaaatatgacattaaactataatttattctctaagacacatagatccagtcattcattctttattcaacaacccattctacaagctgaacctctattctactattctattctttatagttttgtcctaagcaaaaacacttcagatttaagtataagttattaaaaagcatagtaaatttacagtcacaagtaatatgaatttaaaagagttctgggcatgaaattggaaatcaaatgcttaagttctgatgcaccaaaattaagtggaaactattgtggtgaaatcaccttccacctatatttaaaatattctgtacattcatacaggttgtttcaggaagagtttctaccaaaacaaacaaacaaacaaacaaacaaaacaccttaccttagccagtatttcaagttactagaaaattagtattttgataagtacttggcagaaagaaaatttcacttttggaggagacgataaagaagttgcttccttctaagtacaagagccatcttcatatacctgtaaagggatttgttcaatccaaattctaacaccatttcttccataaagccttctcaggccacaatggtcaaaagatatgttttctctaattctacatcctgccttgttctaatatgatgatagatcaaaattatggtgaaaaatgttgaactccacaaatcccccatggcatctagcaatgtaccttacacacaacaaacactaaaaaaaagtctttaaatgagtggcagggttattatggaagggaaatcaaaatcaacggcaattctcttccaacaaggagtttggactaataatttaagaattctggtaccaagtactaattcccaactttatggtcaaaataatttggtgtatacatgaagaagtgcacatttaacayagtaagatctgttcaaataacaggctttcagaagcactggctgcaggtaggttttatttgggtatttcaaataggcacacagaagggataagtgcaaagacagtagccaaaaatctgaaatcaatacactctccttcaaaaaaaggaagggttcagaaagggcagcatttccagcaataatcatgatgtctcccaggccaatggctactgtgcaaggcagagctcagtcttgcagagagctcctgctcacttacaggcaggagttccctgtcttcatttccctgtcacctgagtgctccctagctgagacttacctccctaccacagcagcaaaacacggctaactagaagacaaaactccaatattgtcactagtactgtatatcatccaggtatttacatagatgtttagatatattagagaaagcaaaagaatttcataagcccacccacttcaaaacacaccacagaatcacctcatcttygaagccttcttcatcttattttaattgtttatacacctgcttccttcaccaggctttgggcctctgaatggtcagaccctgccttgctccccaccccagcaaagtatttgttttccaatttcaacatcaatgaatggttgtggagaaacataattttaatctataattttcaaagggaattattgtacctaaaaacagactgttatcctttaataactttaagtaaaattaatatccttctacaggctatgagcaatggagaaacttgccctggctctcctggaccagcaagtggcagaaattgggttacaacctaattttccaattaaggaatgagtgttgggttagcaattgcaggttttcattcgacatacatytgtacgttgctaccctgtgccaaacaacaagggacacaaaggcaagtacaactgacagaggaggaagacaacatgtggacaaacatgagcaggaagctaaaaacattcatgcctccattttgtctacaaggtaaaaacaaggtaagaggtgcagtgaaggttcaggatagccctgtagatgagaggaaggcaagtaagagattaaaaggacagctggctgggcatggtggctcacgcctgtaatcccagcactttgggaggatcgtttgagcccaggcctttgagaccagcctgggcaacagaaggagattctcagaaaaaccaaaaacaataaaacggacagctgaacagctctgatcatccaaactaggctgcagaccaggccataacacccgattatgaaactgctcctatcctcaaaggctcacaagtagcatcatcatatcgtgcaactcatctatggttctgggttagtggaatatttgcgggctggcacacaccatttgcctgctcctgtagttcacggatatgtcctatgaggagaaatggtacacatgccaggaaactcctatgattgaagccaatggctggatgtgatattcaagctagacctggactttcctaatctgcccaacttcatggacgggaagaacaaggtcacccagagcaatgccatcttgtgctacactgctggcaagcacatgtgtggtaagactgaaaagattcaagtggacattttagagaaccaagcaaccagtttctgcacacaactgatacagtgctgttacaactctgaccatgaaaaactgaaacctggccaggcgcagtggctcacgcctctaatcccagcactttgggaggcttctcttttctcgtggatcacaagttcaggggatcaagaccatcctggctaatacggcgaaaccccgtctctactraaaatacaaaaagttagctgggcgtggtggcgggcgcctgtagtctcagctactcaggaggctgaggcaggagaatagcttgaacccgggaggcggaggttgcagtgagccgagatcgcaccattgcactccagcctgggcracagagcaagactccatctcaaaaaaaaaaataaataaataaaataaataaaaaccaaccctgaaacctcagtacttggaacagctacctgaacaactgaaacaattctccatgttcctgggagaaattctcatggtttgcaggggaaagctcaccttygtggattttcccatctatgacgtcctggatcaaaagtgcatgtttgagcccaagtgcctggatgagttcccacatcttaaggctttcatgtgccgttgaggctttggagaaaattgctgcctacatgcagtctgactgcttcttgaagatgcctatcaacaacaagatggcccagtggggcaacaagcttttatgctgagctagaggcagacttgcactgctagttttgtttcatccgtcmctagggggcctccacwcttttttgttcttttaaataaacagcacttgggctaaaataaataaataaataaataaataagctatgctgtgcaattcccttctctgactctcagccccaagaaccatccagggatggtccagagaatgcaggatctgatcaatgatcaggagttcacagtgcaggggccagtacaggagtgctcagagtggtgtgctgtgaaatcaaggctggtcaggaagggaatgaagccctgagaggtaggatagccagagagaaaaagtatggtgtctcaaagagatcaaagaacaaacacagtcggaataaatgaatgaggaagttgaaagagtctggttctttttaaagaatttttaaaatttggatgtggaacaattccagacaatgataaagcccacaggattagtaaaggcaaatctgtgatgtgaacccaggcctgacttgaaagctcaggcactgaatagctgcctccaaagtcctcaatgaactgagggtagggggaatagggaggtgatcaggacagcacagaatacacgcctcaaagaaagggaggctttgcatgaggatgaaagtgtagcagttatggataccagcatcacctcagggacccagtagccatgcagctaaaaagctcctggagaaccacctagggtttgagtatgaaccacagtctgatcgtggtctcctcctctcacataactcagtagaaggcgtggctagggccatagagtctttctttgtgtaaggtttagggcaaccggaaacccaagtcccaatcctccttatgacagttagctccacaacaaccacactcagaattacattctcttttcctttctccttcctgttgtttcccacttgtgtcatacaacagagctacaatccccaacttacactgcccaccttcctgatgtgcaatcgcaactcccagaatacaggtagaggcattatgtatacaaagtgattctggacaagttgttatttcaccaagaatactgttccctttcctgctggactggataatttcaggtctcttccacctgtaggcattataatttttaagggggaaactttcttgttcctaagaccactgtaagcacagtacacaataaaccatcatcacagatgaaaaaggaacccctcagaggaggccactgtatgcgtgataagcttttactatgaaaagagaccttgaggacattttcaaaaagtgttaaaaggcactcaatcaatgccagctgaatgaaatttggtattataaacctaaggaaattaaaatttttaaattgcactggatctggcctcaaagtgaagggtcagacagcctcaaagatgcctgtgaaaggcagctattcatcacagaatgatctcttgcttatgtagctgacagatggatctttcacttaatgcccagaatataagacatcaaaaacgctcctccacttgctgaacaaggttataacctccccaggccctaatttcattaggattggagttctcaatacccacgcagggtgattagaatcacccaccaggtgattctaatgtgcagccagcaccccttatttaccactatccatatgcctggccctgttctaagcacttaccatgcatatactgattaaatcctcacaaccaccgtctgaggaaggtactgttaatctccattccacaaaggcacagacaagctagtgacttgcccagggtcacacaactcagtgtgcatccaggcagtcttgatccccagcctgaccatgcagtcagtctaccaggcctcctttcagttgaaaagaagagagaccagcccccagggagtggtgagagtcaaaggcaaagctgctcaacaggtggaaaagataaatcggctttggccaaacatacacacggctcacacacacttcactcctagagcagcatcccatgctgcaaatctatcctgaaaaaaacaaaaacacctgcctccactgagagacatctacagtacagtccctcgagttatcagttatttcaaactacagtgctgtccatgtgtgacctggaggcaccatgcaacagaacacatgccaaaatgagcaagctcttgagttcattagcccacagggggagaaccctgggaggtgggctacaatgccaatatggaggatttggggagacagacacctttgtgtcatacaaacaatgctgcccctattcctaacacttacccagaagttagcaactatggtattcatgaaaaacccrgaaaactgcctcatttcttgtgaataaattgtataaagcttgttacacggtgacaggatgcagtgagaaatggcctgatgatctcaatgtctttctctgggcaattttatacagtctaataaatttagtgaggttttaaccttggatatcaagttctaaattaaaccaagatatgcctgcagtgatactgcagtggagagctgaatcaaattcatacaagccacacagcatcatctcttcccatagctaaagcaatgacatcagcatatgcatcactgcgctctcctctggaatttgtaaaggaaatcattcttggccataaacatttggttgcagtaagcagtctcacagaagcctgtgagaaagggcatatgggcaaggacaatagctttatttttttctcttttttttttttcccttaagctctgttggacttgaaggcttaattttttaattaactccaacagccccaaaaggggaataccagagctccagatgataaaagtcacagacaaggcatgctagaaaacaaaggccaaatatgttaagacttaaaaaaaaaaaaattcaggtttaatgttaacaaatctagtctcaaatgaggatgagaaagacacaagggtgccatatccaaggcatgaatctgtaaccttttaagttccatggatggcttcagcaatctgtaccctcagagtgtttttgaatgatttttaagtagacagtcttattacaaagaaaactaattatattgaaacacagatagcaaaatgttcaaaaagcaaacctgatacactaaagtatgcttaacrcataaataagacacagcagcaggttttataactactgcagtttttaaagcagcgatgggcataaatgtattttaaactatttccacaatatgatacaaaaatcagttaatttccatgtgacaaagttacatgtcctgttgatcttacatggttggttgcccactttcatgattgaagcaatggctatattttggctagaggttagtgaaaatacagttgagtttttctccacccattcaagttcacagatcccttgtcttagtccattttgtacttttgtcacagaatatcatggagatggtaatttataaacaatagaagtttgtttataaacttctatttggctcacagttctggaagctgggaagtccaagatcgaggggcccacttctggggagtgccttcttaccgcatcatcccataaaattcagaaaattaaacagtaacttactgattggcacacattagcaggagcragtatgtcacatacacgccactgctagcaattaaaggcaagtcccatgattcattttcagaatagtctgtaaaagccctatttatcaagaatgtccatcaccaccaaattactatctacaaaaaccaggcctggcatgacaggagacagactctagatatttactgtgacagacaatgtacaaaaacaaaatgccacatttcatatttgagacaggtgtttttaatacacgctgttggttgtattgttttcttggtgctctcctcactctttttgaaagtatttgtgctctggaaactgccgtgtttcagttaactggatcaggcttcctaatgaatgtggtacccaaggcttggcctctcccgcccccactgcctcatacagtcacaggccattccccagctgtatgccctaaatcaggggatgcccataggaagataaatataattcagagtccaaaatacacggacttaaactgagccattgccaatttctcatggatcctgggtaaccgagatggtttttgttttcatggttagkaacagctgcaagagcgcaatactctttctagactaataaaataacctaagtctggctcagtatttcagctgtggcagcagccaaatttcccagaatggtgcaagcctcgtgcagttctggaagagctggggtggtagttctgaactaaactgaaggcatccaaacccaacccaacagcaaacacacacacacacacacacacacacacacacacacmcaaacaccacttcaactaaattttgaattagagctaattcctatgggtggatatgacatgttatttgtaggggtcccataaaactaatcaaacctatgaagtttaagccttatacttgaaggtatgttacgcgccatgtatgaacatcagatgtttttcctctaaaacccagtgaaagattcaattaaagctcttagtaactctgcagtgaaacctttgatcactgattctgtcatcatttctcttagtatgaaacatctcagacctaaagaacaaaagtcactattgtgacgcagcacagaaaacacatgcacacatacatacacacagctttcttttcttggggaggaatagggagttgcagaagctactttttccacaatgagaacattctttatacactcttgtacatgtagcccagttaccaagttatttcctaaatgtaagtgtgtggtccaaatgtctcccactaaggaaaaacagcccaattagaacccagtggaaaacaagacacatgtttcttgaatggctttgaattagagacggtggatgtaaaattgttgtagatataatgaagatgttgcacagatgtactaagttttcatggtctcagcaaaacatcttcctggtacagcaaaatatgtcagtctgcaacaaagctggatataaaataatttttaaaatatctgattcttgtttttatgcagtaaaacttctcaagccaactctcttttgccttctcacaaacctaacaaagcccatatttcaatgtactgataattcactaaaaactataaaactgcattcatctccaattgacatcactttttataatcctcatatcataaatcaatacaaatgsaagatttatcgatacaaatggaagacctttacttcacaaatccagcaaccaaccacaaaagcaatggcagaggtagagaaacttatttcacagacaacctcctgtttagtcctcacaaccaccaggtgggaactataattatcctcttttgacagataaggaaactgagacttagagaatctcagcagcctgctctaggtcacaccttagctcttaacacctcattccacttcttcctttgcaagaaaaacatgcactaaaaccatgccttggcaccctaagccttggatttccagataaaatgacattcaagaacaagtctctgttacacagcatggggcctaaagctaaatggcaaaactgcaacgctgttctgataacctggtttaatttaaaactatatcacaggctgggtgtggtggctcacacctgtaatcaacactttgggaggccaaggtaggagaatcacttgagtccaggagtgtgagtctttgtttctacaaaaaaaatttttttttaattagctgggagtggtggcacatgcctgtagtcacagtactttgcggggctgaggtgggctcatttgagcccaggtgttcgaggctgcaatgagctctaatcatgccattgcacttgagcctagataacagagtgaggctcttaaacaaaaaaaattatgtcactatgtattcctaagcattttgacttactcttctgaaagagaaacaaatgctgcactcccaagcacccaatcccatatcagtctattcttgggtctctttctctgtgctatcatccttggaaaaatgaccagaatacccacttcaactgctgcctgtatgcaggcaagtcacaaatctgtttctccattctttatctgtgctacagttacactactttatttccaacttgccgtcatcagccctggctcacatacctcaacatgtccaaaactaaacccatcttcctctccccacttccaaaacccactcactagtctgggtccaggttcctgctgataaagcaccatcctttttagttcacgagactcaaagcccctcctctttctcatggcctcccttccrtgtctggtaaacagccaaacaggtctccgtctcaccagtcctgactcccctccattcgcttccaccactctggggaggtcctcactatctcttgggtggacttcaggctgaaacctgtaacgttaggccagttaagtgcatcagagttacctgggggacttgttaagaggcaggctgctggaccccaccctggacggttctttaggtctggggtacagctaccctgctgatgatgaagcagtccctcatggtccacactcccaggaaccactgttattatacactctcctccctccctttctacaacacttacataaattcttcttgaatcctaacataaaccaatgtaacccttgtaaaatctgaacatttaggtctctgataactaagtttggatggtaatggctaccaactgccaaggacctactgtgagtcacagtctgtcaagttcagtcaaaacaactgcaaaatacacagcactgcccctaaatttacaggacaattttataagaaaccaagactttgaaaattaaacaatttctaaattccacaataatagattgagtttatctatgtattaaaagggccctctccttagacacactctaaaaaccaaatatgatggaagagggagacctatgaagaaaaaggagcatttccttttcagaacagggcaaaaggagggacctatgaggaaacaaaatataaaacagccaggtctcaatttacagttcattgtggtacagcacaaaagtccatccatgctcccaagagcaatttaacagaataaagagggccaattgtggtggctcatgcctgtaatcccagcactttgggaggccaaggtgggagaatggcttgaggccaagagttcaagaccagcctgggcaacatagcaagagcccatctctacaaaaaacttcagtagactctgcttttgttcacccgcctatacccaaaaaggttctgtatgatttttgtagatcatatccttacctgttctaaactagttttactaaggactaacaaaatttaggtctatatgtgctataaacaaggtcgtttcttgccttttctgcctgtgcaagaatgatcagcattaacatcagaaatccaggaaaatttctatgttcacattgtcgtttataaaaaaagagggctcatgtaagccagcaaatgatcaattcccacaattgaacacaacttttcaaaaatgccctgaatttgaaagcactttcctgtacggcattccatttcctcctcataaaaaccctctgagggygagcagcatgatcctactgtccttgtctcaggccacccagctaatagacagttcacggaagagccagggctggtatccagacgaagccacagacaacatggaccatcaagagtcatgtctttaccactaattgtaagaaaaaatatacgttaacagattcaaatacgaacaagaccagttactgccccccaaagccaatctacttgccagatatctacaacagtgctgtggcattatagaaacaactcaaaacaaggtggcatgataccaaaggcaaaggtgttggggtcaggtcaaccaacaccagcccatgtggtctaaaccccaactatactgtgctttccttgccctgtgcccctgggcctggacacaagctctctgaccctagattcctcacttgtaacagagcatgacatccctcagaatagctgtgaaaaaaaatcagaaataaaacatgacaagtttgtaggactatacctagcatgaaacatatattatagaaatggtcactaatgtgttgtattattacacttgtttatataggcccagtgatgagttttaaacatttataattaaatgttagtggtgtgaagtcccaaaatttgagacaggtctcaatttagaaagtttattctgccaaggttgaggatgcatgcccttcagacagcctcaggaggtcctgatgacatgtgcccaaagtggtcagagcacagcttggttttatacattttagggaaacatgagacatcaatcaatatatgtaaaatgaacattggttctgtctggaaaggcaggacaactggaaatggggagggggcttccaggtcacaggtgggagaccaastgttgcattcttttgagtttctgattagcctttccaaaggaggcaatgagatatgcatttatctcagtgagcagagggatggctttgaatagaatcagaggcagctttgccctaagtagttcccagcttgaattttcttttagctttagcgatttgggggcccaagatatttttctttcacggtggaatgacttaagtttgcgttttccttctttatttaggaaattaagataaaatgtaatcagcaattttaaaatggggctgagggagggctgaaggatgaatcacaaatttctggcttgagtgacagggtagaaagtagtgccaatgaccaaaatgggaaaagcagacaagcgtggggtgagtggtttggagtggggagcaggaagcaggcaataactgggggggggaaatgagttcagtttggatatcctgatttaaaagtacctatgagtcatccaagcagaaatgtccaaaagattgtctaagaggaggatgaattcagagagacctggggggtccatgaagtgtggatggtggctgaagccacagaattattgaggtctcccccaaaaaggctgagcagactaaaagaaaaccaccaaggatgaaccaggaacataagggcagatacagcaggacctaagaggaaattaaagaagcaaaaacaaagcagtcgagtatggtgcaaaggggcggggcaccatggttcatgcctgtaatcccagcattttggggaggccgaggcaagtggatcgctagaactcagaagtttgagaccagcctgggtaacatggtgaaaacccgtctccacaaaaaatacaaaaaaaattagccaggcctggtgcctcgcgcctgtactcctagctatttgagggtctgaggtgggaggatcgcttgagcccaaggaggcagaggttgcaatgagccgagattgtgccgctgcactctagcctgggtgacaaagctagaccctgcctcaaaaaaaaaaaaaaaaaaaaaaaaaaaaagtaaagaaaagaaaagaatggtgcataggaacccagaagagacagctttgatgaggaatgatcagcagaatcaaatactacaggaaaagtcatgtcaaggactaacaagtgacaacaggcttcaatgatcagaggccatttgggacgtcgacaagggcagtttctattgaggcgaaggaaaccaggagacaggccatctgtagggtcagtccctcctaaattgtaaaattctttaacttcaaaactgaaactcacccttctccctcaaacccaccaaattaataaaatgtcaaatagcaatgtgttgcaaggttttctttcacagaaaaggaatttgcaaaagagagacgcagtctaaaaccacaaaaccatttaacatgatttttgctattaagttcctatctattttctaaagttggtcccagggaaggagaaaaattagtgaattctctgccaaacgaaaactgaagggggaaaaaaaaaacccacaactttctaaataaatttcctttctgataaatctctatgggcaatacacttaaattgctatttcaatgttactttgaraaacgtgttaccacaggaagaaaggcttggtttcaatacgcaaatctattgtaaaatgccatttaagcagatttccacctggatttctcagtaagcctaaactctggttgaatttagtaaattcctcttccatgtcatttttcttgttctttgtcatgttagcatcataraaaatgctatcgcatgcaattttaagtgaaaattataaaatagttttacgatatgaattatggcacaagggaatgtttgggttggcagtgtcaactggttaaacaggtcagtggaattcaaaaaagttcccctaaacgtcggctcaggctaagaaagaggtttataagtttactccccatacaaatatttttcaaaagttacatatctcaaatatkaatgactattatagaattgtcattaatataaagcaaaaaaatttgaagatctgaggcttctgaaatatattcctccaaaaatactactcactctttgtatgcatcactgaatttaagcagacaatttcttcggatcttctggtaactaattttatgtatcctttaaactctttatcatatctggctatcttaattttatttatttatgagacagtcttgctctgtcacccaggctgttgtgcagtggtgcaatctcggctcactgsaacctccgcctcccgagttcaagcaattctcatgcctcagcctcccgagtagctgggactacaggcatgtgccaccatgcccgggtaatttttttgtatttttagtacagacaggcactcctgagctcaggcaatctgctcacctcagcctctcaaagtgmtaggattacaggagtgagccactgcgcccggcccatatgtggctatcttacttcatgatatacactatcacctcttgtggaactttaaaacaacaacaacaacacagcagggactcctcctccccctaattctagttcagcactcctcaagtgagtcccagtatcctaatttttaaagcttcacaggaattgtgatatgtactctgctgccctgcccctgtggagaagctccgccttttggcaggatcccgcaaagttytggggagcaacaaggccactgcattcctcatggatagcagggtgtggcaggagaactgaatgcagaaaatgaaatcctgctggcaagtcacacaaaacagatggcagagtacatgggcacatctcatagacatttcaagaactcacagcaatttggaagctccttttatcttgacccccatccccttggggcagtatttccaacacccatggagaagcgagccggtgtctccaatgcccccagtcagccatttggtcctggatgtcttggggactcctgcttgctgcctccactgtgcacagctaggcataaatagccagtcttccaagctgtgctcacttaagatgggattggaggcaccattctcagccaggtctctttcttaaaagagggagtatctgagtcctactagatgctaggcattggagacagaatgcaaataaaaagatgactagaacatagatcatatacattaggagcctccagcctcgccaaacctcttgaaatagttttaagacagggtttcatgctgtcacccaggctggagtacagtggcgccatcagagctcactgcagcctcaatctcctgggctcaagcgatcctcccacctcagcctcccgagtagcttgggactacaggtgcatgccaccataacccagccatttttgttttgttctgtttggtttggtagagatgaggtctcgctgcgttgcccaggctggtctcaagtgatcctcccacctcaacctcccaaagtgctgggattacaggcgagagccattgttcctggcattaaaataggtatttctgtttcataacttacatataagactacaatacagggagatctcagcacacggttagcaagtttccccaagttcctaaagccacacaactagaaaatcctccttgaaacccaggggaagaagagggatgacaactcagagtaagttaacaggacagtctgtagaacgggcaagaggcagaacctatgtcagctttaactgacatgaccccaaaaagccaatctatgaagagcatttgaggtaaggcaacctgtaaatgtttccttatttgtcttccaggagcgataaggagccttgtcattaaactttaagaagtttttcacggggaataaggagtagaagaatgaaaatgatacggatgagacagccagtctgacyttattaaaaatgtgaaaattttatcagttatacttctgacaactgtacttaaactgtaaacaaagatactaagccattcaatcaacatatattaaatgttttcaatggaaaagtactgtgctagacaccataaaaaagggatccaaaattctaaaatgggcacaagtcaataaaattaggaaagcttcaaaagagtgcactaaagcacgcatgttattagtaagagtgctttaacacagtaagataatgatttactttaagtttctttgaagaaatctgatttactttcagagccctcaaaatttaccaagaatagcataccttgaatacctggcctgtcaaagcatggattccctatgagcacgtccctggtctcaactctcctcaccccacatgccacttgcttgcaacagagagtggttgtctccctcactcagggatgcccgtaagttcctcccaagaagatgaccatagaaagctggcaaaagaactggaaaaaagaaaacccgtcagcactcttccctatgagacgagaggcacagagtttatcaacaccagctctgacctccccaaaaatcccaaagcagcagtaatggagaaaaagacatcacatggacatactgtcaagcccagtaaaagcagagtgaccggggattggcaaaaccaagagaatccattccttcctcagatgctcactatccaagctgagtcaggacatcaactgagaagcacctgctcttaagcaaggtactagatgcatccggtttaccaccactatctcaggttttmtgtttatgtgatgctaataggtttacagcccagtccacaacgaaatgttttaaaggtttaagataacatgccaagaacctctctcaaacccttagcatgctgaagtcctcctaagcacctccttcccctatctcctgcctcacccctcaggagtcccaggtttctacgaaattcaccattcccaaacacaccactcaacttcacacctttgctctttctcttccctcaacctgaaaccccctctctctctggaaattagtcatcctccaggtacagctcaaatatcacctgcatgcccacrccaccccccacggaatcttgccagccctttctstgtgctcagaacacctggttggcctctgagttgcagcactggcttcgttctgcctgagctcccctcctaccagtctctccagggctggtcttccctggtgtcatccaccaccctcccgctctcactctcatcacaagcagaagcagatgctccatgcacgcttgctcattgaaagattccaacaaggagctcctgtgactgacccagagcctatctccctgggaagtgtccttttcactgctacacgtcctggagaacattcgttttcaagggtgctctccatgttcaaacacaccaccaactaggctcctgcccaagtcaatcctgccgggcttcactgccagaaagaacgggatcatgtgcagtcacgtttgggccaaaaaaaccaccttggcagggcaccagggtgctaacaggtttgtgcgtgccgaggctgggtggaggcctctcctcctcctaagtctgtttaatgaggagctccagaagacctgctgccttccccaccaggacttcaaagatgagaacggagaataggaggtttctctggaaggaaaccagggagtaatacaggggatgggttcagcctttccctgacttcagggtcagctgagatctcatttgagccaagcacagaggagaaccctacatgaaccaggtggtcacccccatgtcaaatgcctaatgtttcctcaaaaaaagtctcaactcgaacatggggtagggttccaagatggctgaataggaacagctccagtcttcagcccgcagcgtgactgacacagaagacaggtgatttctgcatttccaactgaggtgcctggttcatctcagctgggactgggtggacagtggatgcagcccacagagggcaagccaaagcagggcaggtcatcacctcacccaggaagtacaaggggtaggggaattccctttcctagccaagggaagccgtggcagactgtacctggaaaatcgggacactaccaccctaacactgcacttttccaactgtcttagcaaacggcacaccaggagattatatcctgcacctggctcagcgggtcccgctcccacagagccttgctcactgctagcacagcagtccgagatcgagctgcaaggtggcagcctagctgggggaggggcatccaccattgctgaggcttgagtaggtaaacaaagcagccgggaagctcgaactgtgtggagtccaccgcagctcaaggaggcctgcctgcctctgtagactcctcctctgggggaagggcacagctgaaaaaaaggcagcagaaacttctgcagacttaaacgtccctgtctgacagctctgaagagagcagtggttctcccagtacagtgtttgagctctgagaatggacagattgcctcctcaagtgggtccctgacccccatgtagccttactggcagacacctcccagtaggggccaactgacacctcatacagctgggtgctcctccgagatgaagcttccagaagaaggatcaggcagcaatatttgmtgttctgcaatatttgctgttctgcagcmtctgctggtgatacccaggcaaacagggtctgtagtgaacctccagcaaactccaacagacctgcagctgagggacctgactcttagaaggaaaactaaaaarcagaaaggaatagcatcaacatcaacaaaaaggacatccacaccaaaaccccatctgtaggtcaccatcatcaaagactgaaggtagataaaccacaaagatggtaagaaaccagagcagaaaagctgaaaattctaaaaaccagaatgcctcttctcctccaaaggaatgcagctccttaccagaaatggaaaaaagctggacggagaatgactttgactagttgacagaagtaggcttcagaaagtcagtaataacaaacttctccaagctaaaggaggatgttcaaacccattgcaaggaagctaaaaaccttcaaaaaagattagacgaatggctaactagaataaccagtatagagaagaccttaaatgacctgatggagctgaaaatcatggcacgagaactacatgatgcatgcacaagcttcagtagccaatttgatcaagtggaagaaagggaatcagtgattgaagatcaaatgaatgaaatgaagcgagaagagaagtttagagaaagaagagtaaaaagaaackaacaaagcctccaagaaatatgggactatgtgaaaagaccaaatctacatttgattggtatacctgaaagtgatggggacaatgtaaccaagctgaaaaacactcttcaggatattatccaggagaacttccccaacctagcaaggcacgccaacattcaaattcaggaaatacagagaacaccacaaagatactccttgagaagagcaacccccaggctcaaaaataaagggatggaggaagatctaccaagcaaatggaaagcaaaaaaaagcaggggttgcaatcctagtctctgataaaacagactttaaaccaacagagatcaaaagagacaacgaaggccattacataatggtaaagggatcaatacaacaagaagagctaactatcctaaatatatatgcacccaatgcaggagcacccagattcataaagcaagtccttagagacctacaaagagacttagactcccacacaataataatgggagactttaacaccccactgtcaatattagacagaacaatgagacagaaggttaacaaggatagccaggacttgaactcagctctgcaccaagtggacctaatagacatctacagaactctccaccccaaatcaacagaatatacattcttctcagcaccacatcacacttattccaaaattgaccacatagccggaaataaagcactcctcagcaaatgtaaaagaacagaaatcacaacaaaccgtctctcagaccatagtgcaatcaaattagaactcaggactaagaaactcactcaaaactgcacaactacatggaaactgaacaacctgctcctgaatgagtaccgggtaaataacgaatgaaggcagaaataaagacgttttttgaaaccaatgagaacaaagacacaacgtaccagagtctctgggacacatttagagcagtgtgtagagggaaatttatagcactaaatgcccacaggagaaagcaggaaagatctaaaattgacaccctaacatcacaattaaaagaactagagtagcaagagcaaacacattcaaaagctagcagaaggcaagaaataactaagatcagagcakaactgaaggagatagagacataaaaaacccttcaaaaataaaataataataatgaatccaggagctgttttttgaaaagatcaatgaaattgatagaccgctagcaagactaataaagaagagaagaatcaaacagatgcaataaaaaatgataaaggggatatcaccaatgatcacacagaaatacaaactacaatcagagaatactataaacacctctatgcaaataaactagaaaatctagaagaaatgggtaagttcctggacgcacacactctcccaagactaaaccaggaagaagttgagtccctgaatagaccaataacagactatgaaattgaggcaataattaatagcctaccaatcaaaaaaagtccaggaccagacggattcacagtcaaattctaccagaggtacaaagaggagctggtaccattccttctgaaactaattccaatcaatagaaaaagagggaatcttccctaactcattttatgaggccagcatcatcctgataccaaagctgggcagagacacaacaaaaagagaattttagaccaatatccctgatgaacatcgatgcaaaaatcctcaatgaaatactggcaaactgaatccagcagcacatcaaaaagcttatccaccaagatcaagtgggcttcatccctgggatgcaaggctggttcaacatacacaaatcaataaatgtaatccatcacataaacagaaccaaagacaaaaaccacatgattatctcaatagatgcagaaaggtcttcaacaaaattcaacagcccttcatgctaaaaactctcaataaattaggtattgatgggatgtatctcaaaataataagagctatttatgacaaactcacagccaatatcatactgaatgggcaaaaactggaagcattccctttgaaaactcccacaagacagggatgccctctctcaccactcctattcaagagtgttggaagttctggccagggcaatcagacaagataaagaaataaagggtatttgattaggaaaagaggaagtcagattgtccctgtttgcagatgacatgagtgtatatttagaaaaccccatcgtctcagcccaaaatctccttaagctgataagcaacttcagcaaagtttcaggatacaaaatcaatgggcaaaaatcacaagcattcctatacgccaataacagacacagagagccaaatcatgagtgaactcccattcacaattgctacaaagagaataaaatacctaggaatacaacttacaagggatgtgaaggacttcttcaaggagaactacaaaccactgttcaacgaaataaaagaggacacaaacaaatggaagaacattccatgctcatggataggaagaatcaatattgtgaaaatggccatactgcccaaggtaatttatagattcaatgccatctccatcaagctaccaatgactttcttcacagaattggaaaaaactcccttaaagtccatatggaactaaaaaagagcctccattgccaaggcaatcctaagcaaaaagaacaaagctggaggaatcatgctacccgacttcaaactatactacaaggctacagtaaccaaaacagcatggtactggtaccaaaacagagagatagaccaatggaacagaacagaggcctcagaaatgacatcacacatctacaaccatctgatctttgacaaacctgacaaaaacaaggaacacggaaaggattccctatttgataaatcgtgctgggaaaactggctagccatatgtagaaagctgaaactggatcccttccttatacctatacaaaaattaattcaagatggattaaagacttaaatgttagacctaaaaccatgaaagccctagaagaaaacctaggcaataccattccggacataggcacgggcaaagacttcatgactaaaacaattttggcaacaaaagccaaaattgacaaatgggatctaattaaactaaagagcttctgcacagcaaaagaaactaccatcagagtgaactggcaacctacagaatgggagaaaatttttgcaatctacccatctgacaaagagctaatacccagaatctacaaagaacttaagcaaattttcaagaaaaaatcaaacaaccccatcaaaaagtgggcaaaggaaatgaacagacacttctcaaaagaagacatttatgcagccaacagacacatgaaaaaatgctcatcatccactggtcatcagagaaatgcaaatcaaaaccacaatgagataccatctcacaccagttagaacggcgatcattaaaaagtcaggaaacaacaggtgctggagaggatgtggagaaacaggaacacttttacactgttggtgggattgtaaactagttcaaccattgtggaagacagtgtggtgattcctcaaggatctagaactagaaataccatttgacccagccatcccattactgggtatatactcaaaggactataaatcattatactataaagacacatgcacatgtatgtttattgtggaactattcacaatagtaaagacttggaaccaacccaaatgtccatcaatgatagactggattaagaaaatgtgccacatatacaccatggaatactatgcagccataaaaaaggatgagttcatgtcctttgtaggaacatggatgaagctggaaactatcattctcagcaaactatcacaaggacagaaaaccaaacactgcatgttctcactcataggcgggaattgaacaatgaaaacatttggacacagggcgggaaacatcacacacgagggcctgtcatggggtgggaggatgggggagggatagcattaggagagatacctaatgtaaatgatgacttaatgggtgcagcaaaccaacatggcacatgtatacatatgtaagaaacctgcacattgtgcacacgtaccctagaacttaaagtataataataataattttttacaaaaagcctcaactcacgttcagcgacassttgcaaatgctgcaagagcttctaagcaccctaggtttttcctacataaggttgatgacctcactggcatagtatctaagcattcactgcaggacagcaccacctggtgaacagtcgtagctcaaatacctgaggtttcccaggacaggctcataaaagggagagggccctggcagccaggaagggaatcgtctcccagctgctgcatgtccttcagccaagtctcctttcataaagcacacctcagcagaaaagggagactcctcatctgtcctaaccacaaccgacagacaagtataaaagaatacccatcacagcccacagcacgcccactctcacagcatgcccgctctcagaccctctgtccggaggacccacagatgcgtgtgcacccttaaaattaaatctaacaggtcatgtacacatagacatgcactttctctttggcctcttccccacctacagcaacccatttataaaacttctgtaagggcagcaggggaaaagtcctttctgagtttaaagctacaaaggcaccactataaattacagagtcgcagagatctcaaggaaggcagcttcctgagaggaggaagactgtccctccagcctgtttttgtggtgatgagatcacagagtttagattctgtatttggtcctacatgggttttaagggccttctttagtaattacagaaaggaaaaaggaaggtcaatgagaccagagaaactgagtggtgtttgagaggttacttataactacagcgagatcacctatcagacgcagaaaagaaactatgccttgagatttttgttgttgttcttcagaataaattttagattagcaaaaaaattatgaacttttactgttttggcattcctgtgttcaaaggcctttttcaatgcacaacccagcatttgggcccatgatagttttgaaaaaatgagcattacaccacaaaatattctcatgtaaaagatgacaaaatatacttattgtgggaatttttctgaaacctaaaacacaggaggttagagactagctgaatgagaatttcaaatgcccatcaatagctttttcttttcagatctaatttcccactgactccttcaaaaaaaaacttcatagagaattattacagtttacctcgtggtcatcactttcttgcaaggatgaacagacacacttcaaatttgtttatccaatagaagtattcatcaaaaaaattttttttctcccaagtacccttctaaagcctagcactgggcctcctcagaccacaagacaaaggctactgtatgtgttcatggaccaaagcatgtctccatcgattccatgtgacggtccaaatcctccagctgtaaagggttctgcagcattgaacactgctttgactacaatgtgaggcccagagaggctaaacaacgtgacaaagaccactcaggcaaagccagcgtcggtgagytcgtgaggacgttcaagtcacactcaaccacagcacagtggaaacaataccacagaaatcctaaagcaaataaaagaaagctcttctttcatgttgaatgctgctatttaatagaaagcaagcttacataacagaggaagatgggaggaggagaacttcatggggatctgtcctacatttggggcttgagtagcaaaaggcattaaaacataccaatttccatcccaaatctttcagcttccatttccatgagacaggtgtcctgctagtactgttacactatcaaccgccctgaggtggttttccatcccatggcccatgagaatctcctaggtagctttaaaaattctgaggcctagaaaaagtgaaacgggatctctgggaatagggcccactggcgcttttcaaacccgaccagttgattttaatgtgtagccaggaytgagagtcactacacctgaccaactcccagctgtttcttttgtcctcctgatggggtcaggtgggaaatatttatgcctcaaaaacaggggagagagggaaaagcaaatggaccagggaagagagctgaagaaagttggagtgaataacgatttgtaggtgatgatcgctggagtgggtgcaaggtgtggcccaagggagaaggcaggaggagggacagattaggccattcactaagtgagccctgcatggcatctgcattgagtccggctgctttggcaggtagaggcagggccaagaggcagcaattcaaagctcatctgtaaagaatatttccattaagtgttaactatatgagaagtgatatgatggttttcagatgtgaggaatttactgcaccactgtatttgccactatgatttcacctgttcttctaatagtcctgatagggtttttgtttttgtttttgttttttactgaggatccatattttcttgctcaccaagtttgacaaagcacaacgcattcaaggataactactaagagccacagtgcctgaagaacagagctttccttggtataaaaccagctggcgcacatgcaggttgaatgtgaccttgatttcatgagcatcatgatgttttcagatgtgacagaggctggataagaaagaacctggggtgaagcctgcgggaacaccggctccatctgaggtgctaaccctattgtcactcccatgtcccgtcattcttaggaatacctgcttgctacctgctcttctgtaatagagggacaaccaccaggctgttgagtctggatggcttccccaatttctgtctctcatgggaaggaaattcatctgctttgccttacccatcctttaccaatgtttcccaaagtgtatcccatctgtactagagcaacctgggctgctcctgggcacttcccctctcccgcagcccatgggcaatcacacctggagcccaagagactgcattttcatcagccacacaactcaacagtctgtgaaccggtcatacatttacgattcttcctttgaaatgagttcctcagttgtgctgctacatctgtccctaacctctgccacttcctaactggtgattcacaaattcatccatggccacttacttgaatcccacttggatcccaccctcccgacaccaagcccctgacttaaatcactcttctctgaactcacacaagatgcaaaaccactgcttttaatcgggagtttcaggtctgtttgttctctctcccaaccacagactaggcttcttgatggcaggctccatgacatcccactgaaccttttgcagggctcagtatatttaggctgtacaaacagtggctgacggaccggccaaggcttgctcagccctgggtcttcctccgttgagcttcttctcattttccctgagaaaactttcactctttccataacaaaattgattcaggcaagagtaggaggaaaaaagggggaggcctatcaaagacagaagtcatatgctgcaacctcaacttatccagaaaacaccaagaaccaagatgcaaataagtcttcaaagctgccaaaatctggggctcagttcatgcacaatgcagaagggaacctcctaacccccacaccaacccccaacacctcttcacaggctctccctcagagccctcccactgtctttcagattcaattctaacaggagagaatatgtggtttcccagactgttgtaagttaagagaatggagggacagtgttagatctgggcacaatgacagccctgagaagctgcgactgacaggagagaatctgtaaaattcgaaacagtagattacaggctgttatattttaacagcctttcaatccccaaatgcatgcaaggacgccaaaaaaaaagcattttaaagcagcacaattcttggctctgaaaggtgaccctgggcaccaagaaaaggttactttgctcacagtgtgtctctgccactatatccaggagagatatccacatggctaacctcagtccacaagatccaaatgtcctcaaaaataggaatggggactgtatccaactgcaatgtgctgtctctgtgtggtctctaacaccaacggaaaccaggacaggctttctcaaaagcactgccattctgatctggaatattccatctgagtactctcccattcattattctcatccatcttttcttayggtatctgtgagtaaagctcctcaccagattataaacttctttgagcagatggactatgcctttgtattaatgacacgccccctatctcctcctaagtcaccaatgaagccttctgaatctttgccagttcaatctgccccagataccccagggccatatgaccttagggaagaaggtatttgaatgagagtgtttttaaacagcctaagcgtttctgtagtctctaaaggtattaagttttcaactttcttaaagatgataaaattggtttaaatgttaggattctgtgatcaataaggcaagcttcagttgactttggaatctaatctgtatgacatacagagccaaggaataaattctgtactgttatgcatgcccatgtgaaccacagaggctagggtgagttttcccttgctctaaagcaacctcacctcacatatctttaatcattcatctactcagaatggattattgggtgacttcatatttatttcttttttccaaagctcagctttctgatttatatatttatttctcgataagtaatagcactcaaaagcaccaatttgcttcaggcttggtaaagagtactttcatgaatttaactgacagttctgtaatatagggttataatttacacttgggaaaaattgaggaatttgtkttgtctaaattgaatttaaaactacatccacttccagattcacataagtaattctcagttttcaagctcatgattgaatatgtaccttacaccctaagacccattcacttgcaagcaggctgaaatgacctaccaggacactaaaaacctctctatttaggtctaggctgtcaggacatccaggcctggcctgttgttttcagtgtccatggcccttccttccccacagctgaagcctcttaacccttgcccccacactcsccttgctggctcaacccagcgggaatttctaagatagagatttaaatagctctggctaagttgctcttgctgcttaacaggcaggccctgaccttgtatccagtaacttggctttcttgctcctgcattccacaggcctaaatcaccctytagctcagttctgataaggagcctgagaccctctctggataatctgctgctaactcctcaggggctgaggagctgccttgctcttggcaatcttccaggggactggaggtcactctgactccatatggccagagaaggtctggggacatgggtgcctgtgtcaggctactcatataccctgagccaccagccctgaagacctcagccccttcctcctgacacctggactccctcccagctgcagtggctggatctgctgcccccaactctgagatgggggttccaagcccagtgcctccggatgcattaggaaatgactcatcacaaaaagctgagggtcctctggccagaacacaagtcatgagatcttgatcttagctgtcaaaaaatgtcaaaaacaaaaccccaacaacaaactgagaaaacaggatctctcttttcctggagaattcaacacccctatgttggctttgagtatgctgaagccactgaatcctcttttactagttctaaggcgaaaactgaggaaaatcagagaaatggctacaactgtgtcttctctgaatagaggagaatcagagagcttcttatcaaccacttcaaagctaacatccatgattattgaaattacaactatgaaataacttctgtcctaggaaatcaagtcatcttctaaaagaaaaataaatgtgtatgtgcatttttatcaatatactttaaagatccagacaaaaaccctagctggttaaagtgtactacactttagaataacataaaaaacagcaaccttcattttctrgtcaaagattatttttgtaatacctagtaatttctacaaaattctagcattttttgctttctaccaccattccgtagaaagacattccccccttggctttatatctttgctttttgatcttgttaacaatccagaaaattccaaccttgcaattttttttttcaccccgggaaggaataacacacagtcacttaaaaaccaaaagcagtgtcaacacttctcaatgacacagctgctgtgagtgaccagtgaataaaagggtttttgtggggaaatgttgacttctctccaaaataattctcagtgttattgaagacatgatcaaaaatagtagaggctgggtacagtggctcacacctataatcccagcactttgggaggtcaaagcaggaggactgcttgagaacaggagttcaagaccagcctggacaagatggcaagaccccatatcgctatgttaaaaatacaggcatggtggcacatacgtgtagacctagctacttgggaagctgaggcaggaggatcacttgagactaggagttcaaaactagcctgggcaacacagacctcacctctacacaaaatttttaaaattaactgggtgtggtggcaagcacctatagtcttagctactcaggagactgacgtgggaggactgcttgagcccaggagtccaagattatagtgaactatgattgtgccactgcactccagcctggttgacagagcaagactgtctctaaaaaataattataaggcattagttaagcaagaaatactaagtacttatgataaaccacagtgaaaatactcaaactatatggacacttggtttcaaaagagggtgcctagacaggaaagaacccactctgtatgccatgcattacatggaacaatgcacatgttccatattacaaacctttacttaaaaagtgaggcatacgatccaacaatctcatttctgggtatttatccaaaagaactgaagtcaggatcccaaagagctattttcactcccatgttcattgcagcattattcacaataaccaaagtgtagaagcatcctaaatattcactaacagataaatggataaacaaaatgtgatatatacacataatggatcattccrccataaaaaaaggaaatcctgatacatgctaccacatgaatgaaacttgaagacatcacacaagagaaataaaacagtcacagraggataaacagcacacgattccactcttatgaggtatataaagtagtcaaactctgctaggcactgtggctcacacctgtaatcccaacactttgggagtctgacttgggaggaccacttgaggccatgagttcaagaccagcctgggcaacatagcaagatcctcatctctataaaaaaatctacaaattagctgtgtatagcagcacatgcctatagtctcagctgcttgagaggatcacttgagcacaggagtttgaacttacagtgagctacactcaagccactgcatctagactgggcaacagagtgagagaccctatctcaacaataataatcataattaattaattaataatcaaactcatagaagcagagcagaatggtgaatgccaggagcttggggagagaggaaaatggagaattgttgaaagaatataaagtttcagtcacagaggatgaaatacttctagaaatcagctgtataacattgtgtttataagttaacaacactgtacacttaaaattttgttaggagttagatctcatgtgttttgttttgtaaccacaattttttaaaatatgaggatacaaactcaaggattcagattacattagcttcaaagttcttgtcctttctactgtttcattttgtctacacacaagagaagtataaacagtaaagaataggcccgacatgatggctcacacctgtaatcccagcactttgggaggccaaggcgggcaaatcacttgaggtcagaagttcgagaccagcttggccaacatggtgaaaccccgtctctactaaaaacacaaaaattagccaagtgtggtggtgtgtgcctataatcccagctacttgggatgctaaggcaggagaatccctggaatctaggagatagaggttgcagtgaggtgagattgcaccattgcactccagcctaggcaacaagagtgagactccgtatcaagaaaaaaaaagcaattagcatatactatggtttgaatgtgtcccccaactttcatgtgttggcaacgtaatccccaaattcatatgtggagtggaggtgaggcctttgggaggaaataaggatgagatgaggtcatcgggatggggctcccatgatagtactggcggcttgaaaaaagaggagagacttgaactgacatgcacgctcttgccctctcgctgcgtgataccttctaccacgttatgaagcaggaagaagaccctcatttgaagctaagcagatgccagcaccatgctcctggacttcacagcctccagaactgtragaaataattttcccttttttataaattatgcagaaggtggcattcagttatagcaagagacggactaagactgaaaattggtaccaagaatggggtcattgctataacagatagctgaaaatgtggaagtggctttgaaactgggcaatgagtagaggctggaagggtttgagggagcaagctagaaaaagcctgtaattgctataagtggagcattaggggagattctgatgagggttcagaagacgagagctagggaaaagtctgaatcttcttcaagatttgcttaagtggtggtggccaaaatgttggtagaaatttgaacagtaaaggccattccgacaaggtctcagacggaaatgaggaacaaagtactggaaactagagtaaaggccatccttgtcacaaagtagcaacaagcttggctaaattgtgtccatgtcctaggtctttgtgaaatgcagagcttgagggcaataaactaaaatatctggcagaagaaatatttaagcagcaaagcattcaggatattgcatggttacttttgaccacattcagtgatatatgagagcaaagaaatgacttaaagacaaaatgtataattaaaaggaaaacagaatgggaagacttcaaaactctgcagcctggccacataaagagtgaaaaagacgcttccctcagcagcacatatactaaaactggactgatacagagaagattagcatggtccctgcacaaggataacacgcaaattcatgaagcattccatgtttaaaaaaaaaaaatgagtgaaaaagtgtgttcaggagaggaaaccaaggctgtggstaggtgatcatttgttaaggagattactattgatagatgaaattatcaagagaataggaaaaagacccctgccatttcagagatctttgaggctgtccctcccatccctggcccagagctctagaagggcggaatggtttcagaaggacccaggcacccttcatggggttgctgcccagggcccccttgggtctctgctttctgcatcccagtgcagcactcctcagccaccccagctgtggctcaagcgaccccaagtgcagctcaacccagcactccagaaggtacaagcagcaaggactagcagcatgtaccaggctcaggatactctgagccaccttaggactctatagagagtccctaccagcaagaaggccctcccagatgcagcctcaagacactggacttcatagtctccaaaactgtaagaaataaattttctttataaattgctgagtctcaggtattcagttatagcaatggaaaacagcacataattaaaggctagagtgcagggtaggagaaattgagaggaacaggaagccaaagaagctgaggtcatygaggaaagcctcaaaaaaaagggcaacataggcccaaccctgaaggatcagctgaggctgcagggactgctacaagcatctgagtaaggacactgagctggtccacgccaagaaggcatgctaggcaacagcttttaaaggctgaggaggacatgaactaaacactagaagctaaaaactgaagcaaggccagacacagtggctcacatctgtaatcccagcactttgggaagccaagacaggaggactgcttgaggccaggtgttcaagaccatgctgggcaacaacagcaacaccctatctctacaaaaaatttaaaaattagccaggaattgtgggtacccctgtagtcctagccattgggaagctgaggcaagatgatcgcttgagcccaggactggaggcttcagtgagctatgatcatgccactgcactccagcctgggcgatagagtgagaccctgtctctacaaaaaataaaaatagcaaaaaacactgaagcaaaatcaaaggaattggtcggagttccctaagccatttataatctagctctcagaatttgaatgttcactgaatccctgaaaaggccttcctatatgacaaacaagcaatcaagaaagttttaaggcacagccatccattggggccaacctgattagttaaatgwtcagaaataagaccagataaattgtataccatttcaaagaaataaataaaaatatggtattatagtaaagccccatgtatccaacatccctgaaaaacttactgtgctaaaaaaaaggaatcccttagatactgaaacctgtgttaacaggaaaaatctatgtatggactaggtattgacragtattagggaattatcctcattttgttttgtgttaatgtcatcggggatctttactgagtaacagatacatactatttacaaagggaattacatagtgtctgggatttgctttaaattgctggggataaaatataggtcaaaggttccaaggttgcagttacgcagaatgagtaagtctagagatctaatgtatgrtatgaaggctatagttaayaacattgtattgcttagtggtactttgttaagagagtaggttttaggtacacttaccacaagaaaagaaagaaaagaaaagaaaaggaaaaaaggaaggaaggagaaggaaggagaaaagaaagaaagaaagaaagaaagaaagaaagaaagaaagaaagaaagaaaagaaagaaaaagaaagaaagaaagaaaaagagaaagagaaagaaagaaaaagaaagmaagaaaggaagttaactatatgagataatgggaatgttaattttcttgaccatagttatcacttcactatgcatatgtgtatcaataagtacagtcataggtggcttaatgatggggatagaggatggaaggtgggggattcagcatcagcattgctgtgcgaatgtaacagagtgtacttacacaaatccacaagcctgggctatatgctagagcctattgctcctaggctacaaaccagaacagcatgttactgtcctgaatattgtaggcaaatgtagcacaatgggaagtatttgtgttatctaaacatatctaaacatagaaaaggcacagtaaaaatataatctaaatatgatctaaaagatttttttttttttttgagatgaagtcttgttctgtcacccaggctggagtgcagtggtgcaatcttggatcactacagcctctgcctcccggattcaagcgattctcctgcctcagcctcctgagtagctggggttacagacacatgccaccatgcccagctaatttttatatttttagtagagacggggtttcaccatattggccaggctggtgttgaactcctgatctcaagtgatccgcctgcctcagcctcccaaagtgctgggattataggcatgagccactgcgcccatgcctataggattttttaaacagtgcggcatagagtacctaccacaaatggagtttgcaggactgcaagttgctctgggtgggtcagtgagtgactgtaaaggcctgggacattaccgtacaatactgtagactttatgaacactgtacacttaggctacactaaatttattttaaaaataaggtaactgcactataacattataatggctaccatgtcactaggcaatagggattttccagttcctattataatcttacgggactgccattgcatacacatgccatgttgtggcacatgactatatacaaaaacatcatgttgtagaccttaaatatatacaataaaaaataaataaactgctccaaccacaaaaaagcaatgtagggttactgaaacacgactgacaaagtgttaatatttgtgaagctggttggtagatacatgatggtttgttatatgcctcattacttgtatatttttgacaattttttttttttttttgagatggagtcttactctgtcacccaggctggagtgcagtggcacgatcttggctcattgcaacttccacctcctgggttcaagtgattctcctgcctcagcctctcgagtagctgggactacaggcatgtgccataatacccagttaattttttgtatttttagtagagatggagtttcaccatgttggtcaggctggtctcaaactcctgacctcaggtgatccacccacctcggcctcacaaagtgctgggattacaggcgtgagccactgcacttggccttatttttgacaatttctataatgacttttkaaagccatgggtggccaggggccatggcacatgcctgtaattccagcactttgggaagccgaggtgggaggattgcttgagctcaggagtttgagaacagcctgggcagaatggcgagatcctgtctcttccaaaaatacaaaaaagtacccaggcgtggttgtatgtgcctgtggtcccagctactcaggaagctgatgggaagatcacttgagctgggagggtggaggttgcagtgagccaagatcgtaccactgcactccagcctgggtgacagagcgagactctgcctcaaaaaaaaagaaaaaaaaaggccatgggttacccatttggtataaacttttctctaaaaatttgtcagattctgtccactttacatacacagatctctctctttctagaatgagagagaattctacctagaatgtccttttattccacctggacaactcctagtcactccccaagaccacacacaaaaaaagcaatgtagggttactgaaataagactgacaaagtgttgatatttgtgacttcctttcacttggaagcagaagtctcaattttccctatgctcccactatatgccactcatcccattatgtaatccttagtatactatcttatatttatatatgaaaccatgtgccctcttaggctgtgaacaaggaagggacctaatttgtttatcatcacacacccagcacctggtatagtatgctcctgatgaatatttgggtcatgaacaagacctagcccaaagtcatcaaaaacccagttgttgtcctgccaagagatcttaggaaggtctgtcgarctacaaagcctgtgtgcttcccaagctgatgaccttacccagtcaggaatgccagcttctccaggccacctccacttctattttttatgttatttttcaaaaacagggtcttgctctattgcccaggctggagtgcagtggtgtgatctcagctcactgcaaccttcacctcctgggttcaagcgattctcctgcctcagcctcccgaggacaacaggcatgcgccaccatgcccagctaatttttgtatttttagtagagatggggtttcaccatgttagccaggctggtctcaaactcctgacctgaagcaatcgcccacctcagcttcccaaagtgctgggattacaggcgtgaaccaccgtgccttgccccacctccacttctaatttccagcttgtcatttcttatgaatagaacccyggaacaaacatcctgaattcaagtggtctccagatcaaaaacaagaggtcctgggcacacacttaggaaaaaggtgcatacacgctggtgtgtaccccatacatgtattacatattctgaactgctcagagggcttccttgcttaactcccaagttgcaactgtgaatgggataacaagagtgatagttgagaaagagtggcattctggccactcctctgataagtagtgtcacctccagagtgacattactccatcagccttcaacagcgtgcaatgataaaaacatgaataccaccaaaggttgttgggaacgagtaaagttacgtataccaggatttcaaagcaacttctaagtagcagagctctttttttccacagttctgaaacactgaaaaagacattgatctctccattaatttatcttgaaaatttttcagctgtcttaatttaagacaggctttaaggtttttaattttttaaatgggactttacatgtccctgagatttctccattcttcctcaaacttggccttacgacctatatagcagactctagtccttaattacatgccagtctatactatttatacttctcttgcatgtggacagtatagtaaagcagaaaagactgaaagtttgagaaaaaaatttaaccaaagttcagcaattcatttaattttaatttcagttgtattctgttaaatttaaattgttactattttatttttaaatgtctacagcaaatttctgaatgcaaaattactttttctttctttctttctttctttcttttttaaagagatagggtctcgttacattgcccaggctggagtgcaatggctattcacagacatgatcctaactcactaccacctcaaatccctgggctcaagctctactgctactcctgcctcagcctcctgagtagctaggactrcaggtgcatgccaccttgcccagctacttccctatttttaataagttctaccagaagcttagattactttggttatctttttaaaagaaaagcctaaatgattttcagttgaatgagagaaggatacaaaccctgccctcctcactagaaactgatcttaaaaccactgatgtctacctaccaaattaagaggacaaaagtcaaggagatgaatgtgatgattactatatcattatgtgtaaactacccattaaaaaaaaagtttaaaattctccttacattctcatttactgtattatctataagatgatcagatcatttggtttagggttctgttctaatgaagtacggtcttttcttggccacaggtaactgttaactccaggcatctcacagaggcaaaaagacaatccaaatccacaccagtactagcaaaccacttcgaataccctggtaatgactggtagctcagaagatgtatatgagtgacacattatattacactttaaccctacctttccacagatgatggaaagataaaagtagaagcaccacggtatctaaaaagacacaactggacccgaggccaggaaaaaaaaaaaaagagactgactgccccacaccacaggtgtgtccaagaagattgtctatataactcaacagatgtgtgtgtccagagggttctggctgtaccacacaacggatgtatgaccttggactcttaaattttcttaaagtctcttaaattcattgcccctgagcagcttcataggcaaagccagtacattgtattagatatgttcaagcctttctgaatctaaattcagttcaaattcacaaattcttagttgacttcacactaaaaaaataaggcatgtaaaactcttcacacagtggctaccatgcagtaagtatgtcataaatgctgcggctgttattgaaaaaaaagaagtttaggtttgtatgtgttacacacagcatatatttaaatttctttggtgggactttttctgaaggaaaaaaaaaatcactttaaagtcctattctaaggccaggtgcagtggctcacacctataatcatacctgtaatcccagcacttcgggaggccaaggcaggtggattacttgaggccaggagttcaagaccagcctggccaacaaggcgaaaccctgtctctacgaaaaatacaaaaattggctgggtgtggtggcatgtgcctgtaatcccacctactcaggaggctgaggcaggagacttgaacccgggaggcagaggttgcagtgagctgagatcgtgccactgcactccagcctagccgatagaacgagactccatctcaaaaataaaaataaaaaataaagtcctattctagtcagaattgttaattcaaaggagtccgtaatgaaacaataaattacgaagttctacatgaaaagatacaatcctctcaaaatcgactagttttattttgtgttaaattagattttctgtgaactcttggcagcgcttggaaagaagtcatgagtgctttcaagacttttgctcagcatgcatttactgaccattgctatatgaaagctgcagctgcacccctgaaatcccaacacttcgggaggctgaagccaggagtttgggaccagcctggccaacatgtcgaaaccccgtctctatcaaaaaatacaaaactcagccagacatggtggcacgcacctgtagtcccagctactttgtgagcagagatcatgccactgcactccagactgggtgacagagcaagactctgcctcaaaaaaaaaaaaaaaaaaaaaaaaaaaaaacagaaagaaagcaagctgcagttagggaagcaaagatcatcaagaccctgcctccaggtccaaacaagtggacaactgcccagaagtaccaactgctgaggggtctggataagaaaaagattgtcctgaaacctccagagcaaaggtctgaaggtagtgggccacagatattgtgtggcccatatgctttgtttttgtctttaactgaattaggttgccaacacttagaaagcaggaggttacacataaataaggatttctagtttctcttgaaaatttgcaagtgccagcagtatcatgcctgtaktcccactcagcaactaccggtgcagaatctctattcccatcactcctaacacgggctgaagatcgctggctgcttccttcagctcactgcgtggctgctgggcttcagtttccctcccccagcccagtgcaccttgcacctaaggtgctcgaaggagcttgggctctggagcagactgctgacctgcaatcccggctctgctgcacaccagccatgcctgtatcttaagcaaggaattcatctctctgggcctcagtttcccatctgcaaaactagggtattattaatggtatctacctcacagagctagcatgagtgtcaatgtgttattatctgcaaagtgctcagagctgtgcctgatacacatataggaaataaatgctctataaatattagatgttactaccttcatgcccgagaaggcataataagagtttcaaatttctgtccttgagttttattctttcttttattttttgtcctcaagttttaatattctgaagtcatctactaaattactttatgatcaaaaacaaaatggcacatagtagaagctatacagatacaacttaagaattactagagccatcagacacaaagggacgaatatgagattctactgtacgcaatacctaggatacacaaattcataaagacaaagtagaatagaggttagaggggctgagggaaggagaaatggaaagttattgtttaatgggtacagaatttctctttggggtgataaaaaagttctggagatggatggtggtaatggctacacaacaatgtgaatgtacttaatgccactgaaccgtacacttacattttggactaaaatgtaaattctatgttacatatattttactacagttttttaaaaaaagaattactgtagcctgcataattttgtctgctactgtttgctagaattatactgttaataatcccaaagacccccaatgcactataagttcatgttctcaaaggccacatatggcacatcccataatggttgggaagcgcagtattaactattttaacagctgtgcagcagaacagtgggcttccttttcgatctggaagccttgtgggaatgcatctgtagcaaatacagtatgaggccagagggataggcttttaatacctgtctmgagcagttgggctgtgcttccttcataataaaatgctccaaacagactcctcattctctcttttctctcaaccagtattaaaaatggaagccttcctgccaagcactatgtaactggctgcctttgaactgcgggatgctgcacaacactgacgaggtttgattcacgcctgttctataacagtattcaaaacgcacacatacactaagagttccaccaggctataaatcaacacacataggagaacatcccaatcagggtactatttttacatttctacatgctgccactttctaaggcatctttctttcttttttatttattttactttaagttctgggatacatgtgcagaatatgcaggtttgttacataggtatacatgggccatggtggtttgctgcacctattaacccgtcatctaggtttgaagtcccgcgtgcattaggtatttgtcctaatgctctccttcccctttctttcatatatatatatatatattttgttgttgttgttacccagactgctcatctgcaaggcatctctctttcattaaaaaaatatgtgaaatataagcaaatttaaagttactttgaaaactgcaattaacctgagacacacacacaaaacaggtatatccagtctgcattcacagtcttccaaactcaggaccactgcaaatacttatttcctaacatttacagggccatcccctgtgagtttacaatcttgagtcaggcagaagacacctagctctaaggagaaactccactgcatttgggaatttcttaaataaactgatgyctttttggcacaaatgctgtttggcataaaaggttccttaaaatactattggtaattcaaagtgagagaatataatatcttttatcttataaatattacattctgagtaccaacccaaactcaagaactacctggcagcttgatttccaccgttgcctaacagttaaggtcccaactccccaggtggctgtatgtcccatataataaaccctcaaacactgatcattttcccctgttagggcgccaaagaagtgttccaaaaagactaaaagggaaaagatcataggcaaggtatgcagtttatgcctctttaaaaacaatgtgtacatcaaatagcaattacttwactcctaggatcaaacagggcggagataaatttttttaaaatcactgaaaaacagcctcaagcaaaactgtcaccatctaagaaaaatatttcaatccataaaccagcaatggaaggaaatataagaagaggagtagatatttctttgactagaaaatttggcctagctaggctgggtgcagtggctcacacctgtaatcccagcactttgggaggccaaggcgggcagatcacaaggtcaggagatcgagaccatcctggctaacacagtgaaaccctgtctctactaaaaatacaaaaaattagccaggcgtggtggggggcacctgtagtcccagstacttgggaggctgaggcaggaaaatggcatgaacccgggaggcagagcatgcagtgagccaagatcacaccactgcactccaccctgggtgacagagcgagactccatctcaaaaaaaaaaamaaaaaattttgaccaagctgcatataaactaaaaaaaaatacttattaaacagggcagaggaaggtactgaattaggagacagaaagagactgtgaccccagatctttgctgttagggttgaattgtgtgtccccaaaattcatgtcaaagtctaatatggtttggctctgtgtccccacccaaatctcaccttgaattgtactcccataattcccacgtgttgtgggagagactcagtgggagataattgaatcatgggggtcgttcccccatactgttcttgtggtagtgaataagtctcatgagatctgattgttttattaggggtttctgcttttgcatcttcctcattttctctttgcctgctgcaatccatataagatgggacttgttccttcttaccttccgccatgattgtgagagttcctcagtcacatggaaaagtccaattaaatctctttcttttgtaaactgctcagtcttgggtatgtctttatcagcagtgtgaaaatggactaattcagtaaattggtaccaggagtggggtgctactgaaaaggtacccaaaaatgtggaagcggctttggaactgggtaacatacagaggctggaacagtttgaagggctcagaagaagacagaaraatgtgggaaagtttggaactccctagagacttgttgaatggctttgaccaaaatacactgataatgatatggacaatgaaatccaggctggcatggactcagaaggagatgaagaactcatcaggaactggagcaaaggtgactcctgttatgttttagcaaagagactggcagcattttgcccctgccctagagatctgtggaactctgaacttgaaagagatgatttagggtatctgacagaaaaaatttctaagcagcaaagcattcaaaaggttacctgggtgctattaaaggcatccagttttataagggaagcagagcatctaagttcagaaaatttgcarcctgacaatgcaatagaaaagaaaattctattttctgaggagaaatccaagccagctgtagaaatttgcgtaagtaatgaagagccaatgttaatccccaagacaatggggaaaatgtctccagtgcatatcagaggtcttcatggcagcccctcccatcacaggcccagaggcctaggaggaaaaagtggttttgtaggttgagccaagggttttcatgctgtgggcagcctagggagttgttgccctgtgtccaagccactccagccatgaatgaaaggggccaacgtagagcttggactgtggcctcagagggtataagccccaagccttggcagcttccacatggtgttaagcctgccagtgcacagaagtcaagaactgaggtttgagaatctctgcctagatttcagaagatgcacgggaatgcctggatgccctggcagaagtttgctgtaggggtagacccctcayggagaacctctgctacagcagtgtggaaaggaaatgtggggtcagagcccccacacaaagtccctaagggggcaccacctagtagagctgtgagaagagggccatcatcctccagaccccagaattgtagatccactaacagcttgcactgtgcgcgtggaaaatccacagacactcatgccagcctgtgaatgcagccaggaaggaggctgtaccctgcaaagccataggggtggagctgcccaagaccacagaaacccaactcttgcatcagtatgacctggatgtgagacatggagacaaaggagatcagtttggagctttaagatttggatttcagtcttgcatgggccctgtagcctcttggttttggccaatttctcccatttggaatggttgtatttacccaatgtcagtaccccctttgtatctaagaaataactagcttgcttttgattttataggctcataggtggaagggacttgccttgtctcagataagactttggactatggacttctgagttaatgctgaaatgagttaagactgtgggggactattgggaaggcaatgattggtttgaaatgtgaggacatgagctttggaggggctggtggtggaatgatatggtttggctctgtgtccccacccaaatctcatcttgaattgtactcccataattcccacatgttgtgggagggacccagtgggagataactgaatcatgggggcagtttcccccatactgttctcatggtactgagtaagtctcacagaatcttatcattttattaggggtttccacttttgtgtcttcctcattctctgccattcacataagacgtgacttgcttctccttgccttctgccatgattgtgaggcttccccagccatgtggaactgtaagcccaattaaacctctttcttttgtaaattgcccagtctcaggtatgtctttatcagcagtgtgaaaatggactaatacaaagttttaacacccaatacctcagaatgtgaccttatttagagatagattctttatacagaggtaatcaagttaaaatgaagtcattagggtgggccctaatccaatttaactggtgtctttttaaaaaggagaaatttggacataggcacagacagaagatggcatgaagagatacagggagaagatggccctctacaagtcaaggagcgaggcccaggacagatccctcccggagcctaggaaagaaccagctctgccaacagcttgatctgggacttccagcctctgtataactctgagacaatacatttctgttattcaagccatctactttctggtacctggttatagccaccctagcaactaatacagctgcttaccaattatgtgacctcagacaacacaacccagtcctcgggtgcctctcctatcaggaggacacaagacaatattctgcaaatctcctgcaaatctacaactggggatatagaccgtcggtactgtgtcaggcacattggggttacgrgagaaatctaaaactctgtctaccctctcctgcaaagatcttaccccctagccagcatggggaactcataatgcattgtgaaattatcacactgctataaatcaggtataagcatgtataatacaaaaatatcaaactctgtgcttatcagtcaacaataacaacaaatgcatagccaatttttaagataggactcgttcccaggacagatggcaggcctattataaatactctcatgttctgtgaagtttgagtacatcaggatgtgtgatcctctgtgtctcaccctctcgagacacaatttgactgcaggaatatgacgtaactgtcctggttagtgcaccaaacataatacaatatgccttcaatatgtcagcctgtttcatcctccctaaatacataattgattttcaacattttatgctccaattattgcccaaaagcagattggggcaagttcatatttcaaatgctccttgcttaaaagtacaaaaagaatgaccagaacaattaatgaattgtcttcaatttttcttggaagagagtcatttgtttatgaccttctccaatttctccatcacacacatacatccccctaatatatcaaaaagaatacagaatttatataccctggctaaaaaatagagctacataaataccatgcaaaactaccaacaagaagagaagaatttttctttatttggaacaccgaaagagtagcctcctacatccccccacagaaacagaattaggaacaatgtcaaacaaaaattaaaagctcaaaattcccttttttaaaaaaagtagagctttatatttaggtcattttatttttaaccacagcctcctaaatgacctgaatatcccaacatccactctaagtgacaagttttgtaattcctctgaataatttagttgggcaaatttgttttactccttgttaaataaaaatgttacttcagaaattgacaagtcagttgcccacagaaattttcagtctcagtatcttccattcctattaggaaaaaactgtgtgagggaaagcacaactttaaaactgggtctcttgtgtggcagagacttcaaccgccacaatagagaggggcagtttctgtttacatgaagtcttccatctatccaccatctcaaaaaaaaaaaaatagagtgccaaggtattttaaggttccagaggcacgtgtttgaatttgggttctgaaagacattgctatcggcacaatcatgtacagggactttcttagagcacggagtgaataatacatgccagaatattttactttgacttctactaaaatagaaacagcagcagcactggcctcagcaacaaggttagggttttttgttgttgtttgtttttaatccaatttcacttttagaaaagctggtatctcaagtaaaagaaaataatttattctgaatgatgctggctttaggaaacacagagcatttatgattggggtccaggggtgggatgggtctgcctggttcctgtttccttctatgaggacagcacccctctagcttaccatctgggctcctcttctggcctgtcactagcccccttcctagaagctctagtgactttcctaacccaggaagtttaggaatagagactggggatgggtcccagcccttccctcctccttcttcttggggactgagctgctctctggaagcacaggtttaagtctggtcagccttctggccccacatgggaagccttgatggcccaacactgccaggaagcaggagggcaggctgtctctactgtggaattcgggagtgggatgtacacttttggcacatataaaaatcatttttttaaaaatgtaagtcaaagtctctgatattagttctatcatcttaaaaaggtgcaatttgaccaggcatggtggtgtgcacctgtggtcccaattactcaggaggctaaggagggaagatggcttgaggccaggaccttgaggatgcagtgagctatgatcctgctactgtactccagcttgggcaacagagtgagaccttgtcttggcaaaaaaaaaaaaaaaaaaaaaaatttaaggtgtaatttgaattccacatgttttctttctccttgtctctcagaactggttcagaattcagacagggaaaactgacctaccatttattgcctgcccccatcagatccaaagaatccaaacactgagtgtttcctctttgaggagtagatttgagatcttactatctttaaaaaaggtttttttttgttgttgttgttkttttacttccaagtaatctgtgagaaaacagaaagaaagagaaaaaccagaacaattctaatacccaaaacaatgacttttttcatttcatgtaaaccttacaatgactcactgatatcattattacagccattggtcaatgtattccacctcaagcactaactagtagtacttaaatgaacttgtccctgttactcactctcatctgtaaaatggggatggtgatatcctaaactcataggtgtgatttatagagtgaatgaataatgcaggattaaagcaactattgtatgtaaagccccagaacactcatggggatagtattaaataacatcaccttccatcctcagctcttcacaacggactcattcaaccccagcttgggcgacaaagcaagaccctgtctcaaaacaaaaaccaaaagaaagaaaaaaaccaaaatggacagattcaaaagcagaatggtctttaggagattattccaataaacctttccttcatttttagataagaaattaagatccagtgtgaatgagtgatctgtctaaggtcattcagagaaaaaattttaaaggctttcattaaaaaaaaaaaaaaaagcctttcattcatttctataagcacatagttctgaatgtagtctcctgtccacatccttgaaataggatttggcagattagaatctgtaaactagagccacgtgtcagtattaaatctttctttactgtacaaacaatgtgaggcagaccccagggtttgccagcatgcctgccacagccaggccctcccccgacgcacccacggcctccacttcaagagtgaggagggcaagtttgcattctcctaatgagtaatgcatctagaatcagcacaacttttccctgattcactcttttagtgaggctacttttctcaaggactcctagcaaccccagattcttattttatcagtttcttattttattcctgtcacttctaagtatttgccaactatcattttctcagttttcccccatctaagccacaaatgcaactaattagttatgaaagtgactaagtcttttttatgtaaaattaaggataagaatcttactactaatgttctctgaatgatagcataactatcatttaagaaaactccagggctgaatactgccagactagctccctacatagctcatctttcaaggaagttactgaggaatgaaaggcacgcaccagtggtccatatttgctatttcctctggttctttaatatctgcccacctatttccagatcttttctctcttgttgtgaaatctttctgctggaaatactccaataacacttaaatattttaattgttaattcacagaatgccatcattgctgaaatgttgtcaatttctaccttctttccagtactaggtacacagatttttttttttaatttgtaaattattgctaactttttgagagggtacagtgggatatgttgatacatgtatacaatgtatagtgatcaaatcaggataattaacatgtaacacctcaaacatttatcatttctttgtgttggggacattcaaaatccactcttctagctatctgaaaatatacaatgaattccagttaattatcatcacctgagattgctataggacactaggacttattccccctatctagctgtgattttgtatctgttaaccaacctctagctagctccatccctcctccaaaacttcccagcctctagtaaccactattctactctctacttccatgagatcaacatttttagttttcacatatgagtgagaccatgcggtatttatctttctgtgcctggcttatttcacttgacatagtgtcctccaacctcatccatgttacctcaaatgatagaatgtcttttttatggctaaatagtattccattgtatattacattctattcatctgctgatggacacttaagttgattccatatcttgactactgcgaacagggctgcaataaacatgggaatgcagatatgtcttcaacatactgatttcctctccttgggatatatactcagtagtggggttggtagaccatatggtagctgtgtttttagcttttttgaggcaccttcacctgttttcaattatttttatttttttatgggctcacatctaattaacgtacatagttttaaacactctcaagtgaaaataaagctttgggcaatctataatttattttccaacctgctcttagttattcaagaaaggatagttttaattctaaatgtctgaaattgctgccttcttcagtagttaagcccagtccccaagatcaataggaaactaagaatgatcagcttaccccaaccatcatcccaaataaatttaaattcatatttattaccatttgttggtctaggtggttactgatgttgcaaggccaatgaattctgccctgggagtcctactacaggactctccccagttgagcagagggtagtttaatagatcaaccgaatactttgtctctaagatgtattcaattaaagaatttatcgctgaattttgtactaagacatactaaaaccaaaagccagaacatcatattaaacatgaaattatttgatatatgcagtaaaagagaattgaaagcattatttccaaatcaatcataccacatacattcagacaactatgagtctagcatatcaagaaaaaatcctctcatggtctcgcactttgctttacatttgtttttccagtaagattcgacgttttgggtatgcamaccaaaagccaacacgaagtgaacgttgaatcattatggttaacctgagcatgctggaaaccaaggaaaggctgaatgttattttatgcagcccatgaatagcagcaaacctatgcctgcaaagtaggcagcaaagtttgggcagaactgtcaccaacaatttccaaataatcaacagcttgttgatggcttacaccaaaagcccatatttccctcaatagggcacagctgtgatacttgattttatggctacaggactcatcaatttgcaagtaatgacctggactaccaagctgtatcagatgcagttcaaagtaatgcttgcatagtttgcaacagcaattgtataacagatattaatcacagcataagctgaaattccagtaacaatagttgctactttctcttgaaataaaaattttctcaaaaataaaaccactcaaaaaatttgattttgatccacaggggcaaatttttcaattgatccagtttaacttgataatctctcttcaagtgatattttaggtccagaaacacgtaaaggattgacaatcttagaaaatgttaatttgtgaagaaactaagattaatgtaccagcaaatattccacaataagggtgagcgccccactttaggctctgcacctgccctgtcacagttttcggccacctccaccctggtctgtttgggggcccttgagccaagtcacctcctcactactcagctatctatcccacagctcttgtccatattaagtccagggatttcatctcctctccacttcttcacttctgaaagattaacctggcctccttaccattccgttcaggaatacagttacgcatcacttatcaacgaggatacgttctgagaaatgtgtcaggagattttgccgtatgaacatcacagagtgtacttacacaaatctagatgggacagcctactatatacctaggctctgtggtagagactattgctcctaggatacaaaaccatacagcatgctactgtagtgaatactgtaggcaactgtaaaacaatagtaagtacttatacatctaaacatagaaaggggacagtaaaaacacagcatatggccaggtgcggtggctcatgcctgcaatcccagcactttgggaggccaaggagggcggatcacctgaggtcaggagttcaagaccagcctgaccaacatggaaaaaccctgtctctattaaagatacaaaattagttggttgtggtggcgcaagcctgtaatcccagctactagggaggctgaggcagaagaatcgcttgaaccagggaggcggtggttgcggtgagccaagatcgcaccattgcaatgtagcctgggcaacaagagcaaaactctgtctcaaaaaaaaaaaaaaaaaaaaaaaaacagtattaaagataaaaaacagtacacctgtatagggcagctccaatataaacttatgggaccaccattgtatatgtggtctgtcattcacctaaaccttatatggtgcatgactgttgttgaaatacctttcaaatttaaaagcaattttgcatacctgtgtaaraactatatttttcccctattccagagtgcacagcattattattgtcagttatgaggaaatgatttagaaattctaatgggacactttaatccttaggagtttgtgatacctcaccaatatttttagacagatggccagggatagcttttcggtttactctccaaacatcctatattcaatctgtctaacaatataactttctgtcaatatctcatctacatataactccaaagaaataataaactctccttcaaaaaatgctgtgggtctcctcttctagattaccctttctaaaccagatgtcttaaaagagagtaaaagatgatctctaggggtatagaaagaaaatactgaaatttgtagtcgtgtttacttgtctcattatttgtttttctatattttataatggaaatagctttagtaaacaatgtgtaattataaatttacaaatgttgcaggtatgagcaaaaagtattttacttaaaggattgtaaagtgaaaaatgtttaaagactactgtaccaaacaataacactttctcctaatatacttttcttggtcctgtgtggataattcctactaaaagtttgtattctagttgtttggtttataaaatattttgtattaatgtagtgttcagattgtaatgtgacattcttttttttttttttttttttgagactaagtctcactctgtcacccaggctggagwgcagcagcaccatcttggctcactgcaacctccgcctcccagtttcaagcgatcttctgcctcagcctccggagtagctgggactacaggtgtgcaccaccactcctggctaatttttgtattttcagtagagacgggggttttaccatgttagccagggccagtctcgaactcctggactcaagcaatccatgggcctcggcctcccaaggtgttgggattacaggtgtaagtcactgcgcccggccataacattctaattactaaaaatcagacctcatttggccttcctgttgtatcttgaattacattttcttattcaggtctagtcttaaagacatctccatagtttaaaaaaaaattttttggcctttacttaaaaattaaaaccaagtaagccatcaaatatcctaaaaaataaatgacattcaaggacaattttctttttttttctttttcaattttgtttttgtagtggtctcagaatagaccaggcaaattttcaaacatgtatagcacttacatggttctaagtgctgtacactgttctaagttctttctcatttaatcctcataacaaaattataaaattatatcataaaattatatttatttttaataaaatgaattataaaaactagcattaatagatacagaaattttacttttttttgagacaaggtcttactctttcacccaggttggagtgcagtggtgtgatctcagctcactgcaatctccgcctcctgggctcaggtgatcctcccacctcagcctcagtagcttgcactataggcgcaagccaccatgtccagctaatttttgtattttttgtagagatggggtttcgccatgttgcccaggctggtctcaaactccagaggtcaagcaatccacctgcctcagcctcccaaagtgcggggattataggcataagccaccacacctggcctttagttttattcaagcctcctctaaaaccatggtcaatattgttgggaacaggcccccaaatctgaccataaactggccccaaaactgaccataaacaaaatctctgcagcactgtaacgtgtgtgatggccatgacacccatgctgaaggttgtgggtttatcggaatgagggcaaggaacaactggcccacccarggcagaaaaccacttaaagctgttcctgaaccacaaacaatagcatgagtgatctgcgccttaaggacatgttcctgctgcagataactagccagacccatccctttgtttcggcccatcgctttatttctcgtaagaaatgcatttagttaatctataatctatagaaacaatgcttatgactggcttgctgtcaataaatatgtgggtaaatcactgttcagggctctcagctctgaaggctgtgagacccctgatttcccactccacaccctatatttgtgygtgtgtctgtctgtctgtctttaattcctctagcacccctgggttagggtctccacaactgagctggtctcggcaaatattggttttttttgtttgtttgtttgttttgtaaagttttttttatttctactggggagggaggaggataaatagaactgttttccaatttgctctccactatatacacacatacccacacacatacataaacatacatacaccaaaaataccccaaacaaaaaacaaaaaaaccaggaattaaaaaccaaaacaccctcaaactgcaccaatacttcatattttgaccaaaaaaaaatcctgggaggaagtgcaaaatgcaaaatcaaatgactgaaaaatgctgaacaaacagcattattaatatagaaaatatttatattactgaactagtaacaggtgatgttctctgtgtctgtaaaactttggaaccacatagctgatttgttcaatctagtccatgccagcttccaaaaaccaaacttttagttagcttcattctttgatgcctcatcaaaattttctacaagatctggaacatcatcatcttcctcatcaatgtcttctggttttggtgctttactgtccaagacttgccgtgggaactgttcagctaacttcctaaggcttgttaaactgtcagcaccaagctgacttaatattccaggaagcatttctgtgattggtttggcttctgcatgaccagtaattgcaaaggtattagcagaaagggaagcttggactttgggattgttgaaatgaataactgtcccatcatctttaatcatgttcacctcttcaataccagctatattattcacagccagttttttttagagaactctgaagctttttgtcatcagctgtggctgttctatgtaccaccttcttctttctgcgagctgtatccttgccccctatctggacctgagcctgaagtttggctaacttttcttgattcatgctgttggtaaatctgaagcagggagggtcctccaacaccagcacgcggcaagagcaagatggctgcctcagccgagacagagaaagacgacgactgcggcagcggcagctggagcagatccaacgtgatacagctgaccccgcctctccctctccgaggcagcctatcccgggagcgcacatctgaactccaacccaaatattgttaatgaagagcttctgaagggaaaacattattttctgtgacttccactttatgcctctaccagttgttaaggaatccaacccattaactgtgtagcctcgggcaggcaatttaacctctctgtgctttagaatcctaatctgcatgaagttcctttattagagtgcctagtaaaagccaggcactgtttctggctgagggatatggcagtgaataaaagacacaatcctgttcctaagcatcctgttaggtaattccaagaaagcacagaaggtaactagtcataaggttagccattactatttcccaaaacaaagggctacttcgctacytctcttaacattaccttagtcctgttttgattttaaggcaaattctacctagctcctgtttcttagctggtgaaaaggggcagaaaaggggacagtaaaacaatcaatctgaatttggcaccagtgagcacatatacccgctacctttccttgaaataaactatgaaaagctccacagatccagtcagctacaggggttaaaaacctatcacagccaggaacaaagttctgcaaacgacttttgatggatagcatcccgcagcactctggatcctcctagcactttccagcgatgctgatgaaggtctatttacacctggaggttacagctgacatactgctgcatgtctgatagctgcaagattcagctgcagtgcaacttaatccctcatgatgtcacttccaggctgcccttataggacctgccatgagacatctttttatttattcaaaattattatataatcacagaaccacgctctccatggtcacctctattacacagaaagcactgctcaggcagcctgcttttagcacagattgtagaaccaccagcaagacagtaaaagaatcctgctgaatctaaagtaaacacatgaaggtaacagaaactctcgagagggcatttccctcctcagcagctcacaaacgcctcactaaacccaaatatctgagacaaacycacatctgcacccagaggatcacaaataccactggccacgccttagaagttacaggttacaacctcaaaatctctgtgaaggagtcagataaaatttatttcctcatgtatgcatttcataccattctgctaaaaacaaagaaaatctgtggcaaaatatttgcagtttgctgatcatctacaaagccaggtaattggtcatgatttaccctcacccttggcatttggtctgtcagcattagaaagatattcagtcctcctcactgccaccccctccctacgttcatgcacctaaattcacgatcagcttgctgacttcaggctcaatgggcagcctgggtcccctcgggcaggccagcaggaagaaagggcattcaggaggaagatgagaagaggcacccaggctgaactcatgtccacactgtccataccgccagcccctccggccgcaggtcccagtctgggaagaatcctctgctgacaagactttctttggatcacactggcacaccccacgctgggctctcccacttctccataacctccagcccctttctgagaacaagttggtgtcacttggactttttgccagttccatgacagcacatgcccagtctggacactggaggatggtcctgtccatccgacttctcattcctttggtctagctgctcctctatccccaaccctcctcttttcacccagcatttccctatcccaggtcctccctccatcaacaaccccctctcccttcccccacagcctctggaaccttctgtccactgttcaattccctaacaattacaagcaagggctttggagtgtgaggatctggttgagcccagcccctaccatttctggatgtatgaccttgggcaagttgcctaatctggttaaacctgagattcctcatctgtacagcagagtttacctcatctctgaaagtgaggattaaatgaaaatacacataaagcacttaacaaaatccccagcacacattcaaatatttaataagtgacaatgaaccaggaaagggtttcataaatggtagtgattattactccctccctccaccacgtttttatttttcattgtgataaaatagacataaaatttaccgttttaaccatttttaagtatatagttcagtagcactaagcacgtccttctgcaaccatcagcaccatccacctatacaagttttttgtcttccccaactgaaactctgtactcattaaacactaactcccctatctctgcttttgacagggcttctctcccctggaggcgctggctcaccagtggctctgggcaggtggaaagactggacgttctacaggccatctctcttctaacctcatgtaaagattcatccctctttgagtcactactcacagtcataccacactctaccccaatcctcagccatcacctacctgtttttgataacttcacatgcaccaggaaaagggggcagggggccttagttcacaattttctcttccactctttctcctgagagacgttcctgcccagcagtcagctcctaaaggaacaagagcagaggagacaacctgggttagaagctccgctccaccatttattaactccatgaccctgagcaattacttcacctctctgggcctcagctgcctcacctgtaaatggcaataaataagagtacctatttgtggggctgggttgaatgaatagtccaaagcacttagggcagtgtccagcgcagggtcagtgatggcagatgttctcattacgcctgcacttaagctctgatccctggctcttgactctggccagccatttccagggtcacacctcagtcagaagccgtatttccatactcttgcttcatgaccacagcctcctatccttccggctcgcacaccccctccctcctgaggtccttgctctcggatgtcccttgagtatgtccccttcttcattcccacagtgtggactccaccaccaatcacccccttgccgcaccctcaattttctgcaaccctcctctttagccaaacccaagggaactaataacacaactcagcttgtcctcacctataccctgggcccgaaagaccacagaaatcacatcactgtrcagaaagacgccactgcacttgaattctctgatccaaaagaccctgaatattctaaaaggccctcctcccactccccgcaaccactgtttcaaacttttgtcattctcctccctcctactctagcaaatgccctttcttcccattttactcaggtaacagaagccagcaggcttgacgtgctaacaccccagcttcccgccctggtgcctcgcctacccacttacccacatgcacctgcctcggcttttcctcttcactcctgttccaagccaaccttcttcacagctcccttccacaccccacgctccatccacttacccacacacaccacccggttcacctttcatccttggctagggtggtcccccctaccccaacccaactcccacctcacctggctactcccttgaaacgcagctcaagaatcacctcctgctgggcatggaggcccttgcctgtaatcctagtgatttcagaggctgagggaggatcgcttgagcccaggagttagagaccagcctgggcaacacagtgagattccatctcaagaaaggaaaattacctcctccttgaaccccctgccccagcttctctaatactccactcatacctatgtaaactttacttcgctaatttttgattgtctgtctccctgagaacagaggctatattgtccattgcgaatcaaagtgccagtaagtgttgaataaataaaaggatgagtacagtggacctactttctgttctgaaatgtttcaccaattgactcatcatcagccacttacatatgatgtcggacattttctccctcgatctagactgtgaagcatccccttcccttgcccttccagaacaaatatccctttgatgaaagaaaaaaaccagaaacaaaaccactacttcctcctcaacaaaaacagaacgcccaaaatagcaaggcagtttatgaaaaatatccagctgacactggcttaggtagggatcaatgcagttgtcccagcttaagaggagaaagggaagtttaccttggatggctatttgagggaggcaataatattcacatgttaaccaagaaagttgatcaaaataataaacctcccttgctatttataaagcaagggaagaaaaggaaatgggtaactccatggaaatttccttcctttgtctagttttgcttctggtatatggctaccacactaatttctcgataccaatttaggactatttaatttataggaagtcattttgaagggccccagggagctgcagatggtacctcgggggcccatctgtttaaggatgaaagctttgtgcamaccattacatcactctgacctcctcagaaacttcctatctgacaaaatctagatgtttgctctgtcaacaagatatttgtgcttgtccccagcctcaggctttggttcctgattagttttaaaatcattatgcaccccaactgaatagggctactgttagcagctgtaaggtcttcttctgggcaaatccccaagtctgtggccttcagggagtgatttctgtcctttctgcataattgcactctcctgattgatgagctgatcagtgttcctaccccttcctgagctaaaccctctcttcccgctctatttattttcccaagagatcagaggggaggggggaatggcatggtgaggcaggcctttggctctccccaaataaatgctcaggcactctacattattacaactttagtagctcagttctgtcccagagctgactcaccatcccttctcgccatccttaaagccgcccttgtgccaggaaacagctgctattttctggatcttcacagatcccatgatgccccagcacccacaagtacagatccacgtcagtccagtgggtcacccaatcacacacatctgtgctcacctcggagcatgcctacatcacctacatcctctccaatttcccacacgcctcgaggctcaacagggcacaatcacatagcgtcaactgtgctgtggctggtaggtgctgcacaacaaccttggcagagaatgtagaaattacattttaaacaaatttttgttgggggtaggggctggggatcgcatgtactgatgtttgcaatttactttgaaatactttttgaaataagatggtgtgatgggtagatatgtaataaagcccagattgcatgatcttaattatagaatctaggtggggggtatgtcagtattcactgtacatttcttttaacttttttctttttttttttgagacagggtctcactctgtcccccaggctggagtgcagtggcacaatcatgactcactggaacctcgatgtgcccacctcagcctcccaagtagctggaactacaggcgcacaccaccacacccagctaagttttaaattttatttttcgtagacatggggtcttgctacgttgcacaggttggtctcaaactcctggcctcaagcaattctcccaaagtgaaacttttcttcatgtttgaacatggtttactgctggttgtgttaaactttgattacttggtcaaggtagtgctggcaggtttctccactgtaaatttactttttccccacctttccatactctgtctcttagaagtgagtcactaaattcagtccacactcaaggtgtagggagggctaaggcctagctagtgaacggggaggtatctgcaaacattactcgaaattcttctataaggaagatgtctcttctcccagtatacagttatgtgcaggtatatttattttatatcttggactataatgcagtacatcatattatttattttgttgctcaaattattccagctttggctattaggagctctttgaggttggctggtatggccttcagacatgcccacatcctttgtttcgtgagcacttccttattttctgacaatgcaagatgccccagacctataattatccatttcttcaaggagtcctggttactgtgattagagaatggaatttaggaaccaagatactggggtgttattgtttctaagctctttcagtgaacagatctaggaaatacatgtgtgtcctaatccatgaatacacactaaaatataattatttctgtatctatgtcaagctaaacctaagttcacattgaggtttctgactttaatacagtcccacaaggttcgttctagctttccttccttgcatacctttgactttcctctccagctgtgggaaacttggctctctccatccaccaccccttcactatttgtttaacccttgtacatatataaagcagcgttggaactgtcaacctgtgtcccatgagaaactttacccactagagtacagcgtttatgcagttctttttgtagtttttatagattatagtcaaaacaccattttccaaagctacccaggtccatgtctttctgtccccactctcttaagtgaccatgtcatgcaactgtaaagcaggtagattcttttcccacagtctgtaaagcaggtagattttttttttttttttgccacagtctgcatctcagtgccccactcccaacaccccacacatggagaggtatgaacagctgctggttgatgttttataaatttgcatacactaaagttctttcatgtctattttatctaaataattaaagtctatttacttaagtagctgacatcccttcctattggtatacgcattgttttatccttagtactacaatacttatgtctacgtgtatccctgacacctagctcagttctggaccacgaagtaaattactcagatactaataagatgaacatattccacaaatttattgaaagaaactactatgtttagtaattcaacacagttaattgctggaagtcattcaataaaactagaataatgttcactgcagtgttatttaaaattcagtaataagtaaatagttgaaaaaattatgttacacctacaggctggaaaatgaattacatgcaatcactagaaatcatttctagaagaatgcatattgatataatacacactgcgtgtgtacaaaaatatcaagttatacagcaaaaagtatggcatttatttaacatatgtctgtgaaaagaaaaacagttaaggaaggcatataccaagttttgtttttgttttgagacaggctgtcactgtcacccaggctgaagtacagtggtgagatctcggctcactgcagcctcaacctcctaggctcaagtgatccttccacctcagcctcacgagtggctgggactacaggcacatgccaccacacccagctatcaaataattttagtattttttgcagacttggggggtcttactatgttgcccaggctggtctygaactcctgggctcaaacagtcctcccaccttggcctcccaaagtgctgggattttaggtgtgggtcaccatgtccagccatcaagttatttttaaattacttttttcatttctttctaaaagtaacagacagaagactgctgtgtggaaaaccttacagagaattcttccaagacagagtgttggatctgacaaagaagaaacagaatcagtttctgtggaccaggcagagtgcacccacggctgagccaggccagagatgcacagggcacggcaggctggctggtggatgccctcgggtcggctgtaatccgagatgagcatcaaaaaggccaaggcagtaggtaaggcagtgggtgtcagtgctaatatgtttaatacagacagaagggtggaattgagagctgtctggggaagcatcctgagaaatgtagggtttaaagaacaggaaagatttaaatagaggcagggaggaggaagggaggcaaaatgaatggagacaggtataagactgcccctctgtctggaaggtttctcattatcccattctgtaaaaacccaggggagatmttaagcaatgacagccatggggagcctcagtttgaagtttccaagagtcccgccctcgggtaatgtgctacagggagggaaaggattgcctaatgggatctggttagcctctagcaccagataacctcaagtggctgttaacaggagcctagctcagggttttcaaagattaacgttttcacattggaatttacactccactggtataaaaagtgccttttaccagagaataacacaaacacatggtaaccatccattacacaggaagttcaatggcaatataataaccaactctcagtttctagcaattttcaatacacaaaactgagcgcccccccagccagccaccttcaagactagatcacatatgtaaatacagaaagagctacaggacaaccttatgcaaacacagggaatccccagctcactgtaacaggtgggggagaattagtatttgctgaacacttaactagacaaggcataggtatcttacacccattatctcctttaaccctcaaaacaaacaaggcaaagatcagccccataaatggctagtctggaaatggcaaaaatttaaatttatactcagctctgtccagctcgaagccttccatgtttccactttggagtgatgtttcaacaaactcaaaacaggcttaaatacacctttagtatcactggtttaaaaagaagaaatcagatcagttctttctccaaacagtagttattttgtgagataattcatacatgatgtcaagattgcaactttaaaacctaaagcatattctcaaatctgaatgcagtaaagttaaccatttatgacttggcaaaatagtattacaataaccacaaataaatcaacttgattacaaagttttaaaaagttacaaatcaaaaataaccttttgcaacatgaagatctcaaattgagacacgaacatctagatttgattcttttcattctcaatgacaactaatctactttgtactcttaaaatatatcaccctaggcaggtgcggtggctcacatctgtaatcccagcacttggggaagccaagggaggaaggatggcttgagcctaagcactgtagaccagcctaggcaagtagacatcccatatctacaaaaaataaataaaagattagcagggtttggtagcactygcctgtagtcctagctactcaggaggcagaggctggaaaattgcttgaccccaggagttggaggctgcagtgagctatgcaccactgcactacagcctgggcaacagtgcaagaccttgtctctaaaaaatataaagaaaaaatagtaaaataaaatagatcactctattcctatatatcccttctctgctcctacgcaccacctctcaccccaaaaagagattcttgcttctatggttaattgcaaaacaattctatgattcagaaaccaggaaataaaaaagattaggatccgttgatagttataatctccattaccctgagatagaaatccccccctggaaagtgaaaatcagatatgtgtagtgcactagagatactagggcactagtgcatggtccaaacaatgagaaaggtttttcatattaaaatgatttaaatttttaagtactctttaaatgaccagagtgatagtgtcaaatgaacactgtagatattggccaaacctcagaacatacattcatacagaaggcattcaaatgctatttgttatggaataaaggcaattcaggacaaaaggtaatgtcttctcttcagacaaaccaggagatgactttagaaattaactttttaaaaatttaacaagaaaatttaagggttgaaagttcgaagaagagaaagttcaggggagagaattcaggacaaaaggtaatgtcttctcttgagacaaaccagaagatggctttagaaattaacttttaaaaaatttaacaaaaaaatttaagagttgaaagttcaagggagagaaagccgacccccatgttttatttcttaagaacagaggatttcccattcccactgcttcacttgactagccttaaaaaaaataaaaaataaaggcgggcacggtatttcatgccagatcacttgagcacacaagttcaaaaccagcctgggcaacatggtgaaaccctgtctctacaaaaaatacaaaaattagccaggtgtgctggcatgcatctataatctcagcaactcaggaggctgaggtggaaggatcgcttgagcctaggaggctcaagtaagctgatcgtgccattgcactcctgcctgacagaacgagatcccacctccaaaacaaacaaaacagaacaaaaaacaaaacaaaacactgccaagtgctttgctggggttaggagaactgaaccaaagtttgagttcacccacttccacatagctgctgtgtgaccgtttaatctgactcctttccttggctgaaaactgctcatatttacctacaccttaaaacgctgttataaagcccagaaggaacatctattccttcagacatacttgctaaatattttctctctgccctgattctaatgacaaagaggtcataccagccccaagagtctaggaagagatgagcatgaaggcagtaaactaacgcggctgtgatggagaacacacgagtaaaggtgcaagtgaagcacagtgaagtaatcacaatgttccacaaaacagcagctatttaaaaagccaaggaggagaaccacacaacacctggggaaatgcatgaaatatattacacagtccgggagcggtggctcatgcctgtaatcccagcactttgggaagccgaggcgggtggatcacgaggtcaggagatcgagaccatcctggctaacayggtgaaaccctgtctctactaaaaatacaaaaaaaaaattagctgggcatggtggtgggcgcctgtagtcccagctactcaggaggctgaggcaggagaatggcatgaaccctggaggcagaacttgtagtgagccaagatcgcgccactacactccagcctgggcgacagggcaagactccgtctcaaaaaaagaaatatattacacagaaaagcctataagtacatgtataccttagctacagctatacatttttaaggcataggcaaagaacagaagggaaggaaggaagagaataaaatcatggctgctgcacttaaacactttcttttttttttttttgagacagggtatcagtctgtagcccaggatggagtgcagtggtgtgatcacagctcactgcagcctctacctccctgggctcaagcgatccacccacctcagcctccggagtagatgagattgcaggtgcacaccaccatgcccatctaatttttgtattttttctagagatgaggtctcacctgtgttgcccaggctggtctcaaactcctgggttcaagcgatctgcctgtctcagcctcccaaagtgctgggattacagacatgagccaccacacccagcctaaacgtgtattactcttttctctcgctttccaaactttacataacatcacttaacatttataattcttaaaatattttaattgatgtgagagcacagatggaagagtgattaattttgactgaaataatgtatgygaaaggtgaaaactctaaaaacccccatgaatgaatgctgttattgtcagagcatgaaataatctagcattatgcataatactatgacactgtagtagcacaggttatttttatgttctgccacttggtttccagctcacctgaaaatgtatagtgttagtcatttctttacaatattttctttctttctttcttttttgagacagagtctcactctgtcgcccaggctggagtgcagtggtgcgatatcagctcactgcaagctccgcctcccaggttcacgccattctcccgcctcagcctcccaggactacaggcccccgccaccacgcctggctaatttttttgtatttttagtagagatggggtttcatcatgttagccaggatggtctcaatctcctgacctcgtgatccacccacctcggcctcccaaagtgctgggattacagacgtgagccaccctccccagcctcttatatatacttctaaagatactctatgcatatatattttttgktaaataatattcttggaaaattttccttaagagcayacataaacctacctcattcttttaacatctgcattccactctatcgtatggatgtaccaaaatttacttaatcagaccgtgcactgtaaaaatgcatgagtatgttattaacactatttatatattatttttccttgtatttttattttctttcctagcaaattctacatcttcctatcaaaacaggaaatttacatgtaagtattattaatcagtaacagtgtattttaatccctaaactacctctgatctctagccctgctgttttttctacttttttttttttttttttttttttgacacaggatctggctctgtcacccaggttggagtgcagtggcgcaatctcagctcaccacaacctccacctcgctggctcaagcaatcctcccaggctcaagcaatcctcccacctcagcctcctcactagctgggactggagccgcccgccaccatgcccatataatttttgtattttttgtagagacgagggtttgccatgttgcccargctgttctcaaactcctgagctcaagcaatccgcccaccctggcctcccaaagagctgggattacaggtgtgagccacagcactcagcccataaccctgaattcttcagcaaggtacacaaggcccaccagcaagttcacactcaccaggctctctaggctcatttcctaggaattcctacttcacactgttccatccagccaacccccaactgcatgtagtcctcctaaatactccatccattgctcatgctgttgctttggctacaacccatcccaccttgcttgcttaagtgaattcttactcaatccctcaagacagggcttaggcataacctcctcccagaaggctctcccaaccctccaggcagaggaaatgctcctgtgctctgctccagcctcaacctgggtcttggcacttaacctcctcaggatgaattcatgtgtcagcctagcccattagattttaagttcctccaggatagaaaccacatcttattcatcaaactgcctacagtttgatacaatttagttcctgctgaatcaaacaagaagggaacttctgaacatctattatgtgctaggagctactctaaaagtactgtacaaacattatttctcaccttgtaaaatgatccccattttggccgggtgctgtggtgacgccttgtaatccccccagcactttgggaggctgaggcgggcagatcacgaggtcaggcgggcagatcacgaggtcaggagtgcaagaccagcctggccaacatagtgaaaccccatctctactaaaaatacaaaaaattagccaggcrtggtggcaggggcctgtaaccccagctactcaggaggctgaggcaggagaatcgcttgaacccgggaggtggaggttgcagtgaaccgagattgtatcactgcacaccagcccctgtgacagtgcgagaatccgtctccaaaaaaaaaaaaaatccccattttacagatgaagaaactaaggccgtgaagaaatttatccaagggcattagaggagggctggaatttgaaaccaagtctactttactccagaatcactgatctttccattatgctattctgatgcatgttttgatgctgaaagctaagtcaaacatgcagtcctaagggacttgacatcttcataattattatggatactctaagggcacgacagtctcccaaaaagtcagtcaaaagcaatytaaaatgtagaaccaaactggccgaaaacaaaaaagattctttttttttttttttttttgagactgagtcttgctctgttgcctaagctggaatgcagtggcacaatcatagctcagtgcagcctcgatcttgcaggctcaagtgattctcccacctcagccttccaagtsgctgggactataggcatgagccaccacgttcagctgatttttttttttaacttttagtagagatgaggtctcactacgttgccaggctgctctcaaactcctgagctcaagcaatcctcccacctcagcctcccacagtgctgggactgcaggcgtgagccactgtgcctggcctgaattgctaaacttaaatgcctgttcccaaatcatggtggagccaggtgagatcccaaagtactgaaattataggcatgagcgaccttgcccagcaccccccaaaaaagtattataaacaagcaaattctgccawcagcatccacaaatctgcatttagcatcctcagggggtatctttgaggggccattcaaaatgaactagacgtgcagtctcagcagctgcaatagtgaggcttatttcccccagtgtgctctccctgtgaacactgtcagttatggtccacatttctctccccaccctgcaactccacagtccccatatcactcattaaaactgacctttggaccaggacccctaaaggatctacaaaatgaccaattttagtcagatacagtcgccccaggaaatgcctattaggaagccgatagtgagagtgggcaaggagtgggtgaggagggcagcaccgcaggaggtggcaggggtccagtcgacctgccatgagacctggaggtaggtacagagcctcacctgcaaaaaccccatgaggtaggaagaaagaatgcctgctctctcttaaggccttcaagagggctgaattagactagcacttagcacagagcctggcatagagtgggggctcaattggctcctgttaagtgactgagtaaaccaaccagtgagcaagccaactttctcctgtgtcctccccaacacgatggggactaaggaaaagaagctgggagctgggaagccctgtcattgcaacaggaagtagtaacggcatttagcaaaggtggaggggaaaataaaggaagatgctcctctctcccacacatcggaaaaatgaactaatcagcagcaagcagttaatgaacccaaatcttgctcccgggagagaaagtaaaaattatcccaagggtaacaagataccaacaaaaaagacacacaagctgaaaacaaaacgaaaacactttttcttttttttttttttttttgrgacagggtcttgcctgtcacccaggctggagtacagtggcccgatctcagctcactgcaacctccacctcccggggttcaagcaagtctctcggcctcagcctcctgagtagctgggattacaggcgcccaccaccacgaccggctaatttttgtactttttaatagagacgggggtttcaccatgttggccaggctggtcttgaactcctgacctcaggtgatctgcccaccacagcctcccaaagtgctgggattacacttgtgagccaccacgcccggccactttttcttgataaccatcaaccacaaccacacaaaaatcccctccaactgtggaggaaaattagagtaaggtaggtaatgtaaagcaatgcacacggtcaaccctaaatacactctctagctgaataagtaggcacttaatgtgtgctgaatgaaccaggcaggtgcccagccttcaccttcccgcccaagattcagagtggtactagctcaagtccaggtgttctgactttatccactccattccyaaaactaccttcccacattccaaattcacagaaaacagctcagggaggctgtgtaacctgtccagggtcatagtggggcaaagggactaaactgggaccttatcccagtctgtctggcttcaaagcttctactcctgagaaaaagacatgcatgacagaggggaaggggaacctaggctggttaggactaattataagcaaatggtctaatgaatgagtgatcaggtttacaacccagatttcaaggaattgagtactttttttgagacagggtctcgctctgttgtacaggctggagtgcagtggcgtgatcatagctcactgtagccttgaccttctgggctcaagcgatcctcctaccccccagccacccaagtagctggaactacaggtgtgcaccaccacagccggctaatttttgtattttttgtagagatggggttttgccatgttgcccaggctggtcttgaactcctaagctcaagtgatccacccacctcagcctcccaaactgctgggatcacaggcatgagccaccatacccagccttcagtgactctttttttttttttttttttggagatgagtcttgctctgtcacccaggctggagtgcagtggcgcaatctcggctcactgcagcctccgactcttgggttcaagcgattctcctgcctcagcctcctgagtaactagtatcacaggcacccacaatgacgcctgaccaatttttgtatttttttttttttttaagtagagacagggtttccccaggttggcaaaccaagaacctcaggctatcactcctcactctccacgtcccaggttccctcctccagcctctttttaatacatgagaaaagtactcagaatcaagcttcactagaaatctcttgccaaaggtccacttaaaacaacagaacaaacctaattttgaggacttgttacttttgagtgttaatccaaaaaactaaaaagcatcattggcagaattaagtatgaatgtacacaggttcctaaaaacaagcaattttctcagatgttgctttttaccagagatcaacatcctattctttgaggagttatcaaaagctccctgaaggaagtgaaattacaagacagcctaggccattgggaaagccaaacatttctcaaatgtgagaacctgtctcactctcaacccaggagcttgacatgagtgcagatccccaaaacccaccacaggcctactgaagcacctcctgggggcagggcctggaaatctgcattccaaattaagtgccccagatgatgcttaggcattaaccatgccctcctacaaattctaagtccatgcctacctggaggtatatcattagcttaaaagagtttccacaggaatgccaaatttccaaccaccgactgggcatttccaactgggtatcccagatggcccccaaactctgcccctcccctcctgagagagtgctgttatagtattgttcatcatccataccttgttgccacacctggaaactctctaccttcagtaagctgctaagtattccttttcatcccagtccaaaaatcatacaccatgtgcactccttcttcatgttctcattccgtcttgttaagtgaaattgatagggagccactgatttggactgagctcttgcactaggatccaacagaccaacccaaatggagtcattcatgcaaaagttccacgtcaccaaaccaaaacctaagctgtttacttgtaagatcggaccctccaagcaaacaggaragaaatgatagtcaaatctccaaacaggccagttttcaaaaagcacaagattcacgacaaccaatcaaagggggcccagtcagctgggtgcggtcgctcatgcttataatcgcagcactttgagaggccaaggcaggcagatcgcaaggtcaggagtttcagaccagcctggccacgtggtgaaacccagtctctactaaaaatacaaaaattagctgggcgtggtggcacatgcctgtaatcccagctacttgggaggctgaggcaggagaattgcttgaacccgggaggtggaggctgtagtgaaccgagatcacgccactgcactccagcctgggcaacaaagcgagactctgtcttggaagaaaagggaaaaaaaaggtgggcccagtcaaccagagctggcaaaaataaggaaatcccctctgctttaacccacacaaggaaagtaacctgaagtaataatctgaggttaaccagtccacctttggcactatgcaatctctgtgctcctgctcaagctgccttacaaaacccgctgttcagccatgccctgcagagcgcctgcctattttgtagtctgggtgctgcctagttcatggacccctaaaaaacaacaattagatctttaaagcttcatttgttgaaattttgttctttgacatcttgttctaaaaaccatggtggcacaggacagtaaacccaagttcaatcctggctgaactaggttactttgagcttgcttccttttctgcaaaatgaggatgacaacagcaccctatgaaaagtttttctgtgaagattacatgagmtaatgcaccttcaccttaagtgcacactcaaaggtattcaactggcattagttctcttcctcccactaactcaggcctcaaacatcatctctcacctgacctacttcaaaagcctcctaacagagagctctgcagcccatctgtccccacgccagtctctcctccacaccaccgctgccaaagcttttctccaacacacagatctgattacatcatctccctgctgaaaaacctttgacagctatcacttgcttacaggatcaagtccacacttcttagcctggcatgcaaggcctttgcaatctggctctcttctccctgccactgtacccaaatgccaagcaccgtcygttctagtaacaacaccccaaacacracttgtgttttcatgcctcccagcctctgcttcttacgctccttttctctagaaagcctctcaccctctttcccacctggcaaagtcaccttcacctcctccccytcctccctgaagctttccccagccactgtcaactcctcctcctccccctactcctcctcctcctgcactccctaacaccttgcagtggtactgtgtgtgcacttgtctcctcagattgagacacagcactgggcctcaaaccctgaagtgcacaaygaccagctctcaagaaacattttttggaaaaatgaatacaagacctccaccacccgctgacaaatgaaaatggtttctaatttgtcaaatagttaccaccttcatggtaactttttatctttaaaaaactcataaggaaattctatttgttgagttggctaacaccactcttatgaaggaagcaaaaaagccttgtgaagaaggtaaagtctctttacattttccactggcttaggtctcaatcactgtcctagaaatggcatctcttttttccagatggaagggggaactaacaccctttgattcctcctggcttaacttttggtatgtagagttgggacmgttaaaagggtcctttttgttgaagcaaaacatttcagaaaggaagagattaaacaaaactttgtaatggtagaggaaaagtgtaaaaagctcaagtaccacttgacttgaagtcygtagggaatcaagttcattctgagagaacaggcactatctgggaaggagcagtgtcagtccttgcctggctgagatcttttcttgtccaagccagattcaaagccaaagtcccaagacttggaaacagctgatgacagaagacaacactttttggtttacccataaatggcaagaatgcaaggaccatagatatccaggcattctccaaactgttcctccacttctgttcaaaacttaggatatattaattccaccttcgcgtgcatctttaataggcacaaaggcaataaggagaatccccatttctccactgtgaggatcttgaatgaagcactgaccatcctcttctctagaaaagcctgctctcctgtcggtaatatttatttcataaatgaatatgcatgtatgacttgagcacagtacaatagacttattccacctaaataaagtgtattgttctaaaccatactcaagcaaaacattacaaaagtctgaggagcttcacatgttgtcagtctcagtaaaaaaattgattttttaaatactgattttcataaaaaccagagtttgttagcaatatttttgtgccaataataaaatactacttttttgttgtttgtttggtgttttttttttttttttttgggagacggagtcttgctctgtctcccaggctggagtgcagtggcgcgatctcggctcattgcaagctccgcctcccgggttcacgctattctcctgcctcagcctcccgagtagctgggactacaggcacccgccaccacgcccggctaattttttgtatttttagtagagacggggtttcactgtgttagccaagatggtctcgatctcctgacctcgtgatccaacccacctcggcctcccaaagtgctgggattacaggcgtgagccaccgtgcctggctaaaacaccacttttgactcttactccttctcctctataaatcaccatctaaaactgtcctacttgttagctcaaaacatttcatataggcatataattgttttaatataagcaaccaactcccatacagattatcttgaaatcaagaacttatctcgacttctgtaacaagtaccttaaaattcacaatttttaaaacactcagaacaattaaaaacttcaatttaacaactgatccagaatgctgaataaaatatggtaaggactggatgtggtggttcagcctataatccccacactttgggaggtcaaggcaggaagactgcttgagcccaggcattcgagaccagcctgggtgacatagcagatcctatctctacagaaaaaaataaaaataaaaaaataaaaaaattagtcaggcatgatggtgcacacctgtggtcccagctcttggggaggctaaggcaggagcatcatttgagcccaggaggttgaagctgcagtgagccaagactgtgccactgcacttcagcctgggcaacagagcaaaaccctgtctcaaaaactaaataaacaaatgaagtaaaacagaataaaataaaatatggtaagaggaggagaaggtggaagatgatctggttttgatasctctgatccatgcacggtgctaagcctttcatacagggcttcgcctttggccttggcataacctctatgaaacaggaattattgtccccattctacagacatagaaacaggtcaagtaaattgccagagccaaacacaaaaccaaagtctatctggtttcaaagatcatcctttttaccatatcctatatgtttgtgtttttttaaagaggggagaaaaaaggagtgtatatgtatatttttaatggactaaatatagttacaaagtacctactctgtccaagtcaccttattattcacaacaggcaaattttaatgcagaaaacagtgtccctgctggttaaaggattaaatataagaatgcgctgggagctgcttatgacagctaccattcatcatgcaaagcttctttatatatactaagctattcttcattaagattcacaaaatcctttaacttttcccagacatacaactagcacttggaaggatatcaagggaaaaaaaaatgtaaatagcaaattaagttagcaaagttagctatgataggaacttttatttgcttgtctgggtttctaagacaatgtacatagaaaattatcaccccgagggtgtccttgaatttatggctgtattttagattagcataagcatttatcatgaaaatattctgttaaaaatttatcaagcagaggtagaaagaatgcacattcctaaatgtgttttaaaaataagtgtctatggagtattattttaccatcacaactcagatacttgtcattcggaataaaattcaaccaccaaaaacgtttaacacccaggccactttacccaagagacacatggtttatagtctcaagatatactgaaaacatatccatttaaccacgccaactattcagaatacctttccaaacacacctggaatcaattcaacttgcatccctttgatatactaataaacctaatttttaaactctaagctgttacttctttatatatatatatatatatatatatatatatatatatatattaaagctatatattaattgctaaactttttaaagatagggtctcactctgtcacccaggctggagtgcagtggttcaatcatagcttgcagcagctttaatcatctcccaggctcaagcaatcctcccgcctcaggctccctagtggcaaggactacatacaggcttgaaccaccatacccagatgatttttttttcactttcaatagagataaggtctcaccgtgttgcccagggtcccgaactcctgagttcaagcaatcctcctgcctccacctcccaaagtgccaggattacaggtgtgtctgactcaccatgctgctctgaattgctaaacttaaatgtctgttctcaaatcatagagggggtcggaagtgcagaggggaatcttagtctaggacctatttttgccaaaaatattttacttgactctaatcttgcttttagacctagcctccagtttataggaaatacaggaaacaatgggacaaggtaaacaccgccacaggaaacaaattcagaatatgggacaacccagaaaagtcaggaatgggagggagggaagtaatgagatattatttttctacatttaaaaagacgaaagagacaaacaacaacaacagcccacagtgcaatgtgaaccttgattgaatcttggtttccaaaaaacaaaaatggtgacaaatgctatttaagggagaatttttttttttttttttgagatggagtcttgctctgttgcccaggctggagtgcagtggcaygatctcggctcactgcaagctccgtcttctgggttcacgccattctcctgcctcagcctcctgagtagctgggactacaggtgcccgccaccatgcccggctattttttgtatttttagtagagacggggtttcaccgtgttagccaggatggtctcaatctcctgacctcgtgatctgcccacttcggcctcccaaagtgctgggattacaggtgtgagccaccgcgcccagcccaaattagataatatttttaaattattgttaattgtattaaaagtgataatggggtggtgatttttttaagtcctaagttagaaatgcatagcaaagttagtcaggcaaaattacatgatgtctgcgatttgatttttaagtatttcaacaaattagataacccaacaaacattgttctctggccaaaaaatgttctggaaaaaaaaaaaagtttctacaattcaatgtgtttggaaaacactgactactctatttcccttccaggatatttataatgaacactagatctaagggtgctcaaaagtcctgtagttaaaaacaaaaatacctggtttactttggttaacccagattttcccacttatttgaccacaggacttttttccctgcgtaacacctgttaacttcctaagactcagtttcccccagaatgcattttgggaattcttgctttacttaaataaatcctaagaaaaataaggccctcttaagttacatggatgattcaccaacccctgaataagaatttcacaattgcatctatttgcaatttaggagccactcactgttttgatgtcttttgcatctataaatatgtttactctttaacatgttttgatttataagtcagactctttctacaatatgaaatcccactgcaaaagttctttgaaatggaattaacttaatttattcaaacccattgccttgggaatctacaatgaaacaaatttcaaattgtcaaaccatacctactttttactttcaaaactaccttmagatatttcaaagctttccctaaccctttccaaagactcatgaaaataaattactggatttacagtagccaagaacaacaacaacaaaaaaccttgaaatcaaagctcttttgagtctttcagttggtacttagggtttccaggaccagaaataaaagccccacagattcccatctttatgaaaacggtaagtttttttttttcttttttcttttttttttgagataaggacttgctctgtcgccaaggctagaatgcagtgctgtaatcacagctaactgcagcctcaacctcccaggctcaagcgaccctcccacctcagtctcccacgtagctgagaccacaggcatggtaccaccatgcctggctaatttttaaaaaaaaattttgtagagacagagacttcctatgttgcccaggctggtctgaaattccttggctcaagagatcctcctacctcagcctcccaaagtactagaattataggcatgagcaaccacactcagctaagtggtcctatgcttataaacagatcctttggaaaaactgaactggatcccaaaagagattcaccttaatcatgaattctacttactccacaggtgaaagtttcacagcaagattttaagtaatatctgcagttcatctgaaaaaaattatatcatattccatttaagaaccccaacacttaaaaactcattacacttaaaaactcattggaaatgcccttaaaaatggccaacaaagaaatctgagctagaagtctctgatgcaagaaaacaaccaaatttkatgttcccttgcctctaaggaggcaatttataatgttcaaaacactttatatacattctgtcatttgaccctcaaaaccctggagacatgtctgtcttccatcaggggagcatatatctaacatagctcaacttgaaagcctacaacttgtgaactctcaactatctttgcatagagggaatactgacatagataactctattcagctaagcactacagagcccatcacctcccatctcccagtggggatgctcargccagatcctaccctggggagttatcgcccatgattttgctttgtggtagttgcagacagctcactatctgcaggcatttagatcttcatacatctcatccaccaggcctttcgtgttactccacaaggactctcccttgaactcactgcatctgctargattgtctttaatgtttttgcactatcatcctatggaacctcccatttcacctgtgtcagtgttcccatgtgaaagaacatggcactgtaaataacatgcatgagggcacacaaaccagccaggaaataaaaattttccaggtctgaatcctgggtcctgctgtcttggttctgtgagctccctgccctcaatctcctttcatgtacatggagctccctgccttcctaaggctgccagaaggctggaggcgagacccaccccagagtaacaagtccagagtgatgtttaacaactgtggattctctgtctccctttctcccaaaggagaaacagattgttttctttttaaatgagaaaggtaagacaggaccccctaccatcaaaaagcctacaacccatctgcaaagccaataggcgaacaacttaataataaaaagcaaacagagaaagacattataatgaatgtacaatgtactagggagactaaaaggaaagaaaaactgaaatgtggaagcgggagtaaatcagaaaaaatgttcataagaaagcaatatttatttaagctagcccttgaaagtcaaaatttcagtggtggtggtagggtgagggaagaggcaaaattgaaacaaagtatcagggacgggcaggagttcagtggtattagcagagacaaggagaggacagctgggcctgcaaacaagttagggtccagatcacagagattcttgaaagctaagaataaaacagggacagctactactcttatctgtccttatatcaggtatgatgctttcagctgcaagtaacaaaaatacctaactctaagtgacttaaattgtggtatcaaagcttttttgatcacgcaggactatcagttaaaaaaaaaaaaaaaaattagccaggcacggtggctcatgcctgtaatcccagcactttgggaggccgaggcgggcagatcacttgagctcaggagtttgagaccagcctggccaacatggtgaaaccccatgtctatgaaaaatacaaaaattagccaggtgtggtggtgcacacctgtaatcccagctattcaggaggctgaggcaggacaatcactcgaacccaggaggcagaggctatggtgagctgagacagcaccactgcactccaacctgggcaacagagaaagtttccatctcaaaaaaaaaattttttttwaattaagccaggtgtgatggtgcacacctgtagtcccagatacttgggagtctgaggggacaggatcacttgagcccaggagttggaggctgcagtgaactatcatcacaccactgtactccagcttgggcaacagagcaagactccctctaaaaaaataaaaagtaaaaaattttaaaaacgtattgaagctcaggaatttcaggggaaaaaatttataacatatatactaacatattataaattgtattaatttatgtgtaattaaaactagttatgaatggtatgtatacacacacatgaatgtagtatatacattatacaacatttaaaacttttaaaggatgggagtcaaacagtatttttaagttcatttttattaataatacaaatccaaacataattttgttgttgttgttgttgtttttcaagacggagtctcattctgccgccgaggctagagttcagtggcacaatcttggctcacggcaacctccacctcccaggttcaagtgattctcctgcctcagcctctcgagtagctgagattacaggtgtacactaccacacctggctaatttttgtatttttagtagagacggggtttcaccatgttggccaggctggtcttaaactcctgacctcaggtgatctgcccgccttggcctcccaaagtgctgggattacaggcatgagtcaccgcgctcagcccatacataatttttgagccaccttcttgtcaaatttgttttaaaagtcatgttctaaactcataagaacattttcttgttcctttatacttatatcattatcattacactttctttgcaagaatctttttaaaccactcgcccattttctgggggtcagtttagttaaaaccagataatctagccataaatgtatttagatggatagagttcaccaaaggcaagaataagaatgagggtaccactgtcaattccaccaggttgtaaaaggcccagtcttccctcaggcaacctcatataatgtaagttgataaaagactaccagatataccaaccagtgtcaactcatacattaaatattttaaaagcttaattttttctaacattcttgaatattttcttccctcccatattggatgatctagcacactccactctggggaccactgatcttaaacaataatgaggctgggcacagtggctcacacctgtaatcccagcactttgggaggccaaggtgggaggatcccttgagcccaggagttcgggaccagcctgggcaacatggggaaaccccatctctacaaaaaatacaaaaattagccaggtgtggtggtgcacacctgtagtcccagctatttgggaggctgaggtgggaggatcacttgagcccaggaggcagaggctacagtgagccatgatcatgccactgcagtccagcctgggtgatagagtgagaccctagcttaaaaaaaaaaaaaaaaaagataagaaagaamcaataacgaaaatgttttttctcacagaagttctgagtcacagtggttctagggctggctaatcagcagctaaaataagtcattgtgggctggggatggtggttcactctgtaatccagcactttgggaaactgaggtggaaggattgcttgaggccaggagttcgagacgagcctgggcaacatggtgagaccctgtctctacccgcccgcctcctacacccctgacaccgacaaaaaaaaaaaaagtaattgtggtcttaggccacctttagtctgcactcggtgctacttgttctcttgtgctgacaaccttatgcttcaaatatgccaggacctaacaggcgtcacatacatattcattaatgagtcactggcaaaaggtatggcattactaaaattgatggcttaatcaaaattcactccctggggcaggggacgcatccaccttacccttaagtacatggccagtggaaaactaatcaaaagcaggattatagtagtaagcacagtcacccccctccacacccaaccctccatatctcaggttccatggccacagattcaacaaacctaggttagaaaatattcaaaaaatattctagtaactgaccactggaaaaaagataacaatacaataaacacaataaaatacaataaatacaataaaaatataaattttaaaacaatacagaataacaactatttatctagcatttacattatattaggtattataaataatctagagatgatttaaagtatgaaggaggactggggggttggctcatgcctgtaatcccagcactttgagaggccaaggcaggaggatcacttgaaccaagagttgagaccagcctggtctggtctcatagtaagaccctgtctctacaaaaaaaaaaaaaaaaaaaatacaaaaattagctgggtgtggtggtgtgcacctgtactcccagctacttaggaggctgaggtggaaggattgcatgagtccaggaggttgaggatgcagtgagccatgatcacaccagtgcagtccagcctgggcaacaaatggaaaccctttctcaaaataaaatacaaaggaggccaggcaaggtggctcacgcctgtaatcccagcactttgggaggctgaggcaggtggatcacctgaggtcaggagttcaagaccagcctggccaacatggtgaaaccccatctttactaaaaacacaaaaattagccaggcgtggtggcacatgcctgtaatcccagctactcgggaggccgaggcaggagaatcacttgaacccgggaggcaaaggttgcagtagcygagattgtaccactgtgctccagcctgggtaacagagtgagactctgtctcgaaataataaaattaaaaaatatatatatatgagggtatgcataagctatatgcaaataatacatgatttttaataagggacttaagcatttgaggattttagtatccgtgggaatcctggaaccaatcttccataggtatcaaggatggttataatgttgtaaactattgcagcaatggccctcaatgaatcatgtaaccaccacggcaccagtgagcctaggcacagggaacctggcccccatttctgaatcccaagcaaataaacagttgttgttaagccacaagaagcaaggaggaccagaacacagaatgctgttgtatggtgaccatccctgccatagtattctacgtatgtaggacaacaggagaagaaagaaccaaactgtttcatccacagacttttaaaattcaaacatgtagttcagagtcagccggcactcaataaacattaataattaatgttacttatcccaagtaatttagaacaaagcatggcagagagaggggagtgtaatgggttacatgggaataatgaccaactcttacgtttttagcagtaattcaataccccctcatgtctgtgtacatagcaattcagagtcccacagaatgtggacaagtccactgccctcaagactacaggggtgtacatcacaacaacattaagaatcttcatatcctttggtatgttgttatgatcagcagtaccacttgtggaaatgtacactgccctggctagctcttttgttgatccagctccctccctcttccattaacaataaccctcttctttgtgggatactttgtctccccacagccccattttatgggtctaaccgtaactctcctttggctggcatcaagccaattcgggttccctccagggctttcccaaattggaactaacatcaaaaaggccaattctggatgtgaggcttgagagctataataccagcagccgtatacgtatgatctttttcatatttcttcaaaagctcatgcaacagaggatcccatttttgcatgggtatacatgcatgaaaaggtcacagctgagtgcttctgagagacttccctactctccacccccatctcctacccaaagaggtaataagccactgttcatgactggcacgtaaccctaggtgtgctgaggtggggcagggaagaggttgagtcactgtggctctgggctatgtgaactgaacatgatgggttcgcatctgtctacctctacaactggaaggtttcccctaataaattccctcatgttagcgaaaaaatctgtgctaaaatccaggaactatgtcatccctctgcaacacttttgtccttgacattctgtctatggaactcttctttctagaacattctccttgatcacacccacctgcaggggaacctaaagacaacaccgaccctagaagggcaagttccatcagcaacacagctaaaccaaaccaggagaactsctttcactctccacaagataatgtcctctgaaagccttcttcaaagtcctctatcattccaaatccatgctcctgataatattattaaaaaccaagaatcattcttctcctttgctgctcttgtgccctcctggtacaaagtgtcccaacttctctagctaatagcacttcataatgttctcttctctcactcatggaaatggcggcaatttcagatatactacacctccttcccagccaatgagcactgatacatcttcttattgaggtttaaaccccattgcttaatattttgaaaagacattcctctgagaataagtttaaaaagctgaagatggacaagctgctcagacataaaagagcctacagcttaacacataattgcattttagaacctgttaaagaaaatcaataccagcctccagatgagtgtcaagctgcagtgagtgctgctaactaggcaagcaggacaaagcacaaacatttagagacacagcaaaaatgggtcacctgcaacctactacctctttaccatcaacccaacagcataagggaaggatgtatttagcatggaaagtgctgcaaaatcagacttatccagccatcagtaggaacagtccaagaatgatgacaccaaaaaaaggaatactcacccaggctttgcaattaggctgagagataccaagatcaaaggcaaatgatatgttcattttttatttttaaaaagaggtacagatttgagaagtgatttccttaagaatgctgtctgggttactagtccggattataaatcacattacaccctgaagcctacttaataaaaaagaagttgaaaataaacaaatgattagtttgaagcatgtgactttctgaaactctcttgaggagaaagttttattaccattattggtgaactgtttttaatccctgacatcaaagcatagatgttaaccctggggttctgaaatcaaaataactcatatataaccctaaaaatgtattgtgagaaattgccacatattaactttagtctgtttggcaggtttgaataaacagaggagaagagactagggagaatcagaagactctggttcaagttcaactcaactatttatagatgatacaggtctaatttaactttctaggccttggtttattcaaataaagggttagggataaaatgtgtaaatcaagcccttataaaccccatagcagtgttctaacattacagcactggcttcagaattcctacatttctcaaacttttggagagtcacagaactttagggatgcaaggtaatcccattttagggatgaaaaaaatgagaaaaccaagacccagaaaggcttaagagttctttgtacagtgaacactttcataacstggggagaaagggggcagggagaggttctggtttttccaccactgaaatatgcatttaagagacagttgaaaaccaaactattttaaacactaaaacaaatcctccccacaaatatataaacactcttctttattttgcttctgtaaatgtattcctgtaacacaaactttattttrtcataaagataaaaataaagccatttctttttctatgagactctcaaccctactctcaacccaactgagacaaaatctttacaattaggttagaaatgtctaatggaaacaacgacataaagttaacctccagctatgctggcaggagtcattataatatggattatagttccactggctcagggatgctggttttaatgttcccagagaaataaagaattaatcagcaactcagaagagaacgttgcctaaaaatggacgatttaatccagacaactccattgtctctaaaattatgccctcaatcacccagtgtcaaaacctactatggcaccaaataaatcgtgtgtggttaaagagacaaaatgttcttttttctacaggctgttatgggaagcagaaaaaggctgactatgaatcagttatatcttagatcaaggatggatataaattataataatttgggcattctggtggttaaaccaagaaagcaggaaaaccattgcttccaagttccagcaacacttcaaaccaaaaggcttggtgccaaaaagttaagtttggggcaccacatgtgcaagacagggtcataaaaactcaccttaaatttatttgtggacttttcctgcttccactaaaatcgatgacactatttcccatctcttattgtcaaatcacaacagtccggaagcctgaaccaagttcacttggcaggtaacaggaacaaccctaggaggaagtcctgaaggatatcagataccatacttcctttactgccacatacttttcatttcagaaccaccaggatatatttatgatgctttttgactaacactcaccaagcattctggctgacacaaactgcagaaactggcatactctagggaaggtcccttgtgaggtctttaagtagcttagatgagtaaaacactcagactacttctataatgaagtagtctcagccgctcataaactccttcattcccagcaatcaagaagcagctgttaaaatcctggaatcttcctagtagcagatctgaaatacctccaggctgacccaggaagcttcacaactgctttcctctccttcccctcccctgcctcaggagtgccagcctggcaggaataaagatgaccaaggaaggaaaaaagagggtagcggatctggtgaaagcagagacgcagactcccttcatttccactacagagaaataccagccctctgtgccaactaaccaggtttctcctttcctctcccacccccacccctccaaacacgcattaacttctgcagtctggtgtgtctggcatttccagagcgagcgatctcagcaatcttgagccctttcctcaaagattctgaaccaggaacttcctttccgcgccagccagagtttgcggtccaacccacgttaagactcagcttccatttaccttgtaacctgtacggacgacgctgcttctggggtcaagttcaagatgaaagttccctcctcacctcccaagttaactccagcagggaacaacgccactgagaacggtcccaacactggaggcacgcggatctggagctggcaggagggggctgggagaaggccgttgccgagcctggcgtcctccgccccttggccgcagcgccgcgtttctacctggccaacgccacatttcctcccggagctttacacaataagtccagtaagttttgagaacaccggtccagggacctttctgtctgcaaacacaccacacaatgcctagagcttccttcccagccaggcgttccggaaagccgccgcgccaaagccgggagccccgcacacccacagcgctgcgcgcccgcaccccaaagtcctccaggaagccagtgccctgatatcgtcccccgaaaatgaccactctgcatccaagaacaagggggctcacaatcttgacaattaccgctcttctcagcgccccacccctaaagaaaaacccccaacgtctaatcctaactcacccccacccccaataaaggagtgtggatatgctaatcgcagtgttcttggaagcaaagcaatagactttcagcccagactggggcaataccatgcctccggcttaagttctctcggcaacttcgcgacccgcgcaccccaacactccggggggcgcccaggaccccgcggtgccaggcgcgcctccccccgcctcccccgcgccaggtaccaggcgtagcccaggcccttgccaagcccgagggctacagagaaggcgggaaagggggcgagcgggcgcgccgggcgggggtggtmccagaactcgagcgtgccccaagcgttcccggttcccaccacaccggttccaggggaggccggctcggtccggcgcgggggaaccgcgcaaggaaggtgcggactccccaaagccgccgagagaccaaggcccggggcgcccaacatgtctgtgcctattcccggaaagctcccgggtgtgcccggcggaggagggggcgctccagaaactttcccacacgcctttcccttctcccatcaccctctccaccccgggtccctctcgacctctccgcacactggcagctggccatgcccggggcgctcgcaggcccgcggcggagtccgggctgcgggagttacctgccgggaaagtttccagctcctcagcgcggttccccacacccagggccgggcctcggggcgaggccagctcggcgctccgcggctgcctctcctccggctcccgaggcggccgccgctccagcagctgccacagcaaagcctccgctccggcccgtccccccgccttgctcggcccacaccggggcctcattggcagcgcgaatccccgcccttgcgcgtgttcccgaaggcaccttcctctcgcgcgcccgccccggccgcgcctcccgcgcccctccccgccccgggctgcggcggatccagggaccggctggagcgcggagcgcgaactttccgcggggcttgggcgcgaggtccccttgtcccgcctctcggcgccaggtccgggcctgaagcaccctaccatccctctgggcaccgggtcccccggggctgcgcctaggcccctctgggaccaaaatgagatgggccatagtcttttttacagcctcttcaaaatcaataaagcgacccggccttccctcctcgctgcttttttaccacagccgaggaggacatatgggagcaattaaccgagctggagtttccgtggacgctttggggtggcttgtgcggctttcttggattttctctgcctcacttaactacacacaaacacaaacacactttctggggccagaatcagctaaatgagctggaaggtctaagaaggcatctcgccggctgcgtctttttatttcccaaaaggaatgggggacgttctggggccggtgatttcccgggcgtccctggggccgcgggtctggagcctcctgcgaccgctccgggctggcccgtgctgtctgcgctacattcacagagggccagcgtcgtgcttctgtcggaaggaggtgggagggacggaggggagagaacacacaaagatgctattattttgtcggttggtggcagtaaattaaactcctgagttcccaaaatgttttgttattctccagcagagcaaaaaccaggatagggactagggattcgggtgtcctgggttctccaagatcctcccaggaatcccaggcagccaaattggcctaagggactctgctcacttaatacccgaagctctctaagacagccttcgttgatctagttgaccaaggaaggatcaactagaactgccgctgccttgtgtggccagcgggaattgtgcacgggtcaccccattggtgtgtctggagcagagaatagagaagttgctgtaaaccgatttattggtaacccctaaccttgctgtggcaaacccgccttaaaatacgattgtgttttaaacaagtttcctcataaaaacttcaacctcacgcagagcttccctatataaagacaccagcaggaggggtgtccatatttaaagttcttatgaaaagggacaggaagcaaaatgccacacaatctcttttcataaattaaaaagactgaaatggactggatttttcacccatagtttcaaaggcctgattactgctgtgttgatatttgagcagtaaacacatcagcggccttgaagtattcccgaaacaaggcaggatagaatattgaaaataaaaatacaaacttaaaccagaaaactattgacttctttctccatctgaaatgtttcattgctgaaaaatatggtaatgttttatttaatttatcttgaaacgaaatctttcaacagacaaaaaagccagacagcaaccttaatgataaaagaatgatgcaaacaaaagacaaaaactccaagcagtctaactaatctgaaatattaaaatataagagaaacaatcctaagaaaatagactggtaagatttcctgctccagacttctttataatgggagaaaggtataatggatgaaatttatcatttgtaccacatttttctggttttggctcttctcagctgtatttccaaatttttgatgaaattgcttagttaaatagggctttgaaggcagtgcaatttttttccctctactctcaaagctccttaagtagcaagtagaaaatcacataaatatgttcattactgacatcatctttaaattatttttagttgaaaaagttttgtctttatagtttcagaagtcacagtcactaaagaagtaacttcatcactgcctagttaggagtatttaacattctaaacaggcatacagctagcaatctgaaatgtgcacacagaaaggccctgtctccccttcttcctgtagtgtttatataatccaaactacatatgttattatgcacaatctgatctccagctttaaacagctgacattacatacactatgttgtactaagaacatcaaagaagctctcttaagctgtgggtgaaaatagtacatttataaaagacaaggccaaaaagagtaaaaaaaaaaaaatgaaaattcatgggtgaggcaaacagggggcttccattaagatccgttttgtaagaaaaaaatgtgaacattttctaaatatcttaataagtgaagtattagctgagcacatattaaaaaatgaattttaatttttttaaaatctgcttttcccttaaaaaataaaagcgtttttagttagttgttagttaatggtttgtttgaatttttaggaaaaggaaagcaagaatcatctcttgcttttctgaggatatctctgcttatcccatctactttaagaagctcattcattacatttctgttgataccagttaggacaaaaaaagagaaatatagatcacgtgaatagtctatgctgcacacattccctaaacagacatacaaaatactggattccatttttaaattttctgtcagtttgccagcaatgtagcttttctcagcagagtgaaagaaaacagcaaataataaactggtcattttactatacaatttactgcccaggggaataggctgaggaaagcgtgagaaaagaatgtgccttgtgagtgttagaatgcttttttttcctgcttggattcgtaagtacttctattttaaatcaagtctaagttgggatcatggccagtgtttattatggtatgtgtagtatagaatacatagtgagaagtaaaatgtttaaaacactgtagttaattacatccaaaaactgtaacagggctaaaaaaaattttaagtcaatttttaaggcaaaatttaaggaaatctagactcaaaataattcagcacacaaacacttcttctttggggcatcttttaatgtttacaaaatccattctcctttggtccactcattcttcctctcccttttaacattttggggaagaaaataatttttattaaagacattgaaaataataaaataaattgggtgtagttagaaatcaggtgggaaaagcaatgaaattacatacccctacaccacagtcccagcgtgtgtaacgatccatggccatacacggatgccaacaccatggtcagctgcaagctaatggcagacattcatccaggaatatagaaagccgtagctgtgcacagttagccagacagttaaagttaaggagtcatgggacatataaacccctccacaggtctaacacatggcctgccaacattatagaaactcatccaatatgggtgaggcagtgaattgtttaaaccgatatgtaatccactgagagaagaaacagagagatagagtcagaggttcatatttccttataagaatatgagaataaataaagtcctgggagaacctgctttaagacggcatgccatctgagtagtattttaaatataaatttagatttagaaatctacatttataaatttagattcagattttaaatatagactttcattaatcttctgatagtgaaataccctatagggggaaacaggaaattcccttgttcaggaaaggtaggtaaggcaatcagatagtaacccctctgagaaatgtcattgagtctggctaagacagtttaaaaagaaatgtgttcttaactttgagtataacagatgcattttaatgttctccaccttccctcttttcagcaagttgtgctagaaaaggcactggaaatggagtcataatatctaaatgccaattctgactggtacttactgtttgtggtgactggcaattcgtttagcctttttgagccccaggttcctaatctatgaaaaaaggagaatggtataggatcccagcctcacagatgtgttgggaagattaaattttaaaaaggttgaaaacaattaattagaaaatgctctaccaaagttagtttttatttagtagacagttagatgttttcctctccctgttacctggggccactttggcttgaataacaacctaaaggtttgatcagagcagtccagaatgcctatatttgtgctcttaaggaagagtgacttaaagatgatttagtagtaggtaataactccaattaagctctcagagacttatccgagggtaaattggcaggtcttgtcgcagtcaggagtcatttacagagatatattttctcctgtgttactgtagaggaaaaagtgtagtgtatgtctaacacaggcacaactctatgcaaatcaacatgtgaaaattcttacataatatattaatgtaaaggaaatattttctttaaaaaaattctcgctgagattctttgcaactgccagtacaatcttatttatattattaattagtgacaatcttttcaattctgtgaaataacactgataaataccaatgggattacgaacttgaacccctgaaatactttcgtaagaccaagcactaatcaaaactactttgtagttgcatatttatttgaagaaatgcaaatcagaaaatagcacctactaaaagatttggtttaaaggggatgagatgtgggagatggggggacaaaaatatggaaaacctagccaaaatagcaattttggttttgtttaaaaatcagtttgctgtttgtctctggatgatcagacaacttaatccagaaagagatgaggaatgttgatattgtggatgatgaagaaaatcaacttgataaaattgaagaggtttgtccactaaagggccacatataagagacagcagtaacttccaagcctaagggtgcataaaacaagattcgtgcatttagaagtttttaatacaacaattagaagtcctatctgtctaactattaaagatctgaacatttttgatttggagcagaaactgattaaatataaacttttgctcctctatctttcttgtgtgtgtcatgtctaaatgtctcaatggttttagcagcagtcgtgtctgcctaagagaaaatagggcactatgtaattatcaggagaaattaaactactgggcttcattagagaagtcaccccttacctagagcgtttgctctaaaaaccagctacttagtaaagattgatttgactacttagtgagctgtagctaaagccctgttacctttcagtgatttcaaagctcttcttaaacctccttttgatttcacagctaatctattgcttctcactcttcaaggttttcagtgcctttgaaaagaccacctgaagggaaagagattactgatacgattacaatagaaacaggttaaaacaagatgtcaggaacccaaaataagacagcagtcgctgggggttaaaattagatgctgtcttctttgactgtcttttttctttttttcttttttttcttgggctcaggaataaatccattcatcttttttctaatttgccatgccccttttctacccccaggagtcaaccagaatgttagaggcctcaatcttattggacaaagaacaggttcccacaatcggtttaaaaaaaacaaaaacctactatttacctgggaagctgtatttaacttattaaaaatcaggtgacatgcagagaaattagatcacttatacattgctagtggtaatataaaatgatacagcctttctgagaaatggtttgaaagtctttggccggggggggggggttggttggtttgtttgtttagagacagagtcttgctctgtcacccaggctgaggctcagtgagctccggggctcaagcaata

SEQ ID NO: 98182 - DNA, 37176 bp, Homo sapiens
ctaggtgctgggaagaatggggagttagtgtttaaccgagacagtttcagttttcaaactgaaaagacttttgtggatggatggcggtgatggccgcacaacaatatgaatgtacttaatgccactgaaccatacacataagaatggttaagatggctgggcatggtggttcatgcctataattccagcactttgggaggtgaaggcaggaggatcacttgagcccaggagttcaagaacagccttaacatagtgagaccccatctgtataaaaatagaaaatggccgggcacggtggctcatgcctgtaatcccagcactttgggaggccaaggcggatgaatcacgaagtcaagagattgagaccatcctggcgaacatggtaaaactccatctctactaaaaatacaaaaattagctgggcgtagtgtcatgtgcctctagtcccagctactcgagaggctgaggcaggagaatcgcttgaacccgggaggcagaggttgcagtgagcagagattgtgccactgcactccagcctggtcgcaacagagtgagactccgtctcaaaaaaaacaaaaagaaaaaaaaaataacccaggcctggtggcacatgcctatagtcctagctactcaggaggctgagctgggaggattgcttgagcgcaggagttcaaggctgcagtgagccacgttcgtgccactgcattccagcctgggtgacagagtaagaccctgtctcaaaaaactagcaaacaaaacaaaacaaacaaacaaacaaaagggctgggtgcggtggctcatgcctgtaatcctagcactttgaaccagggaggcagaggttgcagtgagccgagatagcaccactgcactccagcctgggcaacaagagtgaaactccgtctcaaacaaacaaacaaacaaaaaaggttaagatggtaaattttgggccagggcagtagctcatgcttgtaatcccagcactttgggaggctgaggcgggcggatcacgaggtcaggagatcgagaccatcctggctaacacggtgaaaccccgtctctactaaaaatacaaaaattacttgggcgcggtggtgggcgcctgtagtcccagctacttgggaagctgaggcaggagaatcactttcggaggttgcagtgagccgagatcacaccactgcactccagcctggcaacagagtgagactctgtctcaaaaaaaaaacaaaagaaaaggtaaattttgttatgtgtattttactacaattacaaaaggggaggtagatctccagacagcttctatgcgcccaataagaaaaaataattcaaggaaccacaaaacattagaccaaaaggcttcagagagctgacccaactccccgtgagggctggaattctccctgtactttccccatctctgactatgccgccttcaacaacctgatgtcctggcttccatgcacagtcagccaaaccagccctctgaaatggccacccactgtctcaaccctttgagctactctaagaccatcagacacacattttccacattatcttccttcagatactgaagagaagtaatgccttaataaggcacccagcgagtgcaaagcactgtgctctcttccctgcagtgctctcttccctgaggaggagacactgtcattccatctgaaagatgaggaaatgggtagttgaggggaaaatgtgatttttgcctatggtcgctctgtagacctgagtgtcaaaatatagtccaagcccagagctccttcccccatgccatactgcctccccaagacaatccccttgaattctccttttttcaggttaaatggtgacaagagaaactgctactatttttctgcaataaacattgtcaaactactgtcagaacaaatctttttatgctgttgatgccccaagcagaacccagccaggcagatatcagagttgaccaggtctgatttcttccatgttttcggggaaaaggtatcggtcccattctccctggatctcaagtcacacaaaatgccctcagcaaacttctaattggttcatacaaaaaaaaaaaaaaaaaaaagttaaactggacttcatcaaatttcaaaacttttgcacttcaaaagaaaacattaaaaccacgaaaaagataagccagattgaggagaaaataactgcaaattacatatctgatagaggacttatattcagaatatgtaaaaaacctcttacaactcaatagtaaaaagacaagcaacccaattaaaaagtgagtccaggatttctctgaagatacacagatagccaatcaagcatacgaaaagatgttcaacatcattagccatcaggaatgagatgccacttcacacctgcagggatggccagaatcaaaaagaccaatgttggcaagaacacggaggagtggaaccctcatgtgttgctggtgggaatgcaagatagtgcagctgcttttgaaaacagtctggcagttcctcaaaagattaaacacaagaccaacaatctcactcctacatagccaacagaattaaagatctgttcacataaaaacctgtaacgggccgggtgtggtggctcacacctgtaatcccagcactttgggaggctgaagcacgtggatcacctgaggtcaggggttcaagaccagcctggccaacatggtaaaaccgaaaccgcatctctactaaaaatagaaaaattagccggtgtggtggcaaatgtctgtgatcccagctacttgggaggctgaggcaggagaattgcttgaacctgggaggcggaggttgcagtgagctgagattgtgccactacactgcagcctaagcgacagagcaaaactcaaaaacaaacaaacaaacaaacaaaaaaacacgacctgtaatgaatgttcatagcaacattattcataatcgccaaaaggcttgaggaagccaacatccatcaactgatgaatagatgtggtatctccatacaaagaaatatgattcagccacaaaaaggaatggagtgctgcacatgcaagaacacagaaagaccttaaaaccacactaagagaaaaaagcccaccacaaaagtgcatatataatatgattcaatttatatgaaatgaccagattggaaaatctagagacaggtctttaattcttacctgtgggttgggtaagaactgagaatgaactataagcaggcaggagggacctcaatgggaaaacggccctgttctcacactggattgtggtgaaggctgcataactcaggaaatttaccatgaatttgcattgaattatattttcgcaaggggtaaactctaaaaaactatagcccaataaagtttttttttttttttttgaaaaaccacaaaaacaaatgtaattgggctcagccatccctcagatacctctacccagaagccccctgccaagggcctctctctttgcttctcagagaagcaaagagaaagggtcaagacagggaggggaaacagcagaggaggggcatccggcctgaacaactccatcaggcagaacaggaaagccgtctaggacccatgccctgaccccaagtccagggcagatttatccagactcctcattccttctacagcctacagcacatgcagtctcatcgttgggggtggtactgataatagcaaagatgcatccagtctggagtgcccttgaaagcctctcaactgtctgacatcctagggacggcaggatgccctgcacagtactctcacacatgctaaggctgaaaaggcacaaaaggagcatctccacgaggctcctgggcattcacacaattccgctactgacgttatctaccagatcgcagctggaaatgcagagtaaggcaggggtagaaatctagccttgcttatgcgcagagcttactccactctcctagcattaagtcttgctaacttatttatttatttatttttgaaacagagtttcactcttttcgcccaggctggagtgcagtggtgtgatctcagctcactgcaacctatgcctcctgggttgaagtgattctcctgccttagcctcccaagtagctgggactacaagcacgcaccaccatgcacagctaattttttgtatttttagcagagacggggtttcaccctgttgaccaggctggtttcaaactcctgacctcaggtgatccgcccacctcggcctcccaaagtgctgggattacaggtgtgagccaccacatgtttactaataaacaagaccattcctaacaaagggcatggtgcacattaggtacaataaatgtttgctgattgactctaaaactttatttatcagatccctcctcccccatgcacctttcctttgaaaagttactgggaaacactgggcttcctgcttcctgtctttttgagttggagtattccagattagagacccctacattctctggggtgcttatggagtcggggcttatcctcagcttagggtctagtctttccaagttacatgcagtaagttaaagagacctgtgtcatggctctgtaaacctgtctcctcagaaccctggatcaagctgtgctcaaaggcaagaatgccatcgattcatctgctcccagctcccaaagccaggccaccaggcacacaatgggctctctgcaaaactatctgctgagtccagggccttgaatgaaattacctttccatgccatctccaatgagctcctctccatcctcttcttcctccaggggcccctctgtgcctaggagcccctcggactcatcctcaaatggtggaaggtcacggccagggctggaggtgagggcatcagtacgccgggagcttcggccagggctggaggtgagaggatcattgcctcgccgacgctgggccgggctggatgccatggtgaaggattccgatgattcctgcaagagaaggtgcggttgtcagaaacctaggaagctggtgaggcatgatacagcttcctttttaccatcaggggccttcccttctttctctccacctgtgactcttgtcctccaacacaccaaaccccttccagcctccagatctttgcccttgctgttctctcacctggaatgctctcagctgagcaatctgagtcagtggcttccaaacaaatagaagccagctcaaatatcggggtcacccacatcaccgtgctttctccatgaaaaaccactgaggttatgtcatttgcctatttacctgtttactgtctattatctccccttaagcattagacctatttcagcacacacagtgcgcaaggtattgtgatagagatggcatagaagagccaccaaaacaagaggtctggaactcagatgtggaacagacagtatacaagacaaagggacaagaaggtaatacaaaagtaagtgtagtgtttggaacaaggatcattgggaaattaaaaaaaaaaaaagtttaaaggagtgtagtgaaatgggggcctgtcttttgtacgctcagcgccacacagatggcgcccaataagtatgtgtggggtgaataaaggacagaggctgaacgggccgagctcgccttagggagcccagggccccaggtcagtggtaggtaggcgagtcgcctcacgcagggtgcaggcgagaaagtagctgcgccccagagcctggggcccagcctcacccagagcgccgccctgggccggggccagagtacgggaagcgcgcagcctccgcacccatgtccccggcgcccgcccgccacgcgccagcgcgctcaccgccatagcagtaccacgatcctctccgccactacagcaacaaccaggtttcgcgcgaaaagtggttcacgtgacccaccaaagcccgggaagagccctacggaacgcgacgtcatgacgtcggcgtccactggcgaccagaagggacacggaggggcgggccagagggtccggtcccgcctacaacgcccgaggcgctccgcccagagcccggaggtgtgcggcccggsgctgtgcgcgtgcgctcgcctgcgctgtggtgggagctggagcggaggtagaagctgaggctccaggggacccgacgacacttgctggctgcgtgacctcggtcacaccagggccattttgctgacaagacaacagaggccgggcgcggtggctcacgcctgtaatcccagcactttgggaagccgaggtgggcggatcacaagctcaggagttcgagaccagcctgactaacatggtgaaacccagtctttactaaaaatacaaaaattagttgggcatggtggcacgggcctgtaatcccagctactcgggaggctgaggcagaagaatcgcttgaacctgggaggtggaggttgcggtgagccgagatcccgccactgcactccagcctgggtgacagagtgagactccgtctcaaaaaaaaaaaaagacagcagaggttcagagcctggttttctgacgcttcttaccgtcttaggagcacaatggtttaacttctcccaaagctcaaaggctcaatacttcaagcagctggacaactctgggattttgtaggaggtcacatctgaggctttagtaggagttatctttgcccaggggagcgaagacgcagggaggatgttacagatagaaggatgccatgtgcaaagctgcagaggtcatggcagggcccggatgtgcaagcccctccctaagaactaaccctaggagcttatgatgccgggcaacagacaagacttgagggagagaaaatccggatcaaaaaagagctagatgtttttctagagagtttgactattctgtattctgaaagcaatggaaggccatggaagcattttgagcagggtgagacgtgaactagtgtgggttttagaatccctctggctgctaccaggtggaagtggattgaacgaggttgaaggcagcaaacgaggaggttgctgtggttcttgtctagttccaggcagccttagtgagcagaggcagggctgaatcgcaaccctcttagccaggcactttgtgcagtgaacaagcatctctgcctgggacccagggtagggaggcaggagtgatggagagaactggaaatacaagatgtttaggaggtggaatcttttttttttttttgagacagagtcactctgtcacccaggctggagtgcagtggtgcaacctcagctcactgcaacctccacctcccaagttcaagcgattctcgtgccttagcctcccgagtagctgggattagagatgcacgccattgtgcccggttaatttttgtatttttagtagagakgggatttcaccattgttagctaggctggtctccaactcctgacaagtggatccgcctgccttggcctcccatagtgctaggattacaggcgtgagccaccacgcccggccaggaagtggggtctataggtgttggtgattgaggacagcaaaagaggcatgcaggatgacaccaggatcctggcttagctaggtggatgatagctgagataggagcgcacaggaagaccagcaatttaagggggaagaagatgagtttgtttctggctgtgctgaatttgggccgaggggacatatccaggaagctgttggatatccatgtatgggactcaagggcgtgtttggactgaagctgtagattgccttgggagtggttgtataatccagagtgagtgcagggagatgagaaggtctaagcctgggacctgggaaaccccaacagttaagagacaccaacaaaggatgtgaaggatgcacctcggatgctaggagctgctgacaggaaagctgaagagactctgcatgggcttgtgttatctattgctgcataaaaaattatcctgggatggccaggcatggtggctcacacctgtaatcccagcactttgggaggctgaggcaggtggatcacctgaggtcaggagttcaagaccagcctgaccaacatggagaaaccctgtctctattaaaaatccaaaattagccaggcgtagtggcgcatgcctgtaatcccaactactcaggaggctgaggcaggagaatcacttgaacactggaggtggaggttgcggtgagccgaaattgtgccattgcactccagcctgggcaaaaagagcgaaactctatctcaaaaaaaaaaaaattatcctgggatttagcaccttgaagcaattagcacccactgtctcggtgtctgtggatcagggatctggacacgatgccactgggtgcctcttcttcaaggtctttcaaggctgcaggcaaggtattggccagggctgctgtctcctctgaaggctcatcttcaggaggatccccttccaagcttcttcacatgataggattcaggtcctcataggctgttggactgaagacttagtttccyactggctcttgggtgggggcctctctacagagcagcttacaacctggcagctggtttctttcagagcaagcgaacaagagagagaggccatacaagacagatgccatgtcttggaagtgatattcctttacttttgccatattctcttagcgagaagtgagtcctgaggtccggcccacactgaaggagaggagatcctagcagggctggggattatcaggagccctcccaaaggccactgaagagagcagtcaagatggtggatggggtcagctggctgcccagaggtcatctgataaggactaggagctgttagtggccctggcgatagcagatctgggctggccggtgtgtctggagtcagacactacattgaagtgtgttgacaggtaggatgcagggaagtgagaagggtgaatgtgagttactagttggaggctggagtgcttttatgtcacccaaagatgtatgggtcagagaggcattcccaggtgtggaatggactgtgagagctgggacaggcactggagtgggatatggctttttctcagatgagaggttcttggacatgtttaaacactggttgggggcagggtaggagagacagaaaggtgggtggggtgagtaggcagcctctattatggccctgatggcccttgccttctggtattcacacccttgtgtgatctcctcccaacagcataggacagatgtggttggatgttactttggagattcagttacaaaaagactgcagctttgctcactctgagagaaggcagcatccatgtcttgaggacactcaggcagcctgggacaggcttggggagtgaggagctgggaccccagccaacagtcatgctggacttgctccaggacacatcaccttggggtttgctcttcccaggtcagtaggcatccagcgctggggcagctgcttcaggacatcgccgaggacaagtctcctccccattctggttccaccatctgtagcctgtggctttcatcctcaagggctccatgcgaccgctgcacatccaggtactacatctgacccatgtattgagccagctcagctgtgatcaagcgcagcctttttcctccgtaagaactgcccattggcgtagttgtgaactgaggcagaggagctgctgtggcagtggtaggtgatgtggatgtacaacggattgcttacagtctcagtggattgctgctaggcccacccacctgaatttacatattagagggcctgacagaacccagttcatgaggggcagctctggcctcatggtcacttgatgtcccctagtcatctctaccagggtccagtagcctggcagagctgctttgtgaatggtgtctagttctctactatagatgacctggtcttgctccagaaccctagggggtctactttgtggtttttcccaccagagcttgctgtaagcttcacacagcatatcttcccaccatgtatgcctctagtatcatggggtctgtgggtcccatagcctgagggacagcctttgatgtcatgtgacccagagatatgtgggtcagagcagcactcccaggtgtggaatctgctacctccagaacccaaagaggcctctaagcattgtgcttgctcttctgtgatggagtgtgcagggggatgttctggtgtgccccacaccaccagacccctacaaacctcactgatgtggcaagcccctaattcttcatagggtttaatcttctgcccgctggagcacatatgtctcatcaagttttccatgtacttgtcacctcctgctcatccatcctgattagcacattgtcattgacaccatgaaccagtgcagtgttctgcaagacgttcagatggcccagtctccttcagactgtgatgacaaaggatgggaaaggtatcattggcctggggcaagaccatatgtgtgtattgttggccgttcctatgagtgcaaatggtccctgatagggatgaaaaagtgtggtgatcagatggcccctgagaagcgggggccgtgctgatctgtctgtgctagcaatgcacctgcacagcacctgtggtcagggctaccacttggctgaatctgcaatagtccattgccactctgtttatttttataaggtcagactgatgaattaaataggtacatggtgggggataccctccacacgtctttggtcttcaagggtggcaccagtctccgccattttctctggtgtgtgatgttgtttatgtgcttgctctcttggccggggtgggtggtggtgatagtggggtctcagaggctttcacttgacttttactaccatcactctcaccccatagaccaaggaaccagtgcaggcattttgtttactacacaggatgtctatcccagtgatatattgagcttgatcttgatggtcctatgacagttgcacccactttgcttctcacgcctaagcactaccatctggcgtctgttatctggggattgctgtcatccccatggctatcagggagcccagttctgtagcagcatctcctactgtcagccgtggccacccctgagcctgctgtagggtgatgaagaacctgagagtcagatctgtttattaagctactattcatttaatgttgcagatgccacgctctgtcctgtgtgtagtggatactgcagtgaattagccactgcctcagctctcaaaggcagatacctttggttatttcacaaatacaacaaaatcccacagaaacttagatatggggttcaaaactcaagagaagaaaatgcagaattctccaagtctcaaaaggcagaaaaataaaaatagagggtttaagattcttcctggggcctgaaagcttaagatgaataactcctcccttctcaggcccagttccaaggtgcaaggctacttgtgccagcaagatagcagaagcaggacaagagctggctggaagacacctaccgtggtgggaagacatgtacccgtgaagatcgagaaagagtccatccgggtacaacgtagcagttacgtcagactaggacacttcctgtttacaggagactataaaacctttgccgcgtcctcacttggggctgatgccattttaggcctcagcccacctgcacccaggcgctcattaaaacagcatgttkcggccgggcgcggtggctcacgcctgtaatcccagcactttgggaggccgaggcgggtggatcatgaggtcaggagatcgagaccatcctggctaacaaggtgaaaccccgtctctactaaaaatacaaaaaattagccgggcgcggtggcgggcgcctgtagtcccagctactcgggaggctgaggcaggagaatggcgtgaacccgggaagcggagcttgcagtgagccgagattgcgccactgcagtccgcagtccgacctgggcgacagagcgagactccgtctcaaaaaaaaaaaaaaaaaaamaaaaaaaaacagcatgttgctycacaccgcctcgtgttgtgtgtcggcgcgctcgcagggttcgaaccgatacaagaaccttacagagggtagttattaggcctggtcacacatgtcccatgacttctacttcctggcacatggtagggtggcagtttcctgccctctggaggctagaagcggtggccaattgaatgtgcgtgagagtgatgtgtataactttctgggaggaacttgaggagccactggattccccacggctcattgtggctgtggtcattcgtgattacgcaggccggcattgcccagcctctctggcgaatatagaagcctaaacttaggtatgcacatttgggtgtggtccaggctgggaaagtcccagaggatcacaaggtggtttcttccccaatctccctgtgtttttaggacaggagcaaggagaagaatgggacccaatctcattccagcccagcggtgctgtcgcaaggtgtgagtcttggggtgcctgtaataactgagtgcctacaatctgcacgaggctctgagtcagcctcaggatgctgcaggggacatcctgcagcttggctctcttggctccatcctcatgacgctggaattctataatagggtggggagactggacggggaggcaggtaaatgaaaacaatcaggtgagaattaagatgctcggaaggaaatgagactggacagccgctccagcgagggtgtccacaaaaccctctagaggacatgatgtggcaaggagccagctctgcgggggaacaggtgtagagccaggagcaggaacaagcttggaacagccgagggacagaaacagagacccgcatggcttgagtatggtgaatgcagcatcgatgccaggggataagacaggcgcaatcagggagggctttccagaggaacaggcgtgaagaactgtggaagttagagttggggagaggcgtcctggctgtgtcgcttcctcattgcgcggctttggtcaagttatttgacctctccaagcctcaggtggccctgtaaaaggtgactataatgactgcctagcagggttgctaagaggagtgcccgaggcatggcggcgccgcgtggagcagggcgctgggaggcggcggccctgcggcgtggcgcggctggagcgcgtggcgccggggagggtccccgacacgccttcccccaagctgaccccaggtcacccctgcagggcgcccgaagcgcccgcacgcgagggggcggtccccggaggctccgccccgacggtccggccgcggcccaggccgggaggtggagcgcggctgccgccagctggtccactgacaactgctgccagctggaaggcgcgtagggcgagaggtggcgcgtcctcagctttccagtcttcgattccgcccgctttccgagtgagaaacgcaggcctctctcttccgtgaagcagcgtcttgtctctgcacctcctctgtgctgtctctttaagaggtcagcgggctgctccgcctcttgggaatttgattggtctctcccacttttttttttttttcccccagtgatgacttattcctataggctgctggaggttagagggcgggcctgagtgataacagggactctgggactctgggacttgtgggactgtggccgttttcgcaatttgggctggacgaaaaagacggtcttgctttcccggtcgccgctgtcgggaagggctgcagggtgtccgcgagacccgcggcccggcgagctgaccccgcctcgcctttcctgcctagccctcattccacggagccggtcgcgcccggtccttgcgcgacgcttcccggcccaggccgcctggtctggcgctggaggccggagtcccgcggcctgtgctggatccgcgcacacccagtggcggcggatgggcggccggggcggccggggcggccggtcctgagcgcggcccgggctgtcaggtaaggaggggccttctccccgtctcctgccgcagctagagggggagccccgtccctcgccccggcgggaagcccagccgccgttcccctccttgctccgcgagcggcccatttccgctcgggcgcagctcggacggccaaggcggcgtttgggagggaaggccctggatgtgggaacccacgggaggggtgccgggcagtcgggagtcgctcggggcgcgggggcacgcgaggcccgggagggagccgcacgtagcggcgtcgggctcggccccggctggaggcagtgcgggtggagatccggacctcggcgacccggtccggcgcggggtggcggcacgggctccagccccacggtggctgcccgcagcggccgaggtgctcctgagccaagcctgccgccggttcggggctttgctgccccgtgagggggccatgtcgaagcctccgctccctctggactcsgggaatgcaggtgggggctggctttgccctcttctctgcagtgaggaggggccgcagggtcgtccagtccccagcggggcttggcggtgctggagattcagttgttcccgtcayamcamcctgttgagggctcgtgtcgtgccaggccttgttctaggggaccgagtcctgagcactcccgggatagagagtagtaaatacccagacgcggctcgggcgctggagacagctgagaagggaaggcttctcagaggaggtgtcaggagagagctgggggagagccagcccaaaggccctgaggaacggaccagctcagcaggtggaaggcaagcagggagggcaaggtgcaggtcagattgggcccaggcctccccatcttactggggtctccggcttaggacagggaccacacgcctgccagccccaaggccgaaggacaacaggggagagcaaagtaacttacttggcctctgccctatggagccttccccaccttgtcacccctgggctccaccccttctcaccacccttaggccctagggtttgtaagctcaacaacccgtcggtgtgggaagcactgagggcccctctccccagggtttcctatccggtagctgtgggtggggtttggtcaatcctgttgcacagatgagagagcagggaaagctgagtcccagagaggagagagaaggccttacccagtcgttctcagcgggtcctgcattgcgtgaccatgacctgagcctagccagcatcctgtccctcaactgggtgggagggagggaggcagaggcccctggaatgttgtgagtctgggagactcctcccaggtggaagaaacagtctgtcccagtttccctgttcctgggaggcctggggttgcccagggtgctctgcaccgcaggaattcctcctctgagaatcacccctgggctccaccccttctcaccaccccttctcaccacccttaggcccctatcgtgagctgaccaacccctcccacttctttgtcagtgcttgggagcatcagtctaagagaactaagtagagaaggctgaggactgaccccttctctgcctctcctctcctctgtataaggggacagtaattgtcctctctcccttagaaggcgatgccattgttaagtgtgtcaccacgtgtaaagcactgagcaccatgtctgcacataggaagtgtgcatcctattaactaaaagtcagtgcgggccaggcgcagtggctcatgcctgtaatcgtagcactttgggaggctgaagtgggtggatcatctgaggtcaggagtttgagaccagcttggccaacatggtgaaaccccatttctactaaaaatacaaaaattagccgggtgtggtggtgcacacctgtaatcccagctactcaggaggctgaggcgggagaatcgcttgaatccaggaggcggaggttgcagtgacccaagatcgcaccattgcactccagcctaggtgacaaagcgagactctgtctcaaaaaaaaaaaaaaaaaaaagtcagtgcttcagttatttcctaagctttgatacgtaatggcaatcctggtatggccagcagccccataaccccagtgtggttgctggatcaagtagcagcagcaggggcaccacctgggagcctgtgggaaacacagactgttcagccctacccctgcccttgggagcagcatctgcatgttaacaacaccagggtatttcccacatcaggtctgagaagatagctctagaacaagcctggtgctcttgacccacaggtggagaagccgaggcctggagaggggcacctggcaagttgttgactgggggcctgggctctggagacagacagcctggattgctggcctggcaagtggctgcccctctgagctccacgtgcacaatgcggataacataagtacctccctcccagggttggaggccagggctcagaggttaggcacagaggttactacgttgttggcaggggagtgggggcaggcagagcagctgacacctcctctgtgtttcctcagaccccacagcaatgggggcttcacaagaggtccatggacctgggaaccaattcctttccctccttgcccttcagtctcttctctggtaatcccagcaacttgggaggctgaggtgggagaattgcttgaacccgggaggtggaggttgcagtgagccgacatcgcgccactgcactccagcctggacgacagagcaagactctgtctcaaaaaaaaaaaaaaaaaaagaaaagcagcaaccacctttgtacatgtgtcacttttgtagatgtttacatccctggttttgtttgatccttacggcacccttattaggcagatgttgtccccatgatacttggagggggagtgactcaccccaggtcacacagcaagcacgtggcagaaccagcagtgcagccccgtcttgttgactccaaaatctgtgttagctggaggtttttcactggtgaattagagaagtcagactcaaactggcctaggcagaaaaggggatttgttgggttttataactgaaaagtccaagcgggtaggactggctttggatgtggctgaatccaggggctccagtgagctcatcaagatctgtctccatccgtgtctcagctctccactcctccgcgtcggctttactctgaggcgggtacctgagcgtgaggtcaaggtggtacagccctgacttactgagctcagcagagagtgtttcctcaattgtcaatgagaatctgccctgagacttttgctctaataatttattctaataataatttagatcaaaagcctcagggcagattttcattggccagggtgatggaacatcctgactagccagacttagatcacaggtgcattccctgggttgtgaagggttagtcacgcatccctaaacttccagagagtctagagtctgggagctgagtttccacctcaggaaaacggtgctcttaccaactggcagcagcctggatgctgggcaggcaaaaccagaagcccaccccgccctccataccctggactctgcctgactcccccactctcctactccctgcccctgttcctccccactggcctctgtgcctcaaggggcctctcagcttgctggtgactgctgggtgcctggcctgcaccctggccctgcccgtcttggggctgcgtgacattccattctgggtcagagttggtgctgggctgctaggaccaggcgttcactctgcctggcttggctttataataggggtggggatagctggtcatggtggcccacacctgtaatctcagcactttgggaggctcaggcaggtggatcacttgaggtccagagttctagaccagcctggccaacatggcaaaaccctgtctctactaaaaatacaaaaattagccaggtgtggtggtgcacacttgtgatcctagctacttgggaggctgagatgggaagactccttgaacccagaaggctgaacttgggaagcagaggttgcagtgagctgagattgcaccactgcactctagcctgggtgacagagtgagactttgtctgaaaaatatatgaataaataaataatggggtggggaggagagggctgtagaatctccctccttcatcaggtcactgatactctcaactcaaagttacaagttattatctcatgccaccagaagtcatgcaggaggcgcgctgcacacccgcttccagctgtaagctcctgcatgctcagcgtggtggcccagtcctccaggggtgcaggaagacagttctggacaccccacacaggcacagatccccccrtgaggcatcacatgcctttgcctcaaccaactgctggccaggagcagaagggccacccttcttgacttcgaccagagccactctgcagggcatgctagctgtaggggaagacagttagttactcatttggcagactgtcctatgcattgcagacatttggcagccctggaccctgcacacaaaaaaatccacagtcctccattccctagcagttgccatgtcaaactagagcagtgctccacaccggctccaccccagagaccattggctgaaattaatggagactcaacttctggtcctggggaggggcccctgcttgaacactaggttttatggagggatcctgaacaaaatagtagcttgttagtgaggaagaaggggacagtgtctggtggtcagtgttggcctcagttgcaaaacatccagtgactcaggccagaaactgcaccatcagccgtctttggcctcttctctcattccctgtgtttgatctgtcagtgggtcttgttggccaagcctcccaaaggtctcccaagtccctctgttccacctgcactgctgccactagtgcaagcctctgtcctctcatgcatggactgttgcaggagctcctcatggcctccctgtctctgttcctcctccacttcagtcccttttcactggcatcctgtccccatggaaaccagacctctcactccttgtaacacccttctggttgcacttagagtgaagtcgagttgcatgtgggacctggccctgccaacctttctggtatcagctaccctggcctgttttttgcccttgggacaggccaaacctgtttctacctctggacttgtgcatctggatcttaggtgattctccctggaatgttctttatctcgatctttccaaggctggctcctgcttatttattgagatctcggctcaaaatgtcaccttgtttgactacccagtccaagcagtacctttatattcattgggatttgggctagctgttgaaacaaaggctaggataataaaatagattatttttatctatgcaggcagcctctgtgcaagctgtccagtacatgcacggaggcctcattgtgctggggacccagacaccttctttctcattgctctgttaccctcgtacagggtttctgcctcgtggtctgaggaggctgctcttgctcccactgtcgtatctatattccagccaccgggaagggaggagggcatgatctgaaattagcagacctcactctgctcgtgtcatatgtttataacaaaaaaaaagttctttttaaagacaagtcagggtttttatctttgttgggcctctgttttagagtttatgtcttcacaccatgggattagatcaaatgacaggctgaaggactgtcagcctgtctcagctcgtgtccagttggataaaactcagccacatggccacacccagttgcagggaagctgggaaaggtccccattgtgctgggaagcgatgtgtaagctaaactccattggttccatcactaaagggaagggtagatgttgggggaacccagcagtctctactgtgtttcttgtcattctgctccacctctctgttttcttcacttagcatttatctttagaagtttgcttctttttttttttttttttttttttttttttttttagacagggtctcactctgtggcccagcctggagtgcagtggtgtgatcatagcttgctgctgcctgctgcctggagctcctgggctcaagtgatccttccacctcggccccaccgagtagctaagactacaggtatgcaccaccatacctggctagttttttaaactttttgtagaaatagcgtcttgctgtgttgctcaggctggtctcaaactcctgggctcaagtgatcctcccacctcggcctcccaaagtgttgggattacaggtgtaagccactgtgccctgtcaagtttgcttttttttttttttccaagtttgctttttaaatagggttttcatgcttgttgttggcttcaccttgctgtgagggcagggccttgtctgctctgttccgtgccacgtccaaccacctagacttgtgcctggcacccagtaggtgctagttaaggtctgctgagcaaataaaagcacgtgtgggctgggcatggtggctcacacctgtaatcccagcactttgggaggccgaggtgggcggatcacgaggtcaggagatcgagaccatcctggccaacgtgatgaaaccccgtctctactaaaatacaaaaaattagccgggtatggtggcacrtgcctgtagccccagctactcgggaggctgaggcaggggaatcgcttgaacctgggaggcagaggttgaaatgagccgagatcacgccactgcactctagcctggagacagagcaagacaatgtctcaaaaaaaaaaaaagcatgtgtgaatgaagggtgggcttctttgcccccctcccaacagtagggaaggagccatcttctttcttaggatctactatgtgtcaggcatttgttctctttaatattccccatcacttgaagattgcagctatggcctcattttattatttttaattaattaatttattcttttttgaggcaaggtcccactctgtcacccaggctggagtgcagtggcacgatcatagctcactgcagcctcgaactcctgggctcaagccatactcccacctcagccttcctattagctgggactacaggtatgcaccactatacctggctaagttttgtgtttgtttgtttctttttttttttttctgagatggagtttcactcttgttgcccaggctggagagcaatggtgtgatctcagctcaccgcaacctctgcctcctgggttcaagtgattctcctgcctcagcctcctgagtagctgggattacaggcatgcaccaccatgcctggctaattttttttttttttttttgagacggagtcttgctgtgttgcccaagctggagagcaatggtgtgatctcagctaaacgtaacctatgcctcccgggttcaagggattctcctgcctcagcctcccaggtagctgggattacaggcatgtgccaccatgcccggctaatttttttgtatttttagtagagacagggtttttccatgttggtcagggtggtctcgaactcctgacctcaggtgatccacccgccttggcctcccaaagtgctgggattacaggcgtgagccaccgtgcctggccctaattttgtattttttttttttagtagaggcggggtttctccatgttggtcagtctggcctcaaactcccaacctcaggtgatccacctacctcagcctcccaaagtgctgggattacaggtgtgagccaccgtgcccagcctttttttttttttttttgagacagagtcttgccctgttgcccaggctggagtgcagtggcacgatctcagctcactgcaacctccacctcccgggttcaagccattctcctgcctcagccttccaagtagctggcattacagctggacgccaccatgcctggctaatttttgtattttttagtagagatggggttttggcatgttggccaggcttgtcttraactcctgaccgcaagtgattcgcctgccttggcctcccaaagtgctgggattactggcatgagcctccgcacccggccaatttttgtattttttgtagagatgaggtcttgctatgttgcccaggctggtctggaactcctgagctcaagcagtcctccctcctcagcctcccaaagtgttgggattgcaagtgtgagtcactacaccctgctgtccttactgtttagatggggacttgatcccagagccagtgagtggcccactggagcaacctgagccccagcccatggcccgcccccttcagagtcttccctccctttcatccagaggtgttctggtgtttaagggcttggaccagcaatggaaatattcctaagtccccccacccctgtcttgggctgctattgttcagggatagctttggtgacaacacaagcagggctcctgttgcgtttctgcagaccttgctgacaggcatgcagctcactgggcggctccttgctgaaggggaggcctgggcctttgatgtgttgtcgggacaaatcttttttctttttcttttttttttttttttgagatggagtctcgctctgtcgcccaggctggagcacagtggcaccatctcggctcactgcaagctccgccacctgggttcatgcaattcttctgcctcagcctcctgagtagctgggactataggcacatgccaccatgcccaactaatttttttttttttttgtattttagtagagatggggtttcaccatgttgtctaggctggtcccgaactcctgagctcaggcaatctgcccgcctcggcctcccaaagtgctaggattacaggcatgagccaccgcgcccggccacatcttttttactttttaaaatttactgaagtacacctatgacttaggagtcatcggtgtgtggcttgatgaattaccacacagtgaacacacctgtgtacccaccacctggatctgacacccagacgctggcaggcctcccccaattaccatgcgcttcatctccccaaaggcgccctgtctgcatttctccacggatcatacgcctgtcggcccttgtgcctggcttcacgctatatcacttctgagagtcattcgtgttgcctgtagcagtgggttgttctttttatgctgtgcaagtgtcaaccgtaggaacctgccaccatttatgcccatgctctggggctgctccccgcctggggctgtcatccacagcctttacaagcattcctggtgaagcagagtcacaggcatctggcccaatctgttcaaatcattctaaatgttggcatctgttacgttctggtgccccaggccacacctggatcaccccgaactccctgcggaagtacctgttgctgcctcctgagagtcctctagcttaggagtcttggttttccgaccagaccctcagtcccctaaccccagagtggttcccaggaccccagaccaccagctctcctgtcttccaggctagactcgacctctcatgctcagagtgtcatgtggacctctggcctatggacccaccctgtccctggcttcaccctgcagcgtggccattgcagacacacttgccttgcccctctgtggtacagcctcttcccccatgcccatctccagttggagacctcctgtgcatcttctaggcatggctcagtgtcccctccatctttgtctgtggtggcagagggagacaagggccagagggtgcaaccgaggagggcatggtgctcagctctggccctcagcagcgctgtggcctcacacaagtcagtggcctctgagttctgcatggtgtggcaggtcagaaccatggctgaccgctaccaagaactcctcacgtgtgtgccttgtttgaggcactcggcatcaccacagcctcacttgttacacccattccatggtggggggacacaggcacggagaggacaggaaggaaggggcagggctgggctktgaacccagagcctatgctcttacccacgctgctctcatgggccctcaggactgaaaggagccaagtggctgtgccttgcacatggagatgcttagctgagggggtggctttgttagactatttgcaggtygtgagatagagcctgagatgggggactgggcccctgcctgggggattgggtcgtgacctgtgtggagccccacactgagctgcagtgggtggggagggtggtttacaggggtgctctgtgcagcccctctgattttcccctgggagtcccaggtccaggggaaggaggacagtggcccaggccacacagctcactgggcggctctcactccyccagggctggctgctggcgggatggacaccctggaggaggtgacttgggccaatgggagcacagcgctacccccacccctggcaccaaacatcagtgtgcctcatcgctgcctgctgctgctctacgaagacattggcacctccaggtgaggcagtcacaacgctgggcaggctcgctgagtgtcagtggcttttcctggtgtaggggggtggtgagggtggggcagattgtgtcttggagagggggtgcatatgtggcctcgccagtgagccagctcctgtgcccatccgccagggtccggtactgggacctcttgctgctcatccccaatgtgctcttcctcatcttcctgctctggaagcttccatctgctcgggcgaagatccgcatcacctccagccccrtttttatcaccttctacatcctggtgagttcactgcagttgacagaaaagccaactccaactgggttaaacaaaaagggaattaactgcttctataatgaaaataagcttcaggtatggctggatccaggcagttaaatgatatcgttaggatctgtttctgcatctctgatctctttgggacttatctcagatgagttcccctcatatggtgtcaaagatggccaggagcaactttgagctaacatcctgcctctacaactcaggcaaacagtgcctgtttgctgatagtgccagtgtagacctgggatttcctctgactggcccacctaggatcccatcctcatccctgagccaagcactgtggctagcaaggaaaggggcactgtgaagctgggagggcagcatcagctcagctggaccatatggactgagggagcccacaacagaattggggagctggtactagaggggaggggaatggatgctgggtggggaaaatgcccactgcatcctccatccattcgtcccccatctgtccattctgtgaaacctctttggagaagacatcttacttgctgggagagcctgcattgtcaccacttggtggtcctggcacgtgttgcctggggagaggtgtcagggctgtggttgagaaggcagctccaaatgtgggctctcctggtataggctccaggtgtgggctgtcccagtataggtgccaggtgtgggcttcaggtgtgggctgtccaggtgtgggcttcgggtgtgggctctccaggtgtrggcttccggtgcgggctgtcctggtgtgggcttcgggtgtgggctgtccagctgccttccttcagggcgcccttcccctgtctgcagggcctgcctgactggagtcctcccttctctgtggcccttagataccaccacatgagagctgagtggctccctggtcccctccttgtggtctagcccagaacttcccagtcagaggagtgggctgtgggcaggcagagagacagacaaggggctggggaagcctggaggttgtagtggcctgatgtccctcacacctacaagatggtggtagacaggactgggaactgaggcctgctttctttgcttctctcccactgcttctctcaccatttattcatttgtgtatttattcaacagatattaaacacctactgtatgctaggcagatgtccttttgtggggtaagggggagtgcaggcagggagaaagagccagggctaaatgtccaggaacatataacagggcccagcccatcaacttttggggactttgtcctaaagagttcaggaggcagtgttaagagtggactcaggaagtccagctctgaaccccagccatgctgctgtgtgacctggggccagtggcttggtctctctgtgccccagtgcccttctgcataacagatgttgatctgctttagctatggtgttcatgtgagcacctatgaagtcgtctgcatagctgcagcccagtgggagcctggcatacagtaggcgtgtggtagtttgttgcttttactgcctgccctgctgacacaatttctcatggcacaaaagacagagtatatatggatctgggcatgtgtcagaagacccaactgagactcacagaagccagtttttgactgagaaactgggcagttcctgggcctcaggcacagcaggatttgggggcacagcagtgctgctggggcaccatctccatctcccactcagcctgggatctccccgatggccctgctctctcgccatctgcccttgtggcagcagggtggtgtccatggtgccaggcttgcatgctgtccgtctgcctttcccagcagccccacctgacatcctgggtctctctcacaaggctcccttggggcctatgcccttccctgaactagccctgaggccaggggaatggcacacaccactggccagtgctgcgtcccaggcccatccctgaagccaggagcggtggactcagcctcacctggaaccaccgaagtgggggtgagaagggagaggaaggggatggatataccaggccgataagcaccacagatgctgagcaggcactttgtgaaacctgctgggctggtggcttccctagaggtctctgcacctcttctcggtgaccttttgcctggtcccgcatgcctcagaattaaaaccatgaatacggtaataacagcaaatgtatacttggcccttcctgggtgccaggcaggcttctgctgcatctgttaatccatttgacccaacaatcaaacacagtaggttttgtttctgcccccattttatagatgagaaagctaaggtacagagccaggaagcagcagcgtgctgcttgtgatgtgaacctggcccatctggctccaccatgcgcactcctgctcaccagcccaaggctgttggtgctagccaggaagctggggccccgagagggagggccaggctggaagtcacctgcagttgagggtctgcaactctgtgagccttgcttcctggagtgatccccacctccctgtgtcccaccctgactttgcgccttcctcctttccgacctcaggaatcaaaggctcctgtagatatgggggtgggcttgctgcccctgccgatgcagaggctcttgttccctgactgccacaccactcccttgcccaccaggtgtttgtggtggcgctggtgggcattgcccgggccgtggtatccatgacggtgagcacctcgaacgctgcaactgttgctgataaggtgcggctgggccctctgagggaggccagggaggcctggcctggggtgggctggggatgctggtccaggctgaygctgtgcccactctgcgtgcagatcctgtgggagatcacccgcttcttcctgctggccatcgagctgagtgtgatcatcctgggcctggcctttggtgtgtgtaccgctgggctcttgggccctggcgatgctctcccctgcccctccctggctgtgggctgactctggagtggtcacctgggctggctcctgcctgctgaccagcatgtttcttccaggccacctggagagtaagtccagcatcaagcgggtgctggccatcaccacagtgctgtccctggcctactctgtcacccaggtaagagggtgagtgtgggcaggggacgctaggagtcagggcaccaggcacccactgcttctgggtctgggtcaggtttccagtctttatcaccttcagagttctcaaaactttgcacctgagaaatcacatggggtgcttgttaccgaggcacattctggggtcccctggagatttggatccagtgggccagggcgccaggatgggaggctcaggacttgccgttttaataaggagttcaggtagggatggtgcaggtccgcagacccccctgagaagcatgcatctagaggcccctttcttagattgggggcagggactgcaccttgtccatctctgcccccttccccatgtgactcagcccaagactgggccrgctctggatgctgcaatcagttgggcaggacatggccagggagcagactggggcaggtgagttgagggtcaggccaagaggctgaacttggtgtggtggagagcttagggggctttgcatcagggaaagcccctgggagagagaagccttgagatcctctcccttcctcccttcctgcttgcccctgcaggggaccctggagatcctgtaccctgatgcccatctctcagctgaggactttaatatctatggccatgggggccgccagttctggctggtcagctcctgcttcttcttcctggtgaggttcaggctggggcagctggggtggctggggccttagggccaggtagggattggattcctgggtttctggctgtgggtctgggctggcgcccccagcaccttctcagccctgcctgtctctgtaggtctactctctggtggtcatccttcccaagaccccgctgaaggagcgcatctccctgccttgtgagcagctggccggcggctctgggacaggcggggatgggagggagtctaccgggccactgtagagctggtagctgggagctggagctgtagagttccaggctgggagctggagagccctgggtgagagggaggcctagaggggccccgggggacacaccaggcttgagggtagtaggtgctggaggcagagcctggcctgtccagggtgggacctcacgacccaccctgtccggcccccagctcggaggagcttctacgtgtatgcgggcatcctggcactgctcaacctactgcaggggctggggagtgtgctgctgtgcttcgacatcatcgaggggctctggtgcgtgggggccgcagggtgtctgcctcgtgggggcatgggaagtgggcggcagggtgtccacccgctgggggcatggggaggtgtggagtcagcatggggctaggaggccccgcgctgacccgccttctccgcagctgtgtagatgccacaaccttcctgtacttcagcttcttcgctccgctcatctacgtggctttcctccggggcttcttcgggtgagtctgtggccgccggcgcccccgcgtggctgccggcggaactgcgccttcttccagcatgggtgtgaggattgaagctgagaggctgtgtatgcatacagtgcgcatgcgcacgcacatacatacatgcacttgggcacacacatacagatacacatgcacatgcacacagatatacgcacacccacccacatgtgcatggacacgtgcacatgcacacacggatgcacaagcatgcacacatgcacatgcacacacaaacacgcacatacggatacacacgggcatatgcacacaaacatgcacgtgcacacccacatgcatgcatacacacatgaacacgtgctcaacatatacatacatgtagatatatgcacatatccacatatacatacatatatatgcacattgtatgtacagtacacacagacatactctccccacgagagagagagtgactatgcacggtgttctacattgctggtttttatttaataatatattaactcattcattcgcaagcattcattgagcacctactgtgtgccagacactgctagagccagaagatgcgaggcccacagcggatgcaaatcctgtcctcacaaagcttgtaccctgttgggggaagacttaagtggggagcaggtttggggtgggaagtcagttggattctctgggggtgagtacactgctgtgcacatgtgcatctgcagaagcgtctgtgagatgggatgctgaagacatgggattgggggtcccactccagaccttaatgtggtcggaatgtgggtgttttgtcccccctttctcacctgccaggtcttgtggggaggggatcagcctcccacctgggtgaagctgggagagggccagactggtccatggccccagcttggatctttgcacacaatttctcccctgagcctcaggctcctttttgtaaattgggtgtagtgtgtcccccttggagagttgccctgagggccgagggacgaggtcagagtggagtgggtggtaacatgagcagcaggggtcacaggagtgggggcggaggccacagccaatgtctcctgagtgcttgggcaggcactgttgaagcctcatgatttatgtccattcttcctccacacggtgtccacacacccatttcaccatgaggaagcaggcacagatgccccccgcctgagctcacacagccagggggaggagggctgggttccaaaacaagtctagrtgggctctggggtccagctcacaggcccactcagagtgggtgtcaggcgactgttggtcaattccttccttatctggtggccccatcagcctggagaggaaggctcttcctgaatcactcagtgaggcttccatgcccctcttttccttttatcagctcggagcccaagatcctcttctcctacaaatgccaagtggacgagacagaggagccagatgtacacctaccccagccctacgctgtggcccggcgggagggcctggaggctgcaggggctgctggggcctcagctgccagctactcgagcacgcagttcgactctgccggcggggtggcctacctggatgacatcgcttccatgccctgccacactggcagcatcaacagcacagacagcgagcgctggaaggccatcaatgcctgagggcagctgccagggcctgtggaggacaggycagagaggaggccagcaggcccagagtccccaggggaggaggaccaggtcaagggacgttctgtgggcagtagccctgtgtggccctgttcccaccatgagtctggaggccccacctccctggggctcccaatcccctttgccatctctgctctcactggggaccctcctccccttcccacctgctctcatactgctcagtgacatggcccaggctttccttccagggccatgcttggcaaggttggctgagggcaccctccttctytgcacccttggcacgagggcagggctggctctcccaatgcctccatcccatccccatggtgctttggcctcctcaaagcatccmccatggtggatggactgaagtgtgtatattttcttgatctattttttaataaaaaggaaaaggagcagaaggtgctaatgtggaggttttgcaggaatactggggctggttcctttcaggagcctgagggctgggtgaggggctgggaggctcagggggcctctgctcaaccaaggagcagtccccagtgcccaagccctgggctggctgctggggaggtgaagagaaacaggatcccagctgccgctgcccctgcccctgggcccatctgagtaggggggacagacatggagagagaggagaactatgttttgtgagccagcccctctccctttgtcagacacacactgttgtcttgggcagccggttctctctgctcagctccattaaaacgcagaatggacttactattgccatctgtaaaatgcggagaagacccatcctgcagggccttttgtaaggattggaaaacactaagcacgagtggctggcgtacagtaatgaacgataaggatagctcttatttttagcctcaagaatagtgcttggcacatagtaggcccccagcagacaggactcggggactgatgtttgtcataaggatgggtgtggttggctgaaaatgggagtaaatcagagcaaagcactgggatcataaggcatgagtaggggagaggggcccacttgtccctgccactgcccttgtacctgagttcggctttgagctttttggcagccagagtgaaagggagttgctgccagttatgtaatccccagagttggagaggaggagcccatccaggacacagccaactgcatgcttcagagcctggggaggtctcagccctggctgtggggaccctgaggatcaggctgttgcccgcctccgcgatcagccttttttttttaggggggaatggggtgccgagggcacaagctccaacacagctcatgtctgtggggccaatgtgtcaggctccctgggagggcctggagggttgatagcggacagggccaacagtacggccagtgagctggactcctgggctgcagggggtactgcagggtgcccctgaatggcatactttatcggggcctctcagctcatgtaaaagcctggtaatcagggaaggcaagctcacggcattctgagtgagcggggtaagggttggggccagcagggatttgaccatcagatccacatgcagtccaagatggcacagtgtcagccgaagtttgctggctgcagtgaatgagcagagaggcatcaacagaagaaaagagaccatttttataatttttaagtttgttttttaaaaataggtcatatatgtacatggcaagaaaaaaaaaggttcatgcagtacaggagggtatttggtgaacgataaatctccctgtgtggcactgaattcctctgtccccctcctgaagcacccagggtctccataaccttccagagccatcctgtgttcacaccaacggatgtgtatatcatccctctttctgtaatgctaatgtcctgtagctcactccaatggatcttggagatcattccatgtcaagtggaggactgcttcacccctgcagctacatatatatggatatatggcaatttataaaccacttcccttttgtttctgaaaaattttgcaacaacaaacaaggcaacatcaacaatccttataaatttgcttttggtaactcatgcaagtagaattgctggagcacacagtcttaattagttttaattactcttattagtcttctgcagagatcaatagttgtcctccaatatatgttgtttttctccattggaagagaatccctgatttttcgctagatacacagctgtctagaataaagactgcattttctagccttccttgcaggtgggttctggccaatggatgtaagtatgcatgcaacttccttagagataagaggtggcccttctttcctgctgactggaatgtgcttataatggctggagtgatagcagccatcttgaaccatagggtaatctggggaatggaagtttctcattgcagtgcgacaggatagagagagccggtgtcatggacactgtagtgcatctgtaacgacctcggacgtcctaccttcagatgacttttggaacgtatgagagaaatgagtggctatcttgttcaaaccacttttgatgtttctcttacagttgaacctaatctgaaccaaaacacccattccaagaggctatgccagctttcattcccaccggcacatcctcactgacgtggtatgccagtcacattttcagtctttctgaagagccctgctcagaccacgtctgtgtggtgtctgggtgcgaacaggcattaggcagaggagcggctggatgcgaggtttctggagtcttaacgtggtgacagagttcactgtatgtggccaaagtctaatctcaccttcccactgctgctgcacatggactgtggaccttgggcaggtcacagcttctccttgatcctcagtttcttcactagtggtacagggtagcaggtgactggttgccactggtatccatttttcctccctcagtaactgcaccctcatgtttgtgggtcagtgaagcacccaccttagaggtgtcaccattgagaatttagggaagaagaccttggacacagggtcctcagttgctgccaagctcagtgccagccacatggccctgaagcagcagagctctgagacctgcaggtccacccacccagagcactggagcatggtgatataacgggtgaacgcatggccagtgatgtatgggtttgccagggctgccataacaaagtactatagatgggggccttcaacaacaggggtttattttcttacagttctggaggctggaattccaagatcaaggtgtccactgttggtttcctctgaggcccctctcctgggtttgcagtcagccgtcccctttctgccttcttgagtggtcttccttctgtgtgtggggtccctgctgtctctctgggtccgaatttcctctctttatatggacaccagtcagattagattaggactcccaatgaatggcctcttttcaccttagtcacctctgtaaaggccaaatctccaaatgcagtcccctgcagaggtgcctggggctggggcttcagtgcatgagtgttgggggactgacttcagccataacaaatggcattagagcctctctccctctgacctcctgacactgtgcaagagcctgagaccttaccagatccacggaataggcagaaaagccctaagcataactgaggttaagtcttcctcctgctcagcagaatggggccatggtggaaactcagcaacattctagaaaattcctggtgtgctgtggtgggattccccccgctatgtgggactgggtcttctccaggacagccccaggttctgccgtttccctcgggacagctggaggggcatcgccctgccctgccccattagaggagggatgaggccgtgtgactaacgctggctactgagatgtgagtagaggtggcatgcatcagtcacttccaggtgggagaatttaacggccagtacattgctccagccagccacggtgatggcagaagcatgtggtaaagatagagcctctgccagcctgggtccctgagggggctcagtgggaagaatccccctgctgagcatgcactgaacatgtgaccagaaaaagaagtgaaccctaccctttaagcctccaagactggaggctgtttgttactgcagcacatcctggcatgtctcaacctctccaagggttagctgaggtggacacctgctacagtagctgtgattaatttgatttccaagtagagagagcaaggcctgggctagggacaagtaacagctcctgggctcaaagggtcaccccctcagcccctgtgtcacatgggctcattttcagactccatggatcattctgttagtttctcctccccttcatagcttccttagggatgcctgtgccagggtcataacctgaatgccctagtctttccacctcccttcagcttccagtggcctcatctctgtgctttcgggtgactgtggaggggtgaaggcatctggggaggagctagtgtgctgtgatggcacaggccatgtactaagtgtgcgctgggcacccagcgccgagctgccttctggagtgccagcctaggaagcactgtccccttccctgaccaactgttcctgctgtgccacttgcagatcaaggggccgggcctgggagagagggctgtgcccgagcccaggaggagtgagcctgctcctctcccagtgacgatggggtaggtacctcttggagcagctggtcggcctcatgggctgtcccagagatgctcaggtggcctgcacctggtgcctggatgtcagacaccatggcaccgaacccgttggcagatgggctccctggaggcctgagcccaccctctgccccaggcaggtgatcaagatgcggcaaagccagcctggagaagcagttgctaagccatgagtatgcctctcctcgatctcagaaatgccttttgagagctgcaaggggttagaggcacctgctcagcactgagcctggtgaatagacctagtgtgagtggcctagagtgagtggccacttgcttctccccatggctttgtagcagagctgggctggagactggacccacactccccagggctgcaacaactgagtgaggccaaaaggatattggtcccaagcttcccgtgtccctggggatgcgtgcgcaagttctgccttgggacttgggctcagtcccgggcacagcaaacgtgaggtcttcaggacttcccactctgcagcctctcagaggacagtctcatcttcaaagctggcaatcctgttcacacccatgggtcattcacaagaggtcattctgctaaagtcctggtaattatcctgcaagacaggtttacctatcccattttacagatgaggacaccgaggctcagagaggtgcagttatttgcccaagatcctagacctcatgggacgcagagctgggtgttaagcccaggtctgcctgaatctgcagcctgactttacccgggacgcaatacccctctcaggaggacccaggtcagtggaggggttcagggagagcaattttaccaaactgccccccttaacaacatcagatgtgaaaggtgtgaatgagaggagctggctttcacatgtcacatcggagaggaaggcaggctcatctggcactgcacatgtttttggttgatgatttagggggatatgaaagtagttctaaaccctatgttctggcagcattctaaacactcgccatgggttatacagctccactttacagacggggaaacctgagggagtgaggtcacatggccaaatacatggcggtagggtgggttttgactccaggcaatcgggctgagtccaggcctctgaccactgcgccgcactgtcacatctgacagaaacaccctcagcactggaagggccccgagccttgtttcttgggccattgcatcaaaatgaggagcctgtagccactccaaaaccagtctggaggatgtagagaaaatgccgaaaggattgctgggatgggactgagagcgcctggggtgattatagcagagcggggtctggagtgcacacctctggagcatagaactaactcgtttccactcctagctctgccacttcctcaagtgagctggcaggcttcctgtattctgtgcctcagtttccccacctataatgtggggctgattgtgcctccttggcttccatgaagcccccaccccatcccgtgcagggcctggcccagtgcagcatctccatccggggaactgtccatgctctgtttctcagcaggaccttctctggagggtataggggctgcttgtggggagtggcccgtgtaattggctctgggatcaggagcgtgcccaacgatttatttctcatattgtttggggacggtgactcagctgaatgcattcttcaaatcaagatccaaaaacctgctgtgaagagtg

SEQ ID NO: 98183 - DNA, 34970 bp, Homo sapiens
gctcccagcagaaggtgggcagcggtgcccccggctgcgcgggtccctcccgcggtcccggctccccgacgccgcccatgctgcacgcacgagtcctggggatcccaggcggtggccgaggtccgagcaagaccccgagggaagcgaagagcgctcccgggcgccgcctccgccgccgcccgctgctccggccccgccctgccgccgcggccgccgtacgagcgagcgtgcgcctcccggctcgcggcgcagggaactccccgccttataaccgcgcggacggcgcccgcctcgcctcgcctgcccccccgcccccggccaggccccggcccccaaggctggctgacccccgcgtccgctccaatccaggcgcggggcctcggtctccattggccgccagggagggcggcgtcgaggcggcccgcccctcccgggaggacagcggccgccacccagccctgccccggggcaccgtcccgcccccttttcccgggctgccggcttccaggctcttgactccgcccggagcgcggggcctggggacacaacacgcacctgttgggcgtcccgcagcgcctcgccacgccctcgggaaccggaggcggagtcccggtctgtgagcagcggggcctggggggcttccagccgcgcgtcctgcaacgtcaaatccagtgcgcccagaggggggacgctgtctcggggtgcctgtgaacagccttcaaaccatgggccccaatctctgcggggcccccaccgccgctgcagctctctcggagccctctgctgggggcgggtggcctcccctccgccctcggcgctgcagggctggggatgcccaggggtggccaagggggaggtaggggagcaggagggcactggcgcgtggaggcgggcgctgccatccatgggctgaggacacctgtgcttgttactgcttccccgcccctcttttttgttttgagacaggagtctcactctgtcgcccaggctgcagtgtagtggcatgatgtcggctcactgcagcctcaacatcctaagctcaggagatacccccacctcagtctcgggagtccccagctgggactacaggcgcgccccatcatacccggctaatttttggtgttattttatttttgtagaaatgggtcttgccatgttgcccaggctggtcttgaactcctggactcaagtgaccctcccgcctcccaaaatgctgggattacaggcatgagccactgcacccgggccccatccgctttttttaatttaaatacattcaagtccttttgaaagtgtaggtagctcccctaattgcttcggatttctttgtgataaatatacctgttcctaaaagttaagcgttcacagcagcaaggaattcaaatcaggctaaagttacttccagagcgctggtcgtcaatcttccatcagaaccacctgaaaggcttccatcagaaccacccaggagggttattcggtgggtctggtgtggaggcagagacttacatggccagttcacaggtgatgctgaccggctggttggggaaatgcacttagaaaaccctaagtatatttctctgatatgctaatattttgtcttggtctaaagaggaccagtatccccagaagggcagagggggcgagttctccctggtaccaggagctcctgcctttgcttgtcaggacatccagcaaggcccatgatgtcatcaggcaccggggctgcctgggccctctccactgaggcacccactgaccatatcctggaaccccaacctggcacatgtgtgtgggggtgcaagagcatggctggtggccctggcccaagggggctgcaggcacccctaccccgtaccatgttcacacagcacaggaatggagaaggcagattcttgaaggaatgcatcccctgcaccaaaatccactgaaggcatggacctggccctggccccaccttcagcagccctgagtggtcagatgtggccatcctaggggcttcttccttggagccagccctggcctggtctcagcccctgtgtgtgaggtggttgggggttgtgataggttagaacctccactttccccagctgcccccagaagagatggggaagatgaagggggggccacagaatcatgcaagagccgtgagtgagggcagggatcacagccctattggccaagtcctcctcgaagggatcactgtggaggccaggcggagctcctcagaatgctcctcaggaaagaggggctgcacacaaatgggcaacacacacacgaaaaggtgctcagcattgctaatcatcagagagctgcaaatgaaaccacaatgaaatactgcctcacacttgttaggagggctcctataaaaaagaaaaaggcctggaatcccaccactttgggaggccgaggcaggaggattgcttgagccctggagttcaagaccagcctcggcaacatagcaggaaccccgtctttaataaataaatacataaatgaaaaaatcatgccaggcatggtggttcacgcctgtaatcccagcactttgggaggatctcttgagcctaggggttcgagaccagcctgggcaacatgacaaaaccctatttctacaaaaaaaaaaaaaaaaaaaactagcagggcgtggtggtgcgtgcgcctgtagtcccagctacttaggaggctgaggtaggaggatcgcttgagcctgggaagcagaggttgtagtgccccaagatcatgccattgtactccagcctgggctacagagggagacctggtctcaaaaaatcaaatcacacgtgttggcaatgatgcagaacccttgtgcattgtgggtaagaatgtgaagtgctatagccaactatagaaaagagtatgaaaatggctttaaaatgcctatgattcagcaattccatttctgggcatatacccaaaagaaccgaaagcagagtcttgaggagatatttgtacatctattttcttagcagcattattcacaatggccaagaggtcattgtgaggcagcacaactgtccatccacagacactggataaacaaaacgtggtcaggccaggcgcggtggctcacacctgtaatcccagcactttgggaggctgaggcgggcggatcacctgagatcaggagtttgagaccatcatggccaacatggagaaaccctgtctctactaaaaatacaaaaattagccaggcatggtggcgcatgcctgtaatcccagctactcaggaggctgaggcaggagaaaggcttgaacccaggaggtggaggttgcggtgagccgagatcgcaccattgcactccagcctggagtaataattaattataatataataaaattaaaaataaaaaataaaacgtggtctatgcatacaatggaatattattcagtcttaaaaaggaaggaaatcctgtcacatgctacaacagatggacactgaggacatgaagtgaaagaagccagtaatgagaggacaaatactgcatcatccacttaaatgagggccctcgtgcagtgaaattcatagaaagtagaatgggggttgcctggggctgggaggaggtggaaatagagggttgattaatgggtacagagtctcagttttgtgaaatgaaaatgttctggagatgtttcggaacactgtaaatggacttagcactactgaactatacacttaaaaatggttaagggagggccaggcacagtggctcacacctgtaatcccagcactgtgggaggctgaggcgggcggatcacttgaggtcaggagttcaagaccagcctggccaacatggtaaaaccccgtctctactgaaaaaaaaaaaaaaattcacacacaaaaaattagctgggcataggggctcatgcctgtagacccagctacttgagaggctggggcaggagaattgcttcaacccgggaggcggagattgcagtaagcctagattgcgccaccgcactccagcctgggtgacagagtgagactccatctcaaaacaaaacaaaacaaaaacaacaattaaaaaaaaagagttaaggtagtacaagttatgggttttttaccgtaataaaatgaaaaaggcaaggaggctgcgaaagccatttagtcctatatttccaactcacagatgaggaaactgaagcccagagaggagcgactttgcccaggtgcacagccccggcaggagttccatcaggacagtcttggcagactggaaagcatcctgcaggagtgaagcacgccagtgcgcagctggtctcggctcagcgcctccaccctcagaggccagagtcgttgctaggtttgaagagggggccaaagagggttaaaatgttcacatgtgccaggggtactcagagaggcccaagtgggttatctagaaaatccatttaagaggaacaactccctcgtggctgatgtcggctaaccctccccagccacctttaagcacattgcaggtgtctaggaaagggaatccaggatgctggttcatactgtgggctccagggctggcctcatgattcctatcccggggccatcatttcctctgtggcacttctgtgtgcctcattctactcatctgcaaaatgggagaatagtactctataaggttgctgtgaggatgaaatgaattagatcatttaaagggtttagaatcatgcctggcacagtcagtgctcagctattatctctcgttgggagatactgagagtgtatgtccatcctccaggcatttcagttctctgtttatgaccccacttggggtctgacagcaggctatgccattgcaggggcaggcagcgcgggtctggggtatgggaccctctgcctggcccctggagtgtggtctggtgtctcctaggtcttcagtgttgctgggccaggagcacagaagctgggggtagggtggacagctccagggcccagacctccaacttcctttggccccccagctgacccaggactgacagagaggagagaaagcgactgccacgcaagagaggctgtggggatcacagcagtgaacacagcctcttgcgcccttttctgacatcctcctttgcctgcctgctttcctctcttccatctgatgccctgtgcgtgttcctggtatgtttttgattgccagtcttccccctggacattctcagctcaagcacaggtgtccccagcatgggtggagggcttcctgtggtcctggccagtccacagctagcctgacctaccagctgagtggcaccaaggcctcaggccaatacggaagtccccacaaggtgtcaccagcccagtagatactgacccgactcagaagctgctatgctctccaccaccccaagaaggcatctattggcctgggcccacatccctacaggtggggaggggctcagccaccacaagacaccttcccagccccactctgggtcctcagaggtcctggccacccccacctcttccaactgtgactgctgccccttgctgagagctcgtctaagacctgggcttccatggtccccgcctgtgcttccagcagacatcaccaatcaatcctgccactgtcccactgagcaacaggcagcctcgatgctttgcctctgagctgcaggcttctgtgagactggaggtaaccattgctggatgcaaggagacccaggggaggacctggccaaggtgccacagtgaggcagtgggagagccagccttggtgccgttcttcccaacagcaggccaccagccacggggagagggaggcctggctcatcccccagtaacccacagccctctgaatactaagggaggactcaaatagtcctccccacagcaagtaagtggtgatggcggaggtggggtggcttcaggatttgggtttaatcccaagcacgagggcgggcagggaaaggatttggtttcattccttcagatgcccaagccttggccagagccccagggtgcaggagtgagggcgcgtggccacccagcctgtaccaacaaagcctgcctttattaaatagagatcgcgttacattccatccaaagaaggaaatccggacgtggtgagggatgcgtccaggtgggagctccgaacgctggtcctgagtgggctctgatgggtgggagggcccaggtcctgcctgcccacccaggccccacatgccagggcgcgtgtctgcatggccacccacagctgaaaacaggcgtgggygatctgaagccctgtctgtgttctactgtggcagaaagtgccccagtccttccagcggttttgggagcagggcctccaggagcacagggctgagacggggtgggagggaaggtgacaagggaggcctttrtgaagggggagggaggaagggggaaaggaagggaggaagcgggggaggggtcttgactcatcttaacaaggctttggggcaattctgtgctatggaggccctgccagcccctcctagtagtccaatagggaggccaccgggaacaaggcacaggatggccacaagggggtgctgctggcccagggcttggcagctggggtggagggtaccctggagatccagccacccagaacagtccctttctgaagacaagccagcaacaaggcacctgcaggcagttctggggactggggagggggcgctggctgcctcaggtgtcccctcccaagggctgaggccccccgagtatggatccgagctccctggtctttggtgctttcttgaaatcctcctggtggtggcagaacccagtggggaagagaggggggtcttgccgtgaagtccaggcccgtctgtcccaggatggacgtgtggtgctggctcagtgctgcctccatggcctgtctgtccatccattctgcctctggctcagggctggctccaggcccccgtctccctgtgtgtcggcttgttctggggtgggtgtttgctctgtctcagagctccccttcaggcctgggccgcgccctaagcctcctgggggaagaagccgagcttggccagtgacatctccttccgcaacctcatgatctcccagaacatgggctctgctgcaggcagagagagggtgaacaggtcggggacagctcagggtcacctcgggcagatggccaggtcccctcctgtggctttggacagagcagctggcacagcaccctagggtccccggcccccaaaacagatgacctcagtgagtggctggacctctctgaggctccactcttgagccttggaaactgctgagtgccgaccacacccgagggatctgtttgcactacactgacggccacccccacagcccgacgcagacaagcaggtacacgctgtcacatgccacagcggtggtccagacctgggaactacattagacaaggcacagatgcctccctggggtctcacaaggaccctgcgcagtgaggcggggaccacagcggccatccagggacctagcaggtgtcaacacccagcatgccttggccttggcctccaagaggacttgacccccaggatggagaggagatagctccttactcagagggtcgggccagactggttcaggagaagactcagcagcgagcaaaggttggtggaggagcggggagccaggccttgcagaatgggctgtggggggagggggtggagggaggccctgtccagcatggagtggagtgggagcaaaggctggaggtgggtgaccctgtgttcaggtgaccaggaggaggggccaccacctccagggccagggagagattcacaggggtggcccccttgtgcggggccgggagaggtttggggacaggagaaagaccagccggacggactcaggtacagagctcagcacccaggaagtttgtgaacgctttactaaaccacaaccctccccgctccccagcctcctagctgagtcttgcctccactaggggcaggtgggcccagagggcacttccccatccarccccactcccgtgtgcgatccctgcaccggccaccagggggcgctcaccgtcctgccgcaccaggccttgctggatgtagcggatgtaggtgaagaagttgcacactgcggtgatctgtgggcagaggtggggacggtgtgacctgccagccccacgctgggggtcccctgacaggcggatctgagtccagagcaggaggccccaggtccctgcagagccaggcagtgctccctgactcagctgggactgggctttcaagtagtaatcaacaacagcatgactagccctgctgtaatagcagcagcagcagcagcagccatttcatcaagcgcctgcagcgaacggagcagacgcgcttattattccatcttacatgggggaaagcggagccacccggggaaagccgctgacatccatcacggagatggcggagctaatgaaccagcatgcagcagagctgtgagatgaaccgggcaggctgtcccggagtctacactcgccctctcacaggccggcttgctccagatgctggagttttgggccagccaggcctcagtccagtgctactgataacactgggaaaggaaagggggtcagaagccgctcacctgggctgcccggggcccctggggcctcaggcctgctccatgccaggccccggggaccctgtgttggctcagacactgctatgaggactcacaccayggagagggtactgttggtgcctggcccagggccccttcccaggcccgggccccatctcccagctgctgagagtgggggcactaatggctcagaggtgcccccctctgtactcactcctcctgtagacctcagccgatgactgacttgtgtggagatagaaaggacagtccccttgcctcagggtggaatcaactctgctaagagcccggtggatggggctgaagctgggctgtagctaaggccacatcctggctggactcccccgtcccttccctcattctcctgggagctgcacacaatctccaggtgaggctctgcctcttcggaacccagcctaagacagggtggaaggtagccggcggctgtgcccgcccgcaacagcccctactgaatgtccaacactcctggggagggacatcaagtgagaggggcacccgcaggctggggagtggagaagcttcggggaggggcgggacggtggtggcctggcaaagatagggaggtgcgagagagcggggcgaggtcgggggaccagcccgtcgtggcagggacaccgctgcacagggagggttgaggagaggctgcggcaggagggtggggcagggcagagctcaggacaggagcagggacagtggatgcccacagaggctcatgagcagggagtagcagggagggggctttccctctccagggagtgtgctagggagaaaacacttctccctgtggaccccacatgtcttggtctttcagggcagggaccacatcctaaaacttcagaccctcctcacctcatctcccacccccagcttcatccagtgcagcaggacacccaggccagggacttaaagtgctagaggtgacattgttgagcacgggaacatcttttgtggggcctgctgttgagccatggttgggcctggaaagcggtgatggagataagtggccactgaacaaggctcagtgggcacaaatccacagggtaggggctgcagtggactcagagccaggatcccaggtctcggtgtgtggccctgaacacacccctttcctctgccaaggctcagcctcccttttggtaaatgggtgctcagcacaccgctgggaggactcacgctcggatgccttgtggagttcatcaaggacagtatagtctgctgccagcaaagggaccatttgtcccctttagacctgctcccccgcgaggagcctctagcaggcctgagatggttcctcaagctgtgtcactggaaacgtgtttccaaacatgttctcttgttcccctcaatcctcttaagagtcaacagagggacagaggaagaggaatccctgtcctcaatccccagcttggtgagaacccctgtcctggtctgggtcactcggcaggggagggtgggagctgggattcctagaggccccttggcactcacggccgacttaaggctggtgcaccagacgcaccgctgaaccttttccaaagcttcggccagcacctgagtctgggcgtcaggagccccgcactctaactggaactctagcatcactcctggattaggtgacattgaatgacagaggggggcgatgtcatcccatgacatttcatacataaggctgcatctcagccgactggagagtggccctcctgatggctctgaagtcagctgccctgtgcaacaaggccctgtggcaggggactgcgggtgtcctctagaagctgagggtgtccccttgccagcagccagcaagaaaataggggcctcagtccttcaaacacaaggaactgaatgctgccaacaatgtgagttttgaggaggaccctgacttccagaaaggaacacagtctgctgacagcttactgcgaccttgcaagtccctgagcagagaatccagtaagtaagtagtgcttagactccaacatggggaactgcgctattttaagctaccaggttgatagtaatttgttacaccgtaatagcaaaccactgcccttggcttggctgtgtggcccgagtcagtctctgcgcctctctgagcctgtaccctgctctgtaaatcaagatgtaaggctgggcgtggtggctcacacctataatcccagcactttgggaggccgaggcaggcagatcacttaaggccaggagttcgagttcagcctggccaacgtggtraaaccccatctctactaaaaatacaaaattagctgggcgtggtggcacatgcctgtaatcccagctacttgggaagctgaggcaggagaattgctaatgtctgcctgggaggcagacattgcagtgaactgagattgtgccactgcactccagcctgggtgacaaagactctgtctcaaaaaataaataaataaaataagtaaatcaaggtgtagtgctattcatactcccaggcccagggcccagtgtcccagcacccaggtggccccaaaggagtcaagtaacgcttgcaaaggctgactcaccctggcccgggaagatggcgagatgtagtaatrgcttttggagtccccgagccggattcggtggcggcaggtgcgggtcagcccgctcagggcacatgtgctaggggaaagcaaaatgggtcaygggggctggctggggcttgcccctctccctcacccctgcatacagggaagatgcagcagctgagaggatgcatggggaggggcaggcctcccttcccccacccggcttccaaaggaacccagagccaggcagagaagggagctggccccagccatccctgggacagacctcgaactaagctgagctgtacccctagaacccttgttttgcccctactgggcaagagagcttggttaatctcatgccaggtgtacaaagtcccaccctctgcaggctctgcatatgcctctccctctacttctggggactcagaccaggcactcctcccccaactaggccagagttgaggtctggctgcctcccgcttcccaacatccagcagctcccctgcttcatccatgcaggccttctgaccccactaacccccatggttctcagccgcatgccaaccaaccccgtctaagagccttctcccatgccctcttctctcctccccccagtcctgcatgacgtcgctcagcatcttcagccacccacatgaagggtctccacaggccctgagcaacccccatctgggccccactccccaaacctgctcttcactggccatcatctgctcggctctctcctcctcaccctctgcttggtcaccaagtccccaggccagggcacagcagcagkacttttggcctgcatccccttggctccttctggccagctctctgcctcatcgctctctttcttctccacatcagagccagggctcctccaaaaacccacatctaacccatcatctttctctcttgctttcctaattcccaagaaatggggagaatcccaaataaatgaaggtttaaaaagctccttggctgcggacttatcagagcatttgttgcctcctggttcactgggactctctgatggaccagagagcctcttttcaggtggcagctattgatgacttttttttttttttgagacagggtctcactctgtcacccagactggagtgcagtggtgcaatctcagctcaccacaacctccgtctcccaggctcaagcaattctcctgactcagcctcccgagcagctgagattacaggcgtgtgccaccacaccyggctaacttttatatctttagtagagatggggttttctccatgttggccaggttggtctcaaactcctgacctcaagtgatccacccgcctcaacctcccagagtgctgggattacaggtgtgagccactgcacccggcctattgatgacttttgccgcactggctggtgggttaaagcccaaacctgtgaaggctctttatactctggccccaacagcctctgcagcctccaccccaattccctgtccccccactgcttagccagatgccccagtggtgcttccgttaatactccagcttctcacacctttgcacattccgttccctctgcctgaaatgcccttccctgcttggcaaacttctattcatccttcaaaacctggctcaaatgctccctctccgtgatgagcctcccaccagggcaccagccatccccagccaggctcttggctgccaaggtgaaatcctccccaatttctgccccttgctccaccctggctattttgttctgctgctcccctgctcaatgccaggtgagtagctggaggacaaatgccagggctactgcgtcgttatttattggcaggggcacagccagcaactgataatcatggttcaagaaaagaaggggagggcacagagcagaccagtcaggaagaggcagaccctagctcccggcctctctggaaagcctgggggtccacaggaaacctgccaaactgcctccttgccctgtgggggcagcaactgtccctgtcctgtcggcgctgctgcatcctgaccacccctcggcacagtraacacacggcttggcggggctttcccacatgggcaggaaggagctaagaccctcagcttacttggtgctgctacagtcaacctcggccaccttcactgtgggcagcgtctgcgaagccaccggctcaatggtgagcgtgttgtcctccacggcggcccgtaccagcaccgagagctgtggcagaccagggmggcaggcagggtggtaaggggctgggccctggcggaggggtgtgtcccccagctggccccgcccctgccatgcctcacctcctgcatygtgaagtccaggcaggggcccacgtcctcycggtacaccctttccaggaaggggcaggtcttgtccagggtgggggattccctccaggcctggaactctgcaaacaggattgtgtccacctgtgggggagggcaagcgagggtggrggcggtcagsgtactggggccagcatagaagatgcaggctgagctgaaggggagcgagggaggacgtggggcaggcccagcaagccagcaggtcgatccccagcagccgtgcagggaagccaagtccagcagcagcagagctcccttctgccctttgcaccaaagaatttagaactaaaagttttgtttccaggccggtgttaaatttcttggcgctactggattttagagtggggtgcagggctttgtcctgaagaccctcastgcctccttgaggaggaaaagtcaaagagcaactagcaggaggccacaggtaccagcaggtacacaagcacacacaagcacgtgcacacaggaggggacacacacaggctgccctgggcccacacctcagaggtgactgctggcctgctccaggccacatgcagaatgagggaggctgggagggggcaaagtgggaggcccctctttggagccatttacctgtcgggaaaaggagggagagggagtggaggcaggggctgggggctccccaggtgggagcggccaggccggctcgtaggtgaggtgaaccgccttgctggggaccacgcagaggagcagggagagcagcggggccagcccgggctgggccggatggacagacagacagacagacagacaggtagacaggtgcacagagacagaacaggaggaaggggagaagttaatgtacattcagaagctcagagctcaggaggtggatgagggcctgctcgtcttccctggaggccctggagacagaggtggaagccaggatggagtcgagtgggctggcgccagggacccaggaagctgaaggcaccacagccctctgaggcactacctgggtgcagccttgaactcagctcttgatgtccctgtctctggttcctccagcagccccgggaggccccatttatcaggtgagaaagctgaggtgctgacaggtggcctcatttgcctacagacccatgaccatgagtgtcagcccagcctgggcccagcaactggtgtggccagctgaggtgggacggagacacctctccaaaggccacgcttgtctcagccccacagtcagagggtgccagaaaccccttgagcacagggctgtcaccaggtggtcctggggctcgaggctgtggccacacggggtccaggcagcctctcccctgaggcccagtggctgctgcttggcctcttaaggccaaggaagtgtgtgtctcagtggaggccccagatcctcagggccaaagccagcctcaggtgcagagaccactacctactgcttggagtcagtggggcagggagggggcctcaggtccccagatggtataccctggaggctgcaggccaagtgcctcagatcacaggaggttggagagaaaggacctgcccagccctcacatcccagagaggcgcaggacaggctccaggtcacacagcatggggcaggctggtcctcactgggctcggaccctgcctaccgcaggcactgccacccttccccgtgcccagagcccgcttcccaccctcacytccttgccctctctgtctggggtgagggtgtgtcccgcagcgggacacacggcggggcagagggtgctgctggtgctcttgtggcgagagtggccctttcggggcccggccttggtggggctcagcagctgggggtgaagctcrcggttgggagaggctggtgtggacgtgatgaccagygtcttcaaggctgtcacctctgcctgcagcatgtcgatctgcatgggakgggatggctgtcaaccctcacccagactggatgccatcctggctgccaccgcctatcagcctaactcaggacaatgcacccctgcagtgacaggcacttagtcccacccgacgccctcagaacagccttcgaggcagagacccagacactcgttttacacatagggaaactgaggctcacagaggcgacatggcctgcccaaggtcactctgtgagcaggattctgttaggaacaagtgtctgggagctggctgggcctcccatgagagttctgggaccgcccccaggagccaggaaaggcccaggcctcacattttgcagatgggcaaccaggcttggagagaggaagcgacttgcccaggctcagacagccatactgagtgaggtttctgctttgtaaagtggggctgggaggagagggaagaaggtacaataatcacagggtcctcccagccccagcactatcccagaaaaggctctgccatgcagcagaatcactgatggagccccgggacactgggccctgtgatctcagacccccacccttcccttccctccctgggcctaggttcacccattcctgctggccccaccgggccaggtgagcgtccactcgggcagcaaagctcagtgctcgctgagccgggaggcagggggggtgcctgggctggcctgggcaggcggggatgggcctcaccttgccccgagcctccttcagctgcttttctgatgccgcctgcttcatgttggcttctcgaaccatcttgtgagcttcctaggaagaaggcagtccctgcrtgagtggtgaggagccaacggacgcccagatgacccattccccaagttgttcccgcgcccagccggtgtacctcaaacaggctggccgtcagctcttccagctcctgttctagctgctcccgcaccttggacagccgctcacattcctcgtcctttagcttcagctcctggaggaaaagaggcaggcacttgagcacctcagcatccccaggcctggcacgggagggaccaggcccaccggaccaggttccatcccctcgtcattttatgtggggctcagagtttatttcctctggtgcctgacagtttgtgatgctttttccgtttagccacagcatgaagctgaagccctgcctgccagttcatcagagctcagggcacgtttgcagtcaagaygggtgaccatcggtgcrcccagtacaggcctggccagcagctggcctcggtgagggcacatccctctcccttgggcacatctctgggcacctgatgagagcccacagctctcccaacctgacttctccccaccgaagaccccccagcctactgcaggcacccaccttctgcgctctgtgcagctcctccttcaggaactcggagcccttctctcggatctccatggaagagctgcgcaggcgcaacacgtccagctgggcggctgcggggccctcctggcctygggcctcctcccctgcagaggtctccaccagggctcctggggactccctgtggccttggcaggggtccgygctcttccaggggaccgggacagctgcaaggggcggcgggaggccctggtctggctggggtgggctggagacaaacaagggtatcagcaggttcagggtggggtcctgaggcctggagagctgagtccagaaaccgccccggggcaatgtgcctgccacttgagcctcagcctttccatctgaaaactgggaccctaccagctatcatcagtgttgttacaagggcaaatgtccaagcacaaagtctcttggggcaagaggcttattactctttgtcaaccaccccttccagcccagggctgagggctgtgtttggcacatgcagtaggtgctcagcacacagtaggtggtcagcgtctttgtctaacaggtgactgtaaatgcatcagggttgagtcccacttgtattaagtgaagcctattccaatggccctacctcaaaggtcactgaatgatcagaggaggtgtgggtaaaaccttgacacctcggatgcactcaagcaggagctgccttcactgatacagttaatgcgaattctgcccctttcagggtggaccagagaggaaggatgaggccagggcaggcagggctgaggcaggaagattctgcaaacagcttggacaagacagacccacttcctgtccccctggacttggtggggagcagtcccagctctcccctggcctgccttgtgacctcaggcaaacacccccttctctgggcctcaggaccctcccttccctgaagctgaagaccctggaggtggtgtgaggcctcattccgcccccacccacactctccactccaaagtggaccctggagagggaagggagggcgagggcccggccagcggtgttttgtgccaagacagcacctctggactcgctcactcagcaaaagctggaggctcctgagccagcagcttctgagccgcagcaaccagggctggggatggggggctgggcgggccactgatatcagtgagggaagttggggggaggggctcagggaggctgcaccagagggggaaggcaaggccaaggagaaagtgggactcaggacggctgaggcagagggaggagtgagaggcaagtctgtggaccagtctcccctccctgtcctcaggaccttgggaaggtcaccaagcagcccctgagcctcagtttctcccttggttaacacacagaaaatgggcccccagagactcctgcaaggagcccacttccagcaatgagtcccttcacacagcccggtccagctgcccagccccacctgccctctgctctggaaccggcccagagtgtggcctcaaggctcctcaagctgggtcctgcctggcagggatgtgggtcttgaggattaaggtggggacacatatccatcactccatcaacagtgtctatgccagacagggctctctcctaatactcctgtttggggaagtcttgttggcaagggttccccgcagcctgagagctatggcggagccctgggctggggtctgtgccctggggactcactctgccagactcttccacaggtctctgaccacgctgtctcctttaaaattctctcaacagcagctgggtgcagtggctcacgcctgtaatcccagcactttgggaggctgaggcaggtggatcacctgaggtcaagagttcgagaccagcctggtcaacatggtgaaaccccatctctgctaaaaatacaaaaattagccgggccaagattgtgccactgcactccagcctgggtgacagagcraaactctgtctcaaaacaaacaaacaaacataaaactctctcaacagcactcgtggtattgtcccattctacagatgaggggacggaggctcacagagtgaagggacttgtcaggggtcacgcagctggtcagtgacagtgctgggacaggtggccaggtcttcaagcccaggcccaaagcttccccgctgcaggggaagggcaggtgggtgcggagtgtgagtgttggaatcggcgcatctgcttcaagataaagcgctgctgggcccagggagactcggaggctcctctttggctgcagtagggaaatctgacccaattctggcccgaactggcttctcagactctgcgcaggcccagaaaccccctttccagaaggcagggcctgggcagggggagctgtggcagagagaacaggccagatggggcaagcctggggtccatgtcagcctctgacctggggtacacatgagcccctgagaatgctactgaaattttctgaacctgcttctgcacctgagggataggagctgaaatcctgcaggaggtgctctaagaatcaagagctctaagagcagtcctgacctggtgctgggtgaatcatgttcaatccacagccatgtttggctgagacactcacgaagcctgcctgggctctgggtcccacagcttaaactggaggcctgtggacccttgccaagaagacttccccgaacaagggtattgagagccctgtctggcacagacactgttgatggagtgatggatatgtgtccccaccttaatcatcatggcccaagtcctcaggtaggacaggatggccatagtcactcaggctgggctgggggctgctcactgcaggccaagggcaagaggtgacagcacaggacaggacagaggactcttgcaattgcctatgccctgaccgaggagaaccaggctgccggccctcccatgggggccgagcttcatccaccagtgtggtctgggcctctggccacagtgaaagactaactctctctcctgctggtcccaagcacataggctggaggtgtggctggctgacctcaccattttcccaacaggctctcattttkgccttgtggggcagagtggggacagggcccaattttgtagccagaggaaacagtggtccaggaggcctgtgacagagtctgtgacatccttcccatcacccccagtagaagagcccaaggccaaatcccaatggcaagaagtgtgggaacatgggaacagtgggaccacccagtagcsaccaactccccaacgccaaaggtggcaggagcaggagggaagaagggcctgacctgcccttggagggtagccagaatctgcagaccctcttcctcctcatttccaggctgcaaggccaactcctgagactcagaaatttcaaagaagggaccctgggctcctcgggtccagcccaagccagaatctccaatctcacacacactttagcctcccagaccagaggcctgaaaacctggctgtgaacacccaagtcagtggtgaactcagtcgtggggcaagcagggaccacttaatgttctgctgcccagcgtccctaccctcctcagtccgggtccaccgctctctgtacaaacctcctcagtccccgttccctgcagaaacagagcccagcatctgagatgagccacagatgcctctggaaaggagcctgttcagagggtaggagtcaaggtcagaggtagatggggcacccagccaacatcccccatcccaaagccagctcccactgccgagaggcccaggcagttcatacaggaaaggccccacgggtcacttccccaggaaacacacaaccaaaagaaaatgcagtaaccacaatcctcaccccaccaggcccaccctaggagggccagcagggctcttgccccgacccacaaaataagaaggagacctagactccgtggccctcggtctctcagtgtccccaagccagcagggcctggccagtggccagaccagcctattcctcaaccagtgcccaagatgaccctgtccagttacctcctggaactaaagacccctgttggtcatgggcacaatggattcattcaataagcaggggaggggacagcaagggtggttctgaaactggacgaaggagacggctgggagggcacactgggaccactcagcgggctgccagggcccaggcctctagggaggctgcagaaaccccgacccagggcctggctccccggggcggtgccttggcacaggggcctgttcagattcacgctcagcctttgcggtgacactgaggggacggaggctcacagccatgtgattaacatccagggaccaagggagtcccaggaaagggttggtgggccagctctcaggccagcctgcaagcccagcaaagcttggctcccctagagagcggccaagtcttcagccccaaacccacaagcatgtcaggttcccaagcgctaggccacatccacgccagcccaccactccacaggtgtcatggcctggaagctcgggacaattgcagggagatgcgctcctccacctggtttccagatgaggcccctgaggttcagagagggatggtgacctggccagaatgcacagcaaggaagtggcaggatgggaactgaatgcagagtacaggcatagcgtatcacgtggcctgtcacccagaggaaaggggatgaatggcggttttggagaagtgaggcaagaggcagatggggtttgaggaagtctgagacagcgcccaagtactggaggtgccacccaagaatgctgtacagccaggcaggacctgggctaagaggggacagcagaggggacacacagaaacaaagatgggaagggggaattgtgggaggaacaggggctggatgggggggcaggaaaaagcaataacaataattaagataattcaaaactaaggaaaaggtgaaagctgagaacagcggtacccatgctgggagtgaggaactgggagggggtctttcagggacaggaaagtgggtggctgaggcatctgggaagtggcacgtcccgtaggcagctgagggggaataggcaggatggggtgacgctgtcgagtggcactggtttcggggagcagctgcagcctgagcctggatgaggggctgtcagggaggacaagggcttgagagccagaaaggacgagagtgttggacaccagagccgaagagtgtctgggacccggggatgaaagagatcgtcatgagtctcactgaattgggccaggaaccaatgagctcaagtcaaggaggggacaaagggacaggtgggaaccaaggtgggcctgggccacaggggaaggggagccagagtagggagaagggcacaacagcaygtcctagtagagaccatggaggaggagtgggggagaaggtcaggaacagctggggatgggaagcagatcagaacacctaaagcaggtgagtcaggccacgcctccgccggccatagccccaggccaccaggccagtccagcccacccctggcgggggaatccagccctgtctctccatgggagccagcacagggcctaggagggggcgcatctcactactcttctacagggctgggcacgcagtacatcctcaaatgcgcctgtggcgaccctgcccattcagtccaagaattgacaccgaagacctccaatagctagtgtgtatactgagcacccattatgtgccaggcaccccaccagccatgatccatccaatctgcacgaccaggcagcccccttcttaccatatcctattttgatttgcatctccctcccgctacctcatttccaaagacctattgggcataaatcatgtgyagagctcggagggtctaggacaagcaggattctaatgaggatgtctgcccccaacacccatgtcctgattaaggaacagcaggaaagatctccacctgttgaggggtagagtaggcagttagatcacggagggcttccagggagcagcaacagtgagggttatacaaccccttcccaatgaagaggcctgtgtgcctgacctggagccctcgggccatacttcagactcttgtctcacggcctctagtcccctgtgacttgggccttacaggcaggagcccacagatccatgcccttagaatagccaaggcccagggcagtgaagtgacttgctcaggatcacacagccagttgatggcccctacagccctgcctgccgcaaaaacatgctccccaacccctgggaggttggagtggtctcatctcattcctgggccatccatcaatgcctggccctctctagccataggtatgatgagccccgtctctggggaaactgagaccagggggctggaacagtgtcatgcagaaacttgaacgctggcttctgctgaccaagtcccaagtgtccagcaccatgttagatacagaagtactcaagacgctgtcctcacctcgtcaccttggagcaggcttggcacccaaaactatgaatgtgtgaaactgtggggaatcggaagggggacaacccagtttggaggggcacctaaagtcagactggagctgcctctgggtttggagttcagggcccatgctcaggagtcccaaagaagaggacccacccaggctgtggcagagtccagccactgccgcccaccccagaagagtagcccagggctggagccatgaccaggacctggccattaacaaagcacagccaccaagagaaagatctcagttcatttcacaggtgaggaaacgaagcccagaaacatcactggccccgctggggtcaccaactcctaatcccagctcctcctgttctaggatcaacagtcccaaatatacacckgccagagctgtcatcagacttggtcagagtaacctggcaagtatgactctgaacaggayacctcccaactgctgctggggtctgggtgagctcctaggacaccaggcacccagtgggggctagcagcttggcccctgactctaaatccctgtttcctcacccaaatggggggccataaaaatacagagctcaaggtaacccccaagctctgcctcaccccttccgccagcttctcactgcccctcatcctttccatctgcatttatgaagcacccattatgatatgagctcagcacccagctaggcccctgggggtgcaggggtgcatgcaggaagtgagccatactgaggattctgtgggggtcagcctggcagctggctcatccagagtgttgctgggaatatggcaggggggctggatggtggggaggggtccctgcccaggatataaggctctctgactctccttgaagcaaccatccatctactggtggctctcagctgtgtctggccttggcctgggtgcctccagggaaggacattctctgacctgcgatcactcccaccccagaaaccatttattttacctagaggcccagagaaggaagtccacactctcaaggtcacacagcaactaactcaggggctgtgttgcctgagtccacccagccggcacaagacacaggcttccggcagacgaggctgctccccaaacacaattcaccccgggcaggactgccctaacctctccaggtaccacaaacccacctcaagcactttctcctaagccagcctccttcctccaagcacaatgccaacaaatacactagtggccttcaactctctccctttaagagtctcaagcccaggccgggtgcagtggctcacacctgtaatcccagcactttgggaggctgaggcgggcggatcacaaggtcaggagatcgagaccatccttgctaacatggtgaaaccctgtctctactaaaaacacaaaaaaattagctgggcgtggtggcgggcgcctgtagtmccagctactcgggaagctaaggcaggagactggtgtgaacctgggaggtggagcttgcactgagccgcgccactgcactccagcctgggcgacagagtgacactctgtctcaaaaaaaaaaaaaaaagagtctcaagtcttagggcagggcgtggtggtaaaagcctgtaatcctagcactttgggaggctgaggctggtggatcacctgaggtcaggagttcgagaccagcctgatcaatattgtgaaaccccgtctctactaaaaatacaaaaattagccgggtgtggtggtgtgtgcctgtagtcgcagctactcaggaggctgagacaggcgaattgcttgtactcaggcagcggaggttgcagtgagctgagatctcgccactgcactccagcctgggtgacagagcaagactccgtctcaaaaaaaaaaaaagtcccaagcctctccacacctcacccctaacaggagcccactctctccacaccccctgctggggatgaaaggccatccctcccctagcatcgcagctcaacctttgctaggtgccatggagtgaagtggatcctgcctgcctttccaggggggcttccctcactccccagctgtagctgggcagtagccctctcctgggaccactcatctggcccagggggcacaggagtacaacctgtcccccattctggccacatttcctccacgacctggtctttcccggccacggggaagaggaagtgtttgcccaactccacaaaaacaccacaacctttctgcacatacagggcaggggtcccacatcagatgggccaggaactgcaactgcccctgagaaccagtggcctgaacagacacagccactggggccactaatccaggacccagagtctctgctaccccactccaggctgcggggccggggcggggggggttcccactccacacctctgagagcctccgtacttccagagccccacaaggaggttctgccctcaacttgggagccaccctggcaaagacccagcccctctttcccagctacactgctttccaagagttcatccagcgaaggggttgagggacaggttgggagggtgggctgggggtccttcctctaggtgcatgccccagagtcgtgcacactcttccccacaccccractcttctcacttgcgctcctgatgagctaagaggagttgacgctgtcaccccgggacggtcggctgcccacccttcgcaccctgcaccccgagagacacccccgacccctcccccggagtctcctggctgcaagtcggctcgcctgcaggcagggcgggggcgcacagcacctccgggtggcggcgcagacccggcggggacccccgaaatcctcccgtcccgggaggcgaccgcggcccagacccagcgcgggaccgcgagcgcgcgcggacctacccgctccacatcccggcgcctcggggcgcccaggcgtccgttcccagcgccgccgcgtcctcccagcgccgcgtccccgcccgccgccgactccgccaggggccgagccgccccaccgcctgtcagccctgcccgcggccrgtcagtaggtctcagacgcctgggctcgcggcccccagcccagccccgaccctgccctgggcgggtcacgtggcggaggggggagcggcccgaggacacgtgcccggccccgcccctccgccggcccggcgctgggatccggcgcgcgctcccaaggcctggccccacccggcccgccgcgccgggacagggagaccacggcgctcggagggaacccggcccccaacatcccgcgggccgcgccgcgctcagactccccagctgactcctcctctccagtcgccctccgcaccacccactttgggccacccctgctcaagaacctacaatggctcccgagctctcagctcttcgattctcacacagattgtcacttaaggccagcagacaccctcccccctcctcacccggccctccttccctaggctgtctgcttagtgcctgtccctgtgcaacatcctgcctgctgggaaggggaggggacaaacccgaaacaagttttctgagtcctactctctgagttttatcccgaaggagtttccacttctggtccaactctcctcactcagcctcctgccacttaacacgctctgcccatccctgcctttactcaccatctgccctctggatagtattccccaccccacccccaccgacacacacacatacacacacctgtctggtcccacatcctccgtgaaaccttccctgaatcccagacgactggtctacctgtccctcagttcctctgtcccacccattctgagtcctgatcattcgtctcaacttcagcctgggactggaccagtaagagcagaacscgtcttctctcccgccaggtaccatggctcccaccttccctgtctaggggaggactgggagcgtggtgggaggtacttccccttctaggtgctaccagaggtcccagtgctacccctccaggcccactgactcaggccgcaggctcaagttagtcagatcttcgtttgaggacacattttattcattcattctactcaytcatacattcagccactccatctgagcatagactatggggcatgcaaggggctggggacccagcaggaaactgtacagacataggttctgccctcctggggctccacgttggtggaggatggaggatgggggacgtattctctaagacctccacgtccagggcacaaatagacaatgctctttccccgctgggcacagcgcacagcaaggtatggaatctggagagtggaggcgaggctggattctatgccttgcttgctcccttggccagcactttgtgcagtgaacaacctaggcagttctccatagcatcccttccaactttctagaatcattcagcccaggcrtcccatagccatcactcagcagggcagttgtttccatggccacggcttccagagggcagggattctctctttcttggagctatgttcccctaccccacccccagcccagctcagggtctggcccacccaaagcagatgtccacatgtgtttgctggcttgaatccctcatcagttggtcttgagcaactgttgtcttcctggcccttattttgttcactatttagagaaggaggagaaaatgacacaaaaggaacccagcacagggcccttgccctccaagtcttcacaagccccggcaggagataagtcatggcaacccagaccagtgggagataaagggtggaggaggcgtcagctcagggctatgtccctggaggaagagtcctcagcctgggaggtctggtggaccggggaggcccttgagcgaggtcttgaaggacaagtctgtggtcaccactctggaagcatccacactcaatttctaaccaaaaatagcctgtcatccatgcttcctgctaccatggactcctagggctcactgcctcccccagtagggaggaccctcctgctcagctgaacttgctcctcagttgaaaaggatgggctcggagaagttaaggaacctgcctgatatcacaccagccaggggcagtggggctgagtcctcttacacccgttttccaaaaagaccacccrgaaactagaggctcactggcagctgcagctgtgtgcagccaggcagcaagaggttcctgagcacatgctaggtgtctggccagtggcagggaagggataaataaaagttgtgtcctctgcctacaagccactgccctcctcagcctccctccctctatctccctctgcctgctccatcccaagcctggcagccttgaccacagacccttggctgaaggcagctgaggagcaggagacagtcagcctggacaacccaggccctgattctggacttacaggtgtgtcctcagctcactgtgtgacccaggatgagtgtcttgccctctctgagcttcagtctccacctctgtacagccaccaaattggacaagacaatcagagccattgcctaggactctctgagcccagcttctcacactgrctgccctgaagcttgccaagactccccctcccctccatgccccaggtcctgagctcacctgtctgtgccccagggctcttctctcaagttcccctcaagtacagggcacaggcctgatggggcgtagcggacagtccctgcactcatggccaggaacacgggacatgtccctcgggyggggcacccagcgtgctcctcagaagagtccatgcttgcaagrccagactgagggtccctctggagggtgccgggaagggaggtagcaggagccttcttccccccaccaggctgagcctcacactaacctttgctatctccccagagcagcagcctgggagggaggcaccacctcccaggacagccgctatctccttcaaccccgtaattattaactcctgtggctcctcaggcagcagaagacactgggccctccttcctgggctctgggccaggggaggtgagacaccttctaggggaggccccgtgtttcagccaggctcccagatggtccgcttgtcccctcaccacgcaggctggggtgttggaaagagcccgtccagccttgatcctgtcatagctgtcatagctggctgtgtagccctagacaggccctcctgcctgtgaccacaaacctgaatatccccttaaaactttgttattggtggggcgcggaggctcacgcctgtaatcccagcactttgggaggctgaggcgggcggatcacctgaagtcagcagttcaagaccagcctgaccaacatggtgaaaccctgtctctactaaaaatacaaaattagccgggcatggtggcgcatgcctgtaatctcagctactcgggagcctgaggcaggagaattgcttgaacccgggaggcggaggttgcggtgagctgagactgggccattgcactccagcctgggcaacaagagcaaaactccgtctcaaaaaacaaaacaaacaaacaaaaaactgttattttttattttttttctttatttttaaattctttttcttagatttgagattcccagttttgttttttgtttgtttttaatttttcaaggcagggtctcgctccgtcacccaggctggagggcagcctcaaactgcccagctcaagccatcctcccacctcagcctcctgagcagctgggactccaggcatgtgtcaccatgcttggctaatttttaaattttttttattttttggagagatggggtctcactacccttaaaacttctcaccaccaccgcccaggaacaactcagcggtagcagctgggaacacaggcccggggtcagacgggctggattcaaccccactttcagacggtgtgcctttgagcacgttagcctctccgtgcctcagtttctccaactatgaaatggattctcaccctccaaagcacaccaggccagttgccattgcccagatgtgcccattcctcttctttccacatactatcccccctgactgctatctccactgcatcctgcctctgctagtaagtttctcttttgttcataccccctcctctaggaagccctcccctgtgggttacttttttcctctgcaggcaccagagccctcagacacatggttagccctgcgtcatgacaaacaccccctggaactgttggacactcccacaagaactgagtggccctctgggcagaggctgggccatcctcgtcacccttctcagtgtcaccttgcctggtacacagactccatccacctgtgggatggtgtgaatgtgccaccctgtcttcatttggcccaaattctcatcctagttctgccactcgctgactgtgtggccttaggcaagtcacttaacctctctgggactcagtttcctcatctatataaaatgggaagttctcccctgtgaaatagtgagtattaaagcagataacatttgtggccaggtgcggtggctcatgcctgtaatcccagcactttgggaggccgaggtgggaggatcgcttgagcccaggagaccaccctaggcaacaaaccgagacctcatctctattatttaaaaaaaaatccgtctctactaaaaatacaaaaaattagccaggcgtggtggcgggcgcctgtagtcccagctactcgggaggctgaggcaggagaatggcgtgaatctgggaggcagagcttgcagtgagccgagatcacgccactgcattccagcctgggtggcaaagcgagactccgtctcaaaaaaaaaaaaagtttaaaaaaagaagacagctgggggcgttggctcacgcctgtaatcccagcactttaggaggccgaggcgagtggatcatctctgaggttgggagtttgagaccagcctgaccaacatggagaaaccccatctctactaaaaatacaaaattagccgggggtggtggcgcatgcctgtaatcccagctacttgggaggctgaggcaggagaatcgcttgaacccaggaggcagaggttgcggtgagctgagatcccaccattgcactccagcctgggcaacaagagccaaactccgtcttggaaaaaaaaaaaagaagaagaagataacatttgtgaagtgtctgccacagtgtagactgaaagaagtgtttccttccttcagttttcctgccccgtcctcctgcctgtacttccctcttctttctggttagcctctgagtccctgctggggagaagctgccagttcctcacaccccaccctgccccaccccgcccagcggataacagtatctcccacttgggctttgggctgcgaagctctctcagcctaatgcaaaccagatgctgtcctccctttcctggcaatgaattttccatggcctgctcccacccgcttcctgtttttgctcctctctgatccccctgctcaattctcctgtgcccccaccttcctctgctgggcaacctctgggcttacctggaaacaattaatggaaaacaggatatgtgaagggtgggggtctccccatcaccccaacatggcaagaggggaaagggcttggcctggctggtggcatcatatgtgggagttggtccctccctgccaagaccccaccagcctcttggccgggggcgggagaggggaaactgagtcagagttgctggagactttatggaaaaacctgttatgtttctggacatttagacacagcttggactggatgggaagctttgaggatcttgtctttggttgtaacttcttagaaaaaaggcagagccagaaaaggcccgattgtctcttcttgcagatgaggaaactgaggctcagagactcatccagggtcacttgtgagtcacagcaagaagcagccaggtctgggacgtcttgtcagtaaaagccgctgcctgaagtcgcctccccttcttgctatctcagcgtcattcctgcctgcccttcccctgcctctgcatagagctcagtcacgaggggaggctcacaaggccaccatccgcctgcctgtggtgcagacacctcccagctggcaggctcaaggcagccacgcacacctggctgggcagactttgaagcaactggatttttcccctgcagggctgggcgctcagcagaggggccctgggtaagccccaaaaacatgtgtgcaggtgggcccttccttggtccacttgaccctgtgaacttcctcaggtcagccagtgctggtcctcagagtgagggctcccccatttccatgaaaacaacagccccagggttcctgaaagccagttctggctgcccctccctccgccagctgtgcagggtgtttggacagcgcggatggaatgttttgcagccaaagtcctccctggatctctgagctcagatttcaagcaggagggaaagaggacgctggttctggctccagggagaggggaagcgactcaggaggtcaaacttgggcctggaggctccctgctctgtccccaggcctgaccaagaccaggcccaggcccctcagggaagggcaggacagagcgtgtggaggcggccgaatggggtcacagctttgctcaggccaacctggtgaagccaggccccggggacagtctgggctcagggaggggctcagcccaggacagcactttgagaacactaagattcacaacagacctccttcgaccaccatctccattttttagggagggcagttggggtccagagagggcaggcacttgtcccaggtggtacagcatgctgggtacagagcggggctagcagccaggcctccggaagctaaacttgctcttttcactgtccaggaagttcccatcctcactctcagccccagagatacagcccctgccagtaagtcgtcatctttgcttcttccccaaaagatgcaggcaaaagaatctactcagaaagtcagttcacaaagcaagcacagacactaagctccaggccagcctctgagagattcgaattaacctactcgaggacaaggcagaggccctgagagacaggattcctggcccatctcctgctctggggccagagctcccccagttctccaccacagctgcccaggcccctcagcgcccccaagaaacgaatcccttctctggctgcgaagacccataagttctagacacaaatatatggaagctagtttgagcctcagtttacccaccttaaacctgggaggattatctttgctccacttgacttatcatcatattgtggggtgctgatggtgagggccgggaagtgctggtgaacccctttggaaatatcaacagttcccggtaatgaaactgacctcagacgaagaagggaggaaggaaggaggggattcctttgggcccagatgggtgtgggagtctgaccaaggtgcctggggcctgagctgaattcctagagatgaaacctgttcacccgctctcaactcctcagaaggaaagctcagccaccttgtggaattattagagaacagagaatccatcagaaaccttcggggggaaaacatgactagtggaggagggtgtgacccccagagagctgatgactcccttccaaggtggcagaatgtggggtgaactggagactgtgctaggatctttacgcgcaatctcagattctgttcatccttgcagcggcccgacagtccttggtggtccttcattgctttctgttcccattttaaagatgaggaaacagatttggaaaggttaaaggatttggccaatggctaacaagtaaaggaactcagattttaacccaggtttgtctgactccaaagcttgttttcttatctctccaccagtcactctctcaggaggaagggtaaagtgaggctttttaaacaaagtagggattgaagaatcaataggatttaaatatccatatagagccgggtgcagtggttcacacctgtaattcccagcactttgggaggctgaggtgggtggatcacttgacgtcaggagttcaagaccagcctggccaacatggtaaaaaccctgtctctactaaaaatacacgaattagccaggcatggtggcacacacatgtaatcccagctacttgggaggctgaggcaggaaaattgcttgaacccgggaggtggaggctgcagtgagccaacatcacaccactgcactctagcctaggcaacagagcaagactgtgtctcaaaaaaaaaaaaatccatatagaaatgaaggatggacattccctgcagagggaccaacaggtaaaaggcctggaggtgggaagggcagaacacagacagagagaggcaaacccttcactttgccaggagctcaggctcatttgggggacaggaaaaaaaaagtctggaaaggcagcctcaggttaaatcctgaaaagccttggaggcgagttaaagaatttggactttattctaaaggctccaaggagatggttaaacatttttgagcagaggagagaaatgatcagagccctgctttgggaagattaaatggacagctgtgtgcataaaaaatagaagtgaacacttattacacatctagcaagggaaagactttctaaacttggaaacattttgaagagatcttaacagaaaaagatcaatagatctgtccgcattcaaatgtaaagctgctttatgctccttcctgccaaaaaaaaaaaaaaaaaaaaaaagccaaaattaaaaggcaaataacttggcgaaaatattcccaggcaatggcaatgcgttaatatagttaacacataaagaatttgcgaaaatcaataagaaaaaacactgggagctcaatagaggtgttcactcattcatcaga

SEQ ID NO: 98184 - DNA, 36037 bp, Homo sapiens
gcaaaaacatttgtaggcatcattaatcttccctgcagtgtgcacacagaaagtcagattaacaaaattctataggagacaaacttaccttcaaaagacaaaagaaaaccactacattcttgaccaccacagggtataagcccttaattattaagagctactgcactgaggcaataactcctaagaaatcttaacatttcgccaggcaaggtggctcatcctgtaatcccagcactgggagagaatggcacacgtaatcctagcctttaggaggccaaggcgggaggattgcttgagcccaggagtttaagaccagcctgggcaacagtgagatcccatctttacaaaaaattgaaaaatcatccaggcatggtggcctgtgcctgtaatcccagctgcttgggaggctgaggtgggagaatcacttgagcccaggaggctgaggctgcagtgagccaagatcgcactactgaactccagcctgggtgacagagcaagagactctgtctcaaaaaaaaaaaaaaaaaaagaaatcttaccgtctttagttcctatcaccattactgcagatttagaagcaatctacctgaatcagaaaatagagctcaaataagttgtgtggcttggtataatctgggaaaatcagtttcaaaagttacctgcccttgggatagaactttttgtcaacaccagttttcaaaaagtaccctagttatgaggccgttgctgggtaaactttatcccattccagcttcaaccagaggaacctgtacatcctaaagtttcacataagattacacttgaagaataggtttctccattaaaagacttgaaaactactggtcttcaggctccctacctgtttaatctgtcaagacattgccagcttaaatttcggacagttacataagtgtccctgttaacttcaaatggccctgacaggaatgctaaaacgtcagacattcaaatgggccaagctttatcaggattataaaactttcaaagctcaaaaacatgccatctctatgggaaacagtatcttggatttgatgttacaaaaggaacaagaaaatggtttctgaatggcagctttcagtttacaagtagtggcaaagtaaatgcttggatgttatgaggtagttgatctaaattgtgaggctttcttaaaggcactcctttgatctcatggagtgagagactagaaatctattcaacgtattaaaactcctctcccagcaaaataaaataaacaaaacatcctcctcctaatggctgaagttccatctagctgctatggccattttatggagcatggtgccatcttgtggccactctcaaaccacccattgttaatcaagtgcaattacagcatgttaagagtgaaaaggaaagctatttggagccatggtcacttgggatattttcaaatgttctcaaagaacatgacattttggttacttttagaattttattgacttttttcttcataactttaaaacaaaaacagcgcatgaaaaccagtgtcttattccaaagtctcaactcagctgattgccaggtgaacatcaccatcttactcctctgaataactagacacaaattacatagcaagttcgagtttctgcccacccaagacacagccagtaatcagtcacaaacacagacacagccaactccaggggctccagctttctgcccatcttctctcagcagttcctcccatctgctaagatgcgccttcctggtggctctctctcaaggtgggtcaaggctgaacaagacagaaaagcacagtctaggtccaccatcacctcccactggccaccagttggccagccaggaaatcatttctgtacatcttttgtatcccccttttatctccctctctcttctccaaaacttgttgctatctatcactttcatgtaacaatggacttagtgtccattaaactgcctgagaagtggtttgagcctgacatattttcctgagctaaaaaaggaaaagtacctctgtggccttcttgccattaagatcaagtaaaaaagggactagcactactgaaaagggtcacgctagaaaagccttagaatcctctctccaccccgtgaaggtttctctagctgtagctcttaagggtacaagacggcaaatattctggggtgaaggaggtataatggggaaacacatttattttccccttttaaacttccctgctgccccagtctttgccttcttcttagtggatcccttgggttctggctccttgcgcttagctgaagagagtgagccggtcaccttgaagaaatcatccaggcggccctgggtgctgccttggcggctcttactcagcctcttgaccccactgcggattcgctcctcagagaactgcttttcaccacacatgaacttgatcagctcttcttcatttggctcgctccacttcagctccacagactctgggtccagcacctcaggttccaagaagagctggtgagcctccttgtggagccaattttctggcacagggtacttgttggggtcaagtcgccgcacgatctcctcgatgctcttgtgcttctggatgaggtccacagcccgcttgggcccaataccccggatactctcacagtagtcactgcctagcaggatgcacagatccacaaactgttcctggttcaggcccagctcctgcagaatccggctcaggtggaattcctggattggcagctttttggcttcactggcagtcaggtgtcgcattagcacagggctgccgaaggtgaggcagtccatgtcctcggtagccgcagcatagactttgccagccttcaccagggcagcacagctggcctctgcctcactgggtgcatcaagataagggatgcccatgaggctcagcagatgtttgcactcatcattgtgctgcttagtgaccttcaccagccgcttagtgaatttttccacctcctgctcggccccagcagcctgagcctgctgcagctgcttctctgcctcagcccgccgctcactgcgtttggccagctcgcctgacttgagctgtggcggcttgccatcaaagacatacacgggcttgatgccgttctccatcatgcgaatggtgcggtagaacatgcccatcaggtggctggtggtctcaccctcctcattctgcagcacatccccaccctggcgaacagcaatcaggaactgataaatgctcatagaggcatcaatggccaccttacggccaaagtagctcttgatgtcattctcccggatggcactgggggccacatcagcaattagtttggccaggccttgaattcccatggcaacacagaggagggatgactaaaaaagaaaggcaagtcagagacggaggaaaggagaaaggttataactggtgttatctcaccaacttcatgccttcaactaaattccacacaacaaaaaggacaccatgtcagcactgctaaagataaaaagatgaacaaggtccccattctcaaaaaactcagtctagcaggagaatttactcaatagtaaggctcaacgagtaccagaaattgaaccacgtgcttagagaaataagatactgttgatattctaaggtagcagcattatttattacacaaaaaaaacctgcaacataggtctccatcaaggaccacagaaggccaggatgcttggcctggcttgaggagtccagggaccataatggcagacctgaaagacaggcaaatacaccagctaaacaaacagatctgatttgttttgagtctctggagaaccctgactaataaggcagccttgaaaaaggattgcaaacatatctgaatggaggtgatgtggctttctcacaagcttctctaaactctcttcatcatcgcctcagcacataagagtttctacttttattataatgttgctagagtttcaagtctttccctttgcgttttctcgccaccactcagtctgaaatgttaactccatggctcctccccaggtcctgatttaggggtctggcatgctgtagtcactgggctcaaaagagtattgcacttcagagttcagtgtttcccagatagcagtgtttcccaaatcaccctcacgatttttgctacttccaactaaaacccgtactttcattcacttagaattttttttaaaaaactaaactggaaaactcataagcaataatatttgtgttctattagttatattttaatatgtattaaatgtataactattaaaaaggatttttagggggtgcaatttaaaatcatcttgccatcctggccaacacggtgaaaccctgtctctactaaaaatacaaaaaaaaaaaaaattagctgggtgtggtggtgtgcacctgtaatcccagctactcgggaggctgaggcaggagaatcgcttgaacccaggaggcagagaatgcagtgagccgagattgtgccgctgcactccagcctagcaagagagtgagactccgtctcaaaaaaataaaaaactcatcttgtgcccactgttggtatgtgtccaatactccaagaaatattctactggggccaggcacagaggctctgggcagtaatcccagcactttgggaggccgtggtgggaggatcacatgagcccaggagttccaggctacagtgagctatgattgtgccaccacactccagcctgggcaacagagcaagaccctgtcaagaaaagaaaagaagacaaaagaaaagagaaagaagaaacgaaagactccatcaggccttttcattgttcccactctttcttcacagggttctttctagagcatcaatgactgttcaattcttccttctaattcagtccaaacacttcagcatggcatcacgatctttcatgttctggttcccaacctaaccctacattctgggatctcaacagaaagctggaataaggcccgccttttcccacttttccttagctgtgccctcctctcgccatcctctcacgcgtccttccaggtccatccctggattattaatcaattaataattaattgacaatgaattattcatttgattaatatgaataattcccctgtgaactgcagcggcaaaagctctggccttgaatctaggcgcggcatttaccatccgtgtgacattaccaagccactgaggtttattttctcgtctacagaagaagaacgattaccatgcctgtctctcagggctgctgccagggttaactgagacaacagacagaaacctctaatgtcccctctccaggcctgttcaacccttcggctcttgcctcaagccggccgcgctgctggagtgtggactgaggaccagaccatgtagcccttgatcccctcacggcgtcccacagacaggtaggcaggaaaggggcctaaacaactcaagtgtcagaaatgtttctcgtccaaggtcttaggaaaaatacaacacgaccccataaggtggaacttattaccgcttttctacaatggaggaaagagaggctcggagcttacgcgactggcccaaggctcacagggggaaaagtggcgggacctcttgactgcgaatcccgcgcactccagaccccggctccccacggcccccagcgccaagcggaccccgtcgctcccggaggcgcttcccatggggtctcacctggcctttgggacacgcggcctcggcggctaaagcttggttcggggttgccccgggcaggcggtcctaagctcgctctcccttctcagcttagcggcgggtggcctgacgttcagccgccttccaaagcccgcgctcccgtcacgtgacctgctcgccacgcacagcctcttggggcgcgtagtgcaggctgcgtcccctcagacggctgctctcatggcaaccagtccctccagggagaacagagtctctcagcgaccctggcgtacccttctccaccgcttgtccccactccacccacaccaggtccccgcaggcccctgctccctctacacccgaaatcgcaggactacaagtccctcaatgccacttgcgccggaggcacttccttttccggttgtgctaggcgcctgctcctgycgacgtgttcttccggtggcggagcggcggattagccttcgcgggrcaaaatggtgagagcgttgaggggagttccagacggagatgcgaggacccctcggggtctgacccacaccgcgcttatctcctcagacgccggagatccagagggctagacgctcctggaacctccggcttgggctgaagggtggggaagggggaagccccttgccatgaactccttaggtttctcagctcgcgatttctaagggcgagaggcgtggggcgaattttgaataccttccagtttgtatatctctgttatcggtggtgtgttatctttattkggaaagttcttctgccgaacccgtgcccatcctacaatgccctgggcaaatgtttattggtgaagcacttccaactctcaggcacttggccagactttcctaggagcgcccacagcctctgtacagatctctggccacgttccatggacttctttgttttcggccacgcctcctagtgaccaccgtctgacgcgcatctagctctgggatgatgtctattcatctttgtattctcagtgccaaacagagggcccgtaattggaagctcaataaatggcagtgattgtctttatcattttgggggaaggrggccgtgattgtttactgaattgaattccagtgtctcagaacaatgggggcagtttacttctctagagttgttatgttctggattttagaagcattggctgaccggtgacaatgaagttaacatttgtacagatctttacgtttacagccctctttcataaaagacattatctcatcatcttccctacagccttaggaaggaagcaaatacctgttgagcaaaatactccctgctaggcactagatgctttgattcatcatctttcttatttttcagttctgtgaaatagatattacagtcgctttactcagactcagattactcagaaccagaacttgaatgtcttgaccatagctcacaagattccataatagcataggtagtgaggaaaatactgaattagaaattgagggccaggcgcggtggttcactcctgtaatcccagcactttgggaggctgaggcgagcggatcaggaggtcagaagttcaagaccagcctggccagcaaggtgaaaccctgtctctcctaaaaatacaaaaaattagccgggcatggtggttcacgcctgtaatcccagctgctcgggaggctgaggcaggataatcacttgaacccagaaggcggagcttgcagtgagccgagttggcaccactgcactccaggcactccagcctgggcgatagagcaagactgtctggaaaaaaaaaaaaattgagcctgggcgcggcaactcacacctgtaatctcagtactttgggaggccgaggcaggcagatcacctgaggtcaggaattcaagaccatcctggccagcatggcaaaaccccatctctactaaaaatacaaaaattagatgtggtggtgcgcacctgtaatcctatagtcccagctactcgagaggctgaggtatgagaatctctagaacccgggaggcagaggttgcagtgagccgagatcgtgccactgccctccagcccgggcgacagagtgagacgccgtccaaaaaatgagactccgtcaaaaaaaaaagatattgagatctgggtaccaccagtcagtgacttatagcgggggttctcagcttggtgtctatagacactggtccacaaagctccggaaattgtaggcaaactttttcttgtatgtggtttttctcaggcagagagttcgtacctttagtcacgttttcatagtggtcagattattggcctcagaaaatgctaataagggccattgatctgcagctacatttccgggctaaaatcagcctctgtttcacggcagcaccaggctccttgataaccgcatgttctctccaggctgaaatcgtgggattctttgatagctctgatctctttccctcctctaggagctcgaggccatgagcagatataccagcccagtgaacccagctgtcttcccccatctgaccgtggtgcttttggccattggcatgttcttcaccgcctggttcttcgtgtatcctttcactgagcagccagaggaccagcattagtgatgtgggaagctcagggagaaaccacgctaggtacatggaccccgccggttttgtacrttggattggggctgagagaaggtaaggaggagaggagggctrgtgatgcccaggggcaggttatrgccttatttcccaagttcaggtgagctcagtttgttctttggatttccaggacagtgagcaggggacctggctggagtggaggtggggaataggggtgctacagttggaaaggtggtataaggaagggtgcactcaggtgtcaggaggtctgagggctagtcccagctccggccctcatgagctgtgtgacctggggcaagtgacctaactcctctgggtctcattttcttcatggcagtggagcaccagagtccaaggcatctcttaggcccytctgcctggctgytctgagccagataggcctcccagaaggcattgagccaatgcttttctcctcagattgccgtgggctgggctctctgcactccacagtccacccyttcgctttgccttaactgctgtgcccagttacgaggtcacctctaccaagtacactcgtgatatctataaagagctcctcatctccttagtggcctcactcttcatgggctttggagtcctcttcctgctgctctgggttggcatctacgtgtgagcacccaagggtaagagctgcaatgggatggatgcgtgagcctccaaggcacagcccagggaagcctccccagagtcaggtcagcagggtccttaaagctcttaccagcatgaccccttggttgatggagacagactcagtggaatgggtagggacactagacatttgtgcctctttccctgcccctcatacggatttgagccaaatgtgactctcagttctgagctcacatggcccaaggcctcgatctgcctttgggatgtaccacctagaagtgtggacgcaggcatcccatggctgtacatttacattcttagaagtcagaccccagtgacttggagaggctgctgggaagtcagctggctgaaarggggtcaagatccagggcttaaaacttgctgcagacaatccaccaaacaggccastaggaatcagctctggtggctcatcctcagaggtgtgtgctcaatagcccttgccccaggagcacaggggtgcagggagagaaggaggaaagaagggccattggtcttattttgatacccctctcctcttttaggtaacaaccagatggcttcactgaaacctgcttttgtaaattacttttttttactgttgctggaagtgtcccacctgctgctcataataaatgcagatgtatagcagtcctgtctggggcccattctgcaggggtggtgggtgctgggacmtacattgcttccccaatctcttccctttcccatttctcatctgcctttcacagttcctgctgctgatctacttaagggggatgagatttgtgtagcaccggtgttttgtcattggaatttaaggcttacctgtggatagggtctgggcctacccttttctattgtttctaggacaaacttctctgggaacccacatcggtccattctgccctaggccagtccctgccataaacatagccaccattctctgtgctggggcatcctcaccaggctcagcttctccccctaagaaggcttttctcctcagtggctacttttaatgcaggwgggcagcagcgggtgcgcaggaggrgaaggtgtggccatgggagaggctgatgagtccactcctagccccaatatgaagctaagaggataaggggtatgaagcatccatttggccctctggttcaggcgctcagagattccaggcttctcaggaaraactttgaattccaattggccctagccttataggtgactcctctcccaccagaccaatcccaagaagagacaaggaggcaagctcagatacaaagcagtatttatacatttatttatatatgtatatttacttcagaagaaacgaacatttcggggacaggaagcaagcaggcccggggctgcttccytcactgcccacctcagagtcagagttggcacatgacaaataccaagctcagggagaagaactgggagttaactgggaagtagggggcgctctatgcacacgcaggcttctaagggtgcacggtatgggcaggaggatttgcactgggaggccctatgtacagcttgaagctagggggagattagcscagtgactacaggaacaaacgccaaaggagagagawgaagggwgggatgacctgctgraccccagggcagggacagggccaagacactcacaccattgccagccgggcagctggcagcttccagcaggtggcccacttacyttccstgaagccyktttaccacaggcttaaggcaactttggtccaaggttgaccccctcaagcagcttggatccccagcctgtccccaactcctgcactgaggaacccctccccaggcttggaaacagagccagctgctaacggttttggggctgtgctgtgtccagatgggctccatggggcagtggacggtcactttccagttaaggactgagggcccgcagtccaagaacatgaacccccattgaggaagcccaggaatcctattacatggagtggggctcggcagttttaaggcatagggaggattcccccagtgggagggagaacaaagtcatcataaggaaggctcagcccctgcatggtttgggaatcgtaaaattcctatgtcaacggaaccaaattggggagggggctgggagcaagctatccctgctattcctgcatccccstgctcttccctatcctgaggacaagtgctttgagatcaatggcaaaagggggcctgcagttcataggcttcaaggaaaggcctccactatagaaaggcctcccattcaaagctgagaatgagtggtgggacaggggcaaggcctgcttcccaaagaggtggcagcataccacagggcaaggacagcaattccctttcccatttctggacccatggcagacatggctaaatgaatactacactccttccatgagcctggatgtagcctcggaatgcaccaggcaccactaagaaacttgaaggtggcacttaagatacaacttcttccctaacccagggtcttggtggttgggagtgggatgggtgtcggaggctccctgggagggatcagagtcagagccctgtctttgcaagtgtcacacccctgctctggcccactctgagctttctagctccatccttccattccttcctgccctggtttaagtgcatttagtaattacttcattaataacagcaaaagctatttgcatctgcccaccagccaagaccaggctgctgcttgagggattcctgctcctctgctcagagagaatgatgtggtcactgatcactgtgagctccagacgctcccaggaacgcaggcagtgaagctgcaataccatctgggggctcaaagggaatttcctcttcctggatattcctggttcaaggctctagggcttacctggcccactggcccctactggttcaggcctgtgaagggctgagggtggcttcaccaggcactgagtagacttaaggcacaaagtcagtttctccaacccaggcagggctggcctcggctgccctgggacttcttgggagccaagccctcccagggagaagaaacctcctgggccacacttaaagcttagaagtccgagtctggcgtaacaggcaaaccccagaaagtccactaccaagccatcccccagggaacagctttaagggggagagccgtctgccctccattgactcatgggggtccacccaagtctcttagggctggatccgagccccctgctgatctcaaaggtgggcaggtcctctctccaaaagggttggctccagtctcaaaaggggaggcaagggagaatgggytstgaacaaatcagggccacaggcttccccttccytccagggcacctgaaccagccctccaaccaccatatytggaaagaggtaaactggtcctgtcctggcccctagggggtggcaggcaggaaggcccaagaagtctctggctctcaggttccytctgwgccgtgaggggcgaccagctggaacagcaactccagtgtgaagacttccagtttcaccagtctcgggtagggccagtgaacagcagagctggcctgcagcgggctccagtgtaacaccattgcatccagtgttggggggtgcctgggcacccctggtccctggtgtggtgctgcctcaggagggcagctcagtcacacaggcggtagaagtggaagtggtagtctgtggctggctgggcgagagcctctgaactgcagttggcctgaccctgggtggaagggcagtgggaaggtgaggtggctctgggggtgcggggcagatggcactccctgctgacattgcttgacactgtgcccccagccctaccacatactgtgcaaaccccccattcctcaagccccacgtcgcagacaggggtgcccagacctccagggtaggtgggatgcccctgctcaccagcagtgccacccggaagtggtaggtgaattcayggaaggacaggatggttattggccaccggtgagaggtgccctggagagaagggagagaggggtcaggacagactgctgcccttatcccaaccagcatctctcaccacggccgtcgcagtcctggggtctgtggggagttttatgaaggaaaaaagcagagaactttgaagagataggaaggagcatgttctgctttggcagaaggagcaatggcagctactccatgcagaccgtgcccgggactggcaggtccacagccacctccacstggsccctgcctccttcccagtcctgttgtgstgggttccctcacccactatgctctgggcacatcaaagtatttcattagccccatcctcagtacaatccagtgacacagtgctgctactagccccatcttctggatgaggaaactgagccacttcctaaaaatcacacagtgtggcaaaatcacacagctgggattcaaacccaggtctgtctggctgtctccctcacagggtggcatgcagcctggctgcaggcagcttgcccatctacctgaggctttggctgtgcgtctgtgatgtggtttcaggcccgagcaccatgtctgctgtgtgtctagctgggctctccctctgtcttggacmctgtctcttctgcagggcgacagggctcgggcctccctcagaagcacccccacctctgttgcaggtgctttctgcacgtcttttctccctcactatagagtacgttcttggaagtcaaaacctgtgtctactccacctctctcccctgcagctaggcccacccagcacagggcctgggacagatggggccccaatcaatattttctgagtaaacacatgaatgggcaagaaaaaataatcactacttcccttcatttgtcctgagcgtcttctcccatggcctcttaggctcaagaagaaactgggggtccatcagccccagggacagtcataacttccggttacctggccagggaggagctcaccatccagttctcccagaagaggtggccaaacatggaacctgaggggccctctgatgctgtacatctagctgtgccacttccccaacctgagcatgaggtcggctccttcctgcttctgcagacacctccagtgagccacagccctccccgccatgggctcccagacacctgcctgtttccatcattgcactcatccacattagcacctgtgatctgctgtcttccccacgtctccagcacggcagggctgggagatgctcagcagagtgcaatgaacaaacacgggcacgcgtgcccctccctgggacacagaggcccaggccccagagtgtcccttgtggagaaggctttactctataactcccagcttctgctccttgcccatttkggggcccagttgtgccaggagagaagcagctcgggcctggccggcccgcagcttcccagtcccacctacctgggtgtcctggtgggtgtggagactctgtggaaggctcccctcctcacatggttcctcctttgacctcaggctgcacagcaccacagacacgggggaggaggagctgtagacaggcccagttagcagagaaatgaggttctagagtccctcaaccccagccccctcccagccagcctgccacacgcctctgaatctccacccagcctgaaacaccgcataataaccagggccctcgaacaaaacctttcccatcgaccatcccatgtggtcctcagcccatgaggccaggtcatttagccagttaaccacgaagtaggcaatgaagtcagcacttatcccaccatgcaggaaataccagagactctccggctgtcctcagactcggctgttctgargctctgcgggagattctccctggctccyctcctgcctcccacttccccacaccggcactcacttyatytgcagagtcaggctgaggtgcagtggggtgccactrctgacagggatgtggtaggtgaagttcccaggcctgcaggggcaaaactggcaccttagcctgagggtaccstgccaccccccacccccaccagggactcctcagcccccaatctgtactggagccctccagaagagacagtgtccaagggtagcctggaaaggggctacccttccttatgggggaggctcctccctgaaagggcaagttccgggtgatctgtaccacctgggctcatgtcacctgaggacctccctgggtgaggggagggagcccagcccacctgcaggcatcccctggagcacagtactgggaggtgatggacatcgaattctccagcacctggatggaggtcagggagggcactggctctgcaaggagagaggctgttggggcaggagtaaggtgacaaggcaggacacaaatgagaagctggcaagtctttccttgccagacttgaagcagtcactcacaccttagtatgaataagttccaggttatttttttccagacctccacaatggccagcatcacactacaccctttcctcagcagccctaggactacccagttcccatgagcctgacgtctgcctcctcaaaagaactggaacacccagaagtagggatgggtcttcacatcccctgccaggtgtgcaggagcccgctcgaggcctgtgttcctgactgcgggcatctctcccagttctgggttcagaaacatcagttacactggtagcttgaaatcagcagtgttgacagcatcacacaaatcaggctcccctctgccccgaggccgatgattacaccgctaccagcacgctgctcctcgcagcctccctgaacaaaccgactgcaggctggctggctgggtaggggtgggactgaagtgtgacaagtcagatgggggagacaggacttcttgctcatctagttcacatacagtcttgctgctgcctgactatccacccaggaagggggaagctggggccgctgaacatttgctggacctggtacgttttcagctctgaggcatgacccagggacccaaggaccccaacaggatccaggacaccctgtgtggtcaggacaggtatcagatacagacgagatggaaggtgcccttcccacatcccttctgggcaaattccaaaggtcctttaaagagtcagctcaaatgtcaccaactccagagaagttttccctgatcctccccaccttcgtccggattaagtgtcctccccagtcccaaagctacctgcatgtcccctcagagcctcatcacactgctgtgttttcatctctgtgaggtctttggggacaggggcgtgtccatcttcatcacccccagtcccctgtacagagccagccacagagtggcaggcagctcagtaaacaggtgcctggcaaacatctcccccatggggttcccccatcacattgaatttccatctctgtaagccacattttccaggctttctttttcttgaagccacaaaatccatcagatgaaagttggtgagagcagagctgcctggttgaagccaggaagcctcccagcctccccttcaacccccagggcagcccccagcgcagcccccagggtacctcagaggaacccagtttgaaaactacaataaaaggttctgtagctttgttaaaaccaaagatccaaggtttgggaaatagtaggggagacccagtatagcaccctcctggtgctggcatggcgaaggaggagccaggctcgggatcaaatacaagccctgcctcggaggggctgtataaccctgggcaggtcacttcaccttagtctccatcccatttcttcagctgaacaataggaacaacaattcctttcttgcaggagtgctgtgaggactaaatgggatgatctaygtaaggctgcaggcctgattcctgatccttattctgtgctcagcaaacgtctattgactgacaagtctgaacccagacagtcacatgactgggctgaggtgggccctkgccagtgagccttgccaggctgggctgggtagtgtcaggggtgcagcaagtacctgactggccctgggcccaggtgggctcagcagggcccacgctggactggagggcccctcggcgggcccggccatggaaaccaaggctgggactgttcttggctttgccctgccccccagggaaggggactgcagggctggccagaggctccagactcttgtgatgcttggagtggccaatgccattgactgaaagaccccaggacttggctctgatgttggtgactggcagaagggcmwtctggctggggcctgtggatagaaccaggcayaggctaagaagctggaagctggctgcttcctgtccagctgtctmtagggccccacaagactgagtgaaccccatgtgtctsttggtcytctcaggggaacttcccagtcattgtccagagcytcgttytaggctccaggagaccctcccaycaatgagtatttgggcctttctctctacgcaggtagcccccgccccaagccccagcccacagaaagccttacctgagyggttggtgctggggctgggacttgggctgagaacatggccagggttaaagctggggccaagactaggaccagtggtagggttggtagtgggtgaggaacagcagatgacagggcaggggtggctggaacacatgtccaaggtgcggacagcagaacctggggccgagctggtgaggctggtggtcactgaggaggccagaggctgtatgagccagagaagccccaaagacagaacayagcaacctccctgtcctacccagacctgcccagacacgcacccagcagcaaagagggctgtatgcctggtagccccgtggtcaagggggactgtcggagctgcgtggtcccaaagctctggctggacctgctggggaaggatgggctgagctcagaggggctgggagagcttgaggggagagggcctgacagtcctggagaggcaggagggcaggaagaggcagagagggaggggagggaggcaggaagaggggcagcaggagccagaggagaggggcgctggtcagcacgtaccatgggcacaaggcctcactccccccagggggctggggccggagcagggccaggagacaggaagtggacacggcaaaagagctaaggggcagcaaaaaggcaaagggtgagacaggcaaaggggaagagaagagaagacacagtcagaggtggccccaggagctgggggtgacagtgggctcacagagcccaaggccctgccctggccctccttcctcctaccccatgttccaaccccagcccctcagacagccctgactcgcaggcccagctacctggaggggcactaaacaggccagacagaaacatcagcgtcagcagggactgggaaaggctgcccaccctccaaggaggccctccctggatccccacagcaccccagcaggctaasargctaaggatgaactcctttagagaagacagtctcatggctctctgacctgggactgcccaccaaagccccacctggcctggcagcttggcttggcctccaggaacctacccatcagtgtctaccaggtcctcctctgtgcgcaggctcagcacgtacagtgtggacatggacaccacgctggagccacagaaaagggtgaccgttagagctggagccaccatccagtgccctctctctaggacaaggctgtggtccttgctcctgaggctgggctcccasgtgatgcctacaaaatgggtcaccccagargggaagakgcagaaaggcccacctcaccgagacctcagctgcctgatctcccaagctacatcctcctcttcccccaggcctgagcccatgggcagctgactccacygggcagctccactcccctagtcagccaccatgagagcccrggggacaagtcacctgaaggccatgaccaccaccagggcaatgatggttccctgcaggaagcgctggctgatgcaggcctggtccggaaccacggacgatgactgaggaccaagaggaaaagtgcaaatgcaaagagggccaggctgaggctgtccccagtgggctctgctggaggtcrgaggagcggttaagggggtgccccatttccccrggggcaaagggagaagaaagagaaacggggctgggagggctacagagtcacaaggagagggaagcaccagaggcagtgaggctggagaactgcaagccagaaagggaggccacaagggaggccccctttccaaccygcctgccatccctgctcacccctaccttgctggccaccttggggggcytcttcttgtggggracgctgcccscccgactgaactggctccctgcatggctgcagcaagagggccaggatcaggggtgtccctgggaagaagggtctcaccttcccccaccccgcacccctacctgaaggygcccgagctgccggtggacttgaggctgtcgagccgccgcagcttggccagcttgtggctccagcgctccagctcatcaatgcgcgtctccaggttgtctgtcagcttgcacagctccttcacggcccctacgttctccatgaagatgcgctcctgccatgggccatgggccatgggccatgggccaacacagagggcccagtcagccccgggagccccaggctgccagacatcagggggcaggaggggcggccactgtccttggccactgggaggccctcaaagtctccctaccygggcgggcccctccaatccagcctcggctcccacagctcctgtgcctgtctccgagcaacacctccacctctgcaccttcacctgggctgtcccacctgcctgaatggccctccccactccctgccagagctctcctctcctaagcctgaaggctgcagccccgggatctgcccctcggatgactggtgtctcagatgtcagcacttcactattcagctggggtggagacctattacatgcctccttggcgcccagactcaggacaggtaagtgacaaacgtcgtcctcacaataaaccacgtatttcagcctggaggtaaccatacgaggatgtctgtgcagttctattaccgccctcattttaccgggggtggaaggccatggccctccacasggtttctcttgcccttgatcacacaggctccaggggccaaatccctacccactcatctccttgaacactcaccccttccctgtggggtgcagagggcgctctggaggcagcatgagagccgagggtgctcctgcctctgctttgcagtgcccccagtatctatggaggtgatgagtgttccccagctggctccccacttgcctctgggctccctcccwttcccscacccacagaccttgttcaccaccaggaagttctctatggttttcccattggcaaagaccatgtctccggtgtctttcacagcctcaggcaagatctccttcacctcctgagcgatgacacctgggggcaggggacaagccaaagatgggtgggggggtggtaaagggctactcacagctttgtaatgtacagtgggagcaagactggagagggtgaagttctggaacccagagatttggattccaaggagccctggagcagggagatcccacgaaccagtgttcacaggattgcaattccagggctcaggtgtgaggttcctgggctggggtggggcggattcctgggggtaaggatcccagggcaagtgggtagtattctggcaggttaaaggtaggattcatctagcgcgaagggcgagggtccctgggccgtgattctcagatttccactgacaatggggcgaggttccggggacctggagaggtgcgattttccaaggtccgaggggcgggacttctagaaggcatgattcccaggggcgcagttccgggagtcaagaggagtaggatttccaggtgacagggggcaaggtcactgaggcccgaggtttctgggtttccggaccccagtccgcaccagcccggtccctacctgtctctggcgcggtggcctcgatgcccgcgctggcggcgaactcgggcttgtatctgtagtgcaccagccgcatgcgcgagatcctcttcaattgctcggtggtgtccacctgcggggagccaggcccgggaatgaacccctcctgcggccgtcccggagcaggccccggagcccaggagggcggcagcctggaggctgcagtgtggagaggagaccccaccactggagtggttagatcgggattcgaggccagcctccctcccttccttcccccgcagctccgcctttccgcgtagtcacgccccctccccaggagccccgcccccgcggcccgctccagcgtctggacccgcccggcccccacagccctgtccccacctcctgcacgtgttccttggcgcgcaggtcggaggggtgcataagcgagcccatgaccttgacattcccgtgcacaaccagcgcctcatccggccggtctgtgttgatgcccacgcggccgtggtggaagacggtgtcgggcacctgtgcccgctgccacaacacatcgctgtcgctctcgaactggcctgggttggaggcctaccgcgagttggggctggatcagtcctgggggatagggaggggacctgcagggccctgggagcagggggaaactccacagcagcccctccccttccagccagggtttctcactgcaccaagcccaacttgaactgtccctcccactgtgacaacttttkgtcacttgtgggatcccagaagctaccakgcttcgtccacctccctgctttactgtggagaccctgcagcccagagagggtgggagctttgcccaaggccacacagccagtgcctagcaggatgagcatgcccactcctgactctcagtacccgggtacttctgcttgctgtttctcccagtcctggggagggctgtctacgccctgggaggaggtggccctcacccgcacaatgatgcgctctgagatctgggcggccagcgtgtagttctggttctgtgcatgagcctggagggccaccaccagcatgaagtacctgggacacacaggggtctcagaagtactcatggcctgcccccgcccccagggccaccctttccctggccagatgcatgttcatctcaccccctcctacagaggaggaacccgagcctccaccagggggcagaaattccccagggcccacagcaagaagccagggctgtttctcaacccagaagccaggcttctgctcttcccatccttaagtcaatgaagggctctaaatctcaggtctctcatctgtgaaatggctcagcctgtaggactctgtgcctggtgtgccacccagggcrgtgtcttcctgcctcagaaatggaggggctccggggcagggcccccacctgctcacctctggtccgggttgggcttgcccttcttacgcatgttgttagcggtggtctcgctgaagtgcagccgccccacagtcaccttcgtgacctgctcagggggcagattgaccctgcagaggagaggcagggtgctcagggggcagggagggaggctgcaagagccacgccactgaggggcacccaggccagcaacgtacatgaggcggacaccctgggtacctccctggcccctccattcccaagccagctttagttgtggacccttctaggtaccacccccaacagggtcagacactcacgtgaccgggttgaagggccgcttgctccggtctgactgggactgctcgatgttaatggactggttcagggcctccagctgtggggagtgaagccagtggcacctcrggatggggctacccggctggtcctgccctcctgccccctctcagccaggcctggcccaactagagctcaccaggaaacagggcagcacccagccctcagccgcgattcccacaagctcagatgccttctgcatggtcacacccccccacaccctacttcacacccacaccctcctcacccctcacagcataccactcccccaacttctgcacagctackcatgcaktcactccccaaacacccacacccccattccacacccacacgctccccccacctctgcatgtatgcactcacacacagacacacacacacactcacagccccaccctccctcatgtccatacccacacacctcacagcagcctccaagcccatccacttgcacctaggcccactcactccccagatcctctccatacccacgtctcctctactcctccacgtgcactggcagagccatgccaaggtaccatgcctggctcactcatcacaccgaagccgacagacccagccatgcccacagggagctcatagactcaaaatcagccactactggggttgtgctgtggtgcctcccaatgggtcttagggraggggcccctggggaggggaccagcatggagtctgcctggagaggagggatgggtgttgggaagggcatccaaggcaaagggagccacagggtggagggcgggggctgcgatggtaccacaagtggcagagctggagcggagggcagggcccccaaggcccccgtggtgcagcttggaagccggggctttgctgggaggacactgggggccttggaaggatagggagtgctgtggccccctgagtctcaagtggggcaggagttgggggtcccagctgctgtggacattccgacaaggaagggaggtaacccagaccaggggatggacaggaaagaggcgaggaccggaccaggtagagggatcttccagggcaatagcaaggccagatgcatgatgaggttggggaaagagggccctgacccagatttgcggctcakgtaaccaaggccctgcgccccattccctgagaggggagcccagggtgggaggcaagtgtgcagggagtttagtttgggacctggagctgaggcacctggtagagggcccaggagatgggtyttgactggggttgcagacttgggaatcacaggctggagcaggaaacggggcgagagggaggcagggaggcaaggaggcacagagtcagggtaaggtgcccaacgagagggaagcaggctgaggagtctaacgtttaaggggcaggcacagggcgaaagggaggcagggaggcaggttgatgagcccaacaagagggaggcaggcgcagggcgagggggaggcaggctgaggggcaggcacagggataaaaggcgggagggcggggtggcagtagcagtgggggagtttacacacacatacacacacacacgcacacagatgcttgcttttttttttttcttttttttttttgagatgaagtcccgctctgttgccaggctggagtgcagtggcgtgatctcagccccctacaacctccgcctcccgggttcaaaggattttcctgcctgcctcagcctcccaagtagctgagattacaggcccgtactaccacgcctggctaatttttgtatttttagtatagatagggtttcaccatgttggccaggctggtcttgaactcctgacctcaagtgatctgcctgactcccaaagtgctgggattacaggcgtgagccacagcatccagccaacgcttgctttttctggggtctttcagtgcccccaaagggccctcctgccctcccttccttgctgagccccaaacttgccttcactccgtgcagcttcagatagaagcagtcgaggggcttgaggccctcgggcgtcttgacgtacttgggctcgcccagcatgccgatgtacactgtcacctggaagtggttcttcttctggcacacaaaggcgtcgtcgcccaccgaaaagttgaagcccttgtccgcatccacgcggtaggtgagcatgggcctgggggggcgggtgagggcactcccctgaggccccagagccgggcctggaacatcggttcctcctacctgctgggttccaaaaccatttcccacaccacacccctgcatcytcaaaccaccaatgyggctgcccccactcctgagaaatggaaactgagtcccggagaggattctagtacagggctgcaaactcctcagacaacattctctcctataccccatgccttaggccaccgccccgccctggtgatgggggaagcagggccagacyctgaggcccaccagactggagggaactcctgagtgggggagggcttgactgccctccccacactcggctccttcccagaaggctgcctgaagccccctcactcacccgagagggactgtgtctgcagagcctcacagcgcctgacagctagttgccctggaaacggtggaaccaggcgcctgctctgctgcagacccagcccctgcccaccggcttgctcaagcccccagatgccctcattcccactccctcctcattcctactccctccgtctgcccggggagggaaggggcactcctggactctccctcagactcagcctcagtttgcccatctgttgctgggtttagtgtcccatgtttggcccctttgagacacctctagttgacagtaaaaagagcaactgggccaggtgcggtggctcacgcctgtaatcccagcactttgggaggccaaggcaggcagatcatgaggtcaagagtttgagaccagcctggccaacatggtgaaaccccgcctctactaaaaatacaaaaatcagccgcctgtagtcccagctacttgggaggctgaggcaggagaattgcttgaacccaggaggcggaggttgcagtgagcagagatcatgccattgcactccagcctgggcaacagagcaagaccctgtctcaaaaaaaaaaaaaaaaagagcaactgttggcctgtggcttagcgcaccctcactcaggtccccaggcacaagagtggtcacaggagtgcccagtgctggcctggcggaagctgggcagggagaatgcttccaaacttgtgggaagaggcctctgggcctggccagtgttgccaaaggcctgggctcaccacctcttccctcctggagctccacccacctgcctgacctakcaaagcacccaggaagtgcctgggccacttccggggctgcagctgccaagcttcctggccttggggcctggggtggcaagggtggcccaaagagtatggcagtaagagtaaggggtttcctccccatgccagagaggctggagtgccatacgactgcacccccacctggcaggacttcatgggacccttcagccaccccagcagccagatgcccccaggcctgggactgctggctaagaattcccccaaagcctggagcacccaactccatgcagctggtctaatccactggcccaggcctggcaatatccacagttaccctgtcacctgcccactggccttctgggtgagccasgggagtggtccccacakggctcccggcctgcggcctggaaagatggagccatctgggtgttgagggggtgctaggaatgctcaggcagcctctgaccggatcctccccagcccctcctccctccctctagggagggggctgccgggagggcccagcttgggctcagcttccggctaccttcctggaatgcagagggaggaggtggggaaggaggaacygggggaaaaaacacccatctgcccacttctccctgacttggttcccagctgcccctccctggcagtcatcaccttctcagggaggcctggggctggcmtaggagtcaggagccctgactgccagtcctggctcttccctgagcctgtttgctcttctgtgaaatgagtgctcccaggccctgctccaggaccttgatggggtcctgggctggggcgtcccaaggtgggggggcctggaggagtggggagtgttgtagggcactcacagctccttgtagttagcatcgtacaggktcgcccacttgttctgctgatgaggctgccacttgatggactggtagttggggtccaggtaggagccactgaggctgtcactgtcctgcaggaggcctggagggagggaacgcccatgtgggccctgcaccttgggtcccacaccccaccttgaagagttggccagccatgtacctggggagggggcacctggcgggtgccaaggcggtgtctggacacgggcaatgctgagaggcaaggaaccagggcccggggagagcggaccctggggaggccagggtggcgatggggctcgagtggggtgcagaggcagggctgtcacggtcccaggctcctgtttgatcattccattcagcatctgggcattgagggtgctsgggggggattcagagtgcttcctcttcttggaggggtgtgtagggagcctggggaaacagaagtgtgcgccgtgggggctggctctccccgagcccctcccactgggtagtatccacctctctcccctctctagcctgtttgggccaggatgtgccccgcccagaggacacctccttcaggaagccctcaggctttgcctcctcctactccccattgctctgtgctgtcattttctgcttctgtcactcttcgcttcccccagactgtggacaggagccacacctgacttggtgtctccatcatgcccagcaacagggctggcttacagaatcacagcaatcgcttgaggaatgaatgagtttgtccctgcctgcagtgtcacactcaaggtcaccctttatagtgggggctcyatggagagcaggccctgtgatcagaaacaagccacagagggcctgggccacaaaaaccagggaaggggagcttccgcacggcactccttccccttctggtttacaaaatgttttgacagcagaaccttcctttgaactaaacctttcatggaatctccacatgtaaaacagatgaaaagacaatcgtgcaggttgagtcagagtsgggggcttgggtctaggaagaagactcctcagaaacctgagggttccatgagacagctgcaaaatcactggggtctgggtaagagcacagccccgggcccagtcctggctctgcccctggctcatgatctggacgggacatttcccccatcagagcctcagtttacctacctgtgcccaccagataaggtagttgtgagcaattagccatggctgtaaacccctcaaggtattgctgggtaaacatgtataaatatgttacccccatctgccctgcagagccttctgccctccctgggtgcatcccggtccctacctccctctctggcctgcccgccgccctgcccaccctggtccctgtaccccaccttcccaccccatggagccagccacccacgtcttactcagctccgtgctgctgcaggagctggtgcagcatctgggactgctgggtgtggtgaagatcagtgggcaccagcccctgccccatggcagcgtagtgggggatcgggggctcggccttcatgtacagatcccgctgcaggacagggtagtgaggtgggggtggtgggggtggcggggggcctggcaagtgggctggaggtgggggcggatgctccaggcgggagggcactcccacgtggcacagtgtctcaggggttatcgtgcgcaggaggtggggctctgcaggagagatgggggagcgggcatctgagaccaacctcactcaggctcctgggcactgtcctccccaaggcagagtctcctgcttccaccccgtcctgagccaagcccgggggctgccccccacctaccctaggtgggagggccgttggtcagccacctactagaggcctgggcagggaggcacamacctgcccaaggrggggcagcctttcacctcatcctarccacctcctgcccccaggctggaccaggagaatccaacccaaatctaaaggtccccctccgtccccatctcctctgaggcctgctcctcctctgggcctcaggaaggmgtctccggagacccccagcccaggcctgcccagtgttcccctctccggcaggcagtccctcttctgggctctcaggggccagccccccagcctgagcggggaggccccagctccctttgttccccaggaggcattccagggatgtttttggtaagataaacagaactcttgaccccaatccggactgcggggagcctgctcccgcggtggttctgctcttggccacctgggggccagggcacccmtgagcaccctctaaggtgaggtgggcccggcctgggaagcctgcacccakgctgcacccacggccttccccagccacccacttaccgccgaagggtgcgtccatgatggcgcaggcgggcaggcgggtggcatcaccgcggggatacttgctcagaggcagggccaggctccccacccgcccgtggggaaacaatagccaagcgccagggagtatttgaccagcgataatctcagcccgttgggcagccgctggccccctccctcctcccctacctccctgataaggccgccccaactacttgcccaaaccctggagcaggagggcggtgcccgctggactcaccattcacctgctggggggagtaggcctcggagcccgagtctgggggagagtccggcagtgtgctgcgagagccaggggaaggggccggggggtgagcagctgagcttctgccttccagctgggcagcttctytgcgtggtagggtcccacagccccccagaagctggcgacactgaggtttsgtcacatccacccttaggggcatttctcygcaccacccacattggggtgcctggcagggcctggggccgaattgtgggtaggggaccgcccaggatcccctcagacctacagggcacttggggggcagttactagtgtccttgatgatggcacagggactcaaagactcccgccccagaccraaggccaggasttcttctctcttcctgcacccactgaagccccacagcttcctggaaacacagggccctagggggctgggcctcagggcattcagcaggtcatggggggctgccccaccagaggcaggtgtggactgggaagggagccagcaccaccgggcstgggtttatttttttcttgcaggtttcacttttatcagtgttcaggaaaaagaacaaactcaacccaagaggtcaacacgtcctgcgtgaaccctgtgctcacccagcaagtggaaggctgtggccatatgggatccagctctttggccatccctggtccccacatctggagcaactccccattcccatgcccagggaactgccagagaggccatggccctgttgtggacacagccctggggctggctccagagtccccctgcatccctgtgccagccacccacccaccttcggggcctcatgtagaaacctatacaacgattcaagaacacagaccctgcaggttttgtgtgaatgatacaaaaacgtgtatggggactcaaacccatactcctcgccacagcctcaggccccctgggctgccactccgtcctgtacttccctgacaatggccaggccttctgtaatgtgttaaggtctttcacaccctgcagtccctgcagtcccatgccccaagtccacagcaccttgtgttctctcctcttaagttcctctggcacctgattattcctctacttggagatgtactggtgaatacctctccccagttaggcttcaggagccactgcagagccgtgtgtctgttttttttcttttctttcttttttttttttttttgagacagagtctcgctctgtcacccaggctggagtccagtggcacaatcaccactcactgtaacctccacctcccaggttcaaacgattcttgtgcctcagcctcccaagtagctgggattacaggcatgcgccaccacacccaactaatttttgtatttttagtacagacagggtttcaccatattgcccaggccggtctcaaactccaggcctcaagtgatctgcccacttcagcctgccaaagtgctgggattacaggcatgagccaccgcacctggccttttttttttttttttttttttgagacagggtcttactctgtccctagcagtggcatgatcacagctcactgtagcctcgacctccctggctcaaactattctctcacctcagcctctcgagtagctgggactataggcacacgccaccacacccagctaatttttgtattttttgtagagatggggtttcatcatgttgcagactggtcttgaactcctgggctcaagcaatatgcctaccttggccttccaaagtgctgggattacaggtgtgtgccaccacacccagcctcatgtctgtcttgtttatcacctagactcaggtctggccctgggtcccttcctggagtggccctgcccacagagtccctgtgtggctctggacaagcccctttccctctctgagcctcagtgtgccattaaaatcctgacggtagcagtggccagggctccttgtggggtctcccaggagctggatacccaggaaggctgatgagctcacgcaatcataggcacatgatacagcagtgggcaccagcaggcgcttaccaaatgttagttctcctccctctgcccccaggggcctgtagtttaggaacagcctcacagcctcaagcaaacagtttgccttctgcagcaaaggttcacccctggcaccccaagcctggcctccactcccttctccccaaaagccagggagctcaggaagcacggccggccatgtgtccatggccaccatgcacccagggcatcctctgtgcccttgttgcttcccacgataatcttgaggggtaagcatttgagggctcacttcacagaagaaactgaggccatgggttaccgaggcagacggctgataaatggggaagctgaagttggagccaggctgtctgaacacagagttcatgcacctagtgttttaatgctcttccacccagagacaggggcccctacatttgccctgagctcccctgcagacccatgctcccagcctcccgctgtgagcatgtgccccgggagctgccctggagtctggctggccgggtggctgcctggaacctttggtcaaagccaggcctaaggttcagccctgggtcaggcccttggtgtggactcctcagaaagatggggggaagggcctgggttctgggccccatgaggcttgcttgggtaggggggaactgaggtgccacatctgagccatgggccagctcctgtggccacagtacacgtcagctggatgcgtaagtgggtgggcttggcgcgcgtgcacgggtatgcaggtgttcccatgaaggtaaacagtcacagcctccagtcccgccgcttcctgtccactctccacacagcatcgagatttttctagcacttacgtcagccctcatcactcccatgcttggaagctttgtggctgcccactgcctcagaacaaagcccaggagtccccccttgacctggactcatcctcccttccctcacctgcccacgcacagccagtcacccagcccaacccatgccaggccagtgtctagcacctcccaggtcacggccacagccctgctccctgcctgcccctatgccgctgtatccccctactccctgcccttactcaccctggggcatagggagccttgggctcagccttgatggggggcccggtgccccccgggaagggcttgggggcagcgcccatgccgttgttgttgttgcagttcagcggggtgccgtagcccgggggtgggaggggaccatggcgccccggggagggtccacccccaggggggctcaggtggtggaccccgctggagccaggcatcgcaggctgcccgtgggagtaggaggccgagctggctggagcagagatgtcagggaagcagctgcggggaaggggggcggctcagctccagccaggaccccagccccagcagggaagtagccgccccctccctgcagggaactatggagatttcggaggagtcagtggctgggaagggacgaggagcagctttcagaggtgggaccacagcagaccccaggtccggccctcagacctccctggtgacagaagggaggcgaagggctggggctgggcgggtgcaggccgggcgagggggccactcacaggtcggaggcatcctccttgctgatgtactcctccaggatgctggtgtctatgttggagggctccagggcaccgttgatgtcgtggcctgcagggcaggagagatgggctagggaagaggcccagctccctgcagaccctgggcttcagggcccagccctccatccctgcccaggctggccctccaaaacagatgcccctgctccttcccacccaggtatccatgtgggggccggctctcaccctccactgcctggcacccctccaggaagcactgataatgcccccccgccccaccacaaggccaccttgagtctcagaggaggagaggggcccagggcatggatctgggtacagagaggccgatcctgccatgcctctttctagctgtgtgacagggaacaagtcctttccactaatctgtcaaatggggtcactgtgcctctgtcttatggggtgctgtgaggcacaaatgaggtgcttactgagtcgagagccccgtgggtgcccactgccctcgatgggatggctcggacccaacaggcactgtcctgccgtgtcctccaggggtcagtccagatggcccagctccaggaacgcaggagcacgaggcctggctgagtgggaccatatatcctgggggcccacagggctgtgggagtctcctgcacccaggccctggccgcaggcgggagtggggatcagaatcaggagagctccctgcaccctcattggatatgcccatcaccctgttgggcacaggcgggggaacttagccccctttttccagaggaggcagaagcctagagaaggaagggcttgccccggcctcccagcagggaatgatggccgccagagctccactcctctgcctgccgccctctcctgggccctctgcgctggccccggccccaccaaggggaggggcccctagaggaaaggcagccagggctcttgggcatcatgagggaggacgggggaggtgccggcctttcccctcccagggtcaccttgcagggggagccagagggcggggtgataagggggctgacgtgggagatgcgtcaaccccgataatggaggacagccccacccacacggctgacccgggctggccagccccactgaggcaggagggcccctcccacaggcctctggagcctgagtctggggtctgccctctcctgttgagctcagacaggtccaggaacaaatcctggctcagccactccctgctgagtgaccttgggcaggtcacatgcactctctgcgcctcagtctcctcattcgtgcaatggggacatgtacagctatggcttcaaggggctgttttgagtatgaaacgagatgaggtgtgtgaagtgccagccactttagtgggtgctcatcggtcggaacagccgtcctcacttcccagccccagagccctggggtccccgggagccccccgcccaggcccctccctggcctcagccggcatttcaagaatgctgagccccgcttaggtgattaatgagcggctaagccctcctaggagtcacgcgctgcctgcgacaggccagggccctcctgctgacccccacccccagctcgcccagctaggaacaagggacacccaccacgcaccaccaatggccgtccagggcggtgtggccggggcaagagcagcttctcgagctgggcgtggccagtctgtgtgcctgggttccaggaccctgcctctgctcaagccccaccctgctgtaaccacgggtcccatttactgagtgcctactgtgtgccaggcattttgtgaatcaaatacattaataatcacaggagtttctttactttatttcttttttttttgagactgagtcttgctcggtctcccaggctggagtgcagtggtgcaatcttggttcactgcaacctccacctcccaggttccagcgattctcccacctcagcctcccgagtagctgagattacaggcgcccgccaccacacacggctaattttttgtatttttagtagagacagagtttcaccatgttggccaggctggtcttgaactcctgacctcaggtgatctgcccgcctcagcctcccaaagtgctgggattacaggcgtgagccaccacgcccagcctaatcacagaagtttcttatgcgcaaggcatcctgcaggctcttcacctgcggtgtgttactcaatcctcccagcccagaatgctgaccatgacagagacagtgacttgacagtggctcatagtgagtatctcccagtgcttctcaactcatcatggcgatgatgacaaagacagtggtggtgacagtgactgcagctcacactgactgcctaccacgccagggacgattctaagtgctttatgcattttccctctctaaacagtggggatgttcagataggtaacataatcaccatcccctgttcagagaggtcaagtctcttacccaaggcaacacggcaaggaggattccaaccaggtgcaggggtctgactccacgagggagagtgtgactggcggttgctgtgccttccccaccccacctggagcgtcgcccccaccctggccgctgaagctgcaagtttttgagcctgaacttggaatctacggtgaatgatgggctgatgcagtcatggtgttgctatttataacagacccagccccctcctctcctggccaggagcactcctaatcgcccctaatcctcctgcccacctccctcgggatagggggcctcaggcagaggcatcctgggagaccctaacgagaaccagatgtgctttgggggaggagggaccctcccgtgccagggtccgggcggacggaggatggaggaaggaggcgggaggagggaactgatggggcagcgttgcggggaggccagtgggtggggaagaagtttgagggttgggggctcggagggcctcctgaggaacgctgaccccacaccttctcctggaagccctggaggccgcgtcgtctctttcccacgccgctcggcccccagcccgcccgtgaaccacactggagatttctaacagactttcc

SEQ ID NO: 98185 - DNA, 26068 bp, Homo sapiens
cgcctgtgcttcctccttaactatctctagttaaagctatctccaccaccaggccacaagctcccagagaacagagatcgtgtttttcattattctgtccatttccatcccccactcccgcccacttactgtgtgagtccagcactgtgtgagtccttgataaaaacgatgagcaaatccccaggccttgagtgggtcagcagtgaccacatctatccgcagggatccacggggaagctggtgtgcgccggataaaggtaggtggtccctctggcacaggccgccctaaggccaaggccccccagatgcagctcattcctggctccctctgacagatggcaaccgccgatgagattgtgaaactcatgctcgaccacatgacaaacaccaccaacgcgtcccatgtgcctgtgcagcccggtgggtagcctctcgcccgcgtctcccaacccctcctacacctctggggaggagacgcccagagggtctcacctggggtgtcatgtctacccgcaggctcctcagttgtgatgatggtcaacaacctgggtggcctgtcattcctggaactgggcatcatagccgacgctaccgtccgctccctgggtgagccatgcactgggaaggggatcctacagccctttggaaagggctgagggagggtcttgtgatggcagagaacacggactgtgcgtcagataagcctgagttaaatcgtctctctgccacctaattgccggataccttgagcctctgtttgttttcttgtctgcaaattgggggtaataataatggtacctgctttataccgttgttttgaggattaagtgagattaaacatatgtaagacactcaacacagcgcccagcacctggcacgaactgagtaaatgagacctgtaattactcatcttccccgacgtaggggacacctccagggaacgtggtcatttgtggggttattgagggatgcctgccaggaggaaatcaggacatctccctcccgacctcagagccccagcttccaaggtccttgcttttctgttgttttctttccctgatgcccatttttcccttttggactgccacactctggtattgcagagggccgcggggtgaagattgcccgtgccctggtgggcaccttcatgtcagcactggagatgcctggcatttctctcaccctcctgctggtggatgagcctctcctgaaactgataggtgagacttggaacctggggtcacccaagccagggctccttgtaactggaaggagccagggagacttggagaccccgtcagggctgaccgtgacaatcagggctctggagcctgtgaagaaggctcttcctgggcttctccagccttctccagctctcactggactagaaggagttggtattaggatcctcctcagagaggcctgaccctttcccagggaccctctctccatacccctgtatacagtaggcactcagtccatgcttgtcgaggtggactcccttcctccagggctgctgagaaagccaggccaccagggtcaggatgggagggtccaagccctgctgaatccctggctggacagccgtgtctaagagagttatcttgctgcccttagatgctgaaaccactgcagcagcctggcctaacgtggctgcagtctccattactgggcggaagcggagccgggtagcccctgccgagccccaggaggcccctgattccactgctgcaggaggtaccaacccctgcctttggggaagggacaggcttcccaaaggatgcaggagtatacggtggggcgggtaggggccctggcacccacacctcccaccatagtcaagtgtggttgtgagaagggcctggtgggcctgttcttcagcatcctccctttctaggctcagcctcgaagcggatggcgctggtgctggaacgggtgtgcagcactctcctgggcctggaggaacacctgaatgccctggaccgggctgctggtgacggcgactgtggcaccacccacagccgtgcggccagaggttggtgccagggactttgccaagtgaggtcattcacaaaaccttagccccccttccacttgtttccctgaaggcagggaccttcctttttttttttttttttttaagaaggaatctcactctgtcgctaggctggagtatgcaatggtgtgatctcggctcactgcagtctccgccccccgggttcaagtgattttcctgcctcagcctcctgactagctgagataacaggcatgcgccaccacgcctggctaattgttgtgtttttagtggagacggggtctcgccatgttggccaggctggtctctaactccccacctcaagccatccgctcgccttggcctcccaaagtgctgagattacaggcatgagccaccacacccggccgacagggaccttcttaacaccacaaatgtatgaggttgttatcttagaattaaatgaaatccttcacagtgaataacttacaactcaaggcgaacttattctgttgtccttatttttctcagtttacccagaccagtgaaaagctcttaactgtccagcatcattcattcgagaaaaaggtatttggtgcctgccgtggggcaggcactgctctcagctgtggatacagtagtgaacagagcagacagaaatcactgccctcatggcttatgttctaggtggaagacagtcaaccagataaatcagtaaaacacagaggatgttagcacaaagggctaaggagaaaaaaaccaagccagggagcagagtacagagcgtcaagtggagggcttcggggcaggcctcacctccccaggcccctttcggttacgcagcccagcccctctccagactgcacactggatgtggaaagggatcttgggaagccttcattccacttccctgtcggccttttccagccttcattggtgctggctggaagtctggcagatggagggaggatctctgaattcctccccatctctctctgcctgcagcaatccaggagtggctgaaggagggcccaccccctgccagccctgcccagctgctctccaagttgtctgttctgctcctggagaagatgggaggctcatctggggcggtgggtgcctgggggctgaagggctgacagggaggtggctgggctggctggggtccaggccagcaccacatgctcagcgttgtcatcttccccagctctatggcctgttcctgactgcggctgcacagcccctgaaggccaagaccagcctcccagcctggtctgctgccatggatgccggcctggaagccatgcagaagtgagccagagccctgtgcatcagaccaggggtgggctgggggaggtgtttggtgacatctgcgccctgccaggccctagcccaaccctcagagtgattcccttggttccctatagtgagcctctttcactctctttccctgccaggtatggcaaggctgctccaggggacaggactatggtatgtactcaggctgtggcctcagacctttctccttttggccctgtaagtctaaagagcaccctcggttgcagggcccgtgctcagccccctttccttcaccttgtccagctggattctctgtgggcagcggggcaggagctccaagcctggaagagcccaggagctgatctgttacaagtcctgaccaaagcagtcaaggtgagtgaggctgggcccagccacctggggagacaggcttctagccagcagactcctgtctccatgtgaccctgagcaagttaataaccttcctggaccgcagtttccttctctgtacaatggagatgagcacctatctcagaaggtggttatgtggctaaggaaatatgtagagccccgcacactgcctgggatgtgacagggcctcagtgaatggtgacccttttccctgctggaagtagatgagaagtgactttccatttggtgacagagcagagggtgctggcagagccagggcaagggcgtgcagggccaggctgcacggcagagacgttctgcccatggcaggaaggaggcggcctggtgatctgcccttgaacctgctcccacaccccatcccccagagtgccgaagctgcagccgaggccaccaagaatatggaagctggagccggaagagccagttatatcagctcagcacggctggagcagccagaccccggggcggtggcagctgctgccatcctccgggccatcttggaggtcttgcagagctagggtgtgtgactgcctcccttggcctcagctcctctcactgctgtgctgaggtggcctttgtcacttccttctgccttccaaccctcaccttcccccggcctggccccattggcccaccctctaagttgagcaggaaatcctccaccaagcttccagaactacagacagcacccagagtgagctggagtgggtccccatgcctctccagcatgccctttccctttgcaggagggtggagtccctgggtcatgccctcccctgccagctctgggcttcagagataaggcattttccttgtgcagcctttacctggcaatcctaatttggttttaagactccctgtgaaatgctttccgcaccttaaccccagtgagcgtgaaaaagaaagttaataaactataatacatggaagcaagaaagacactgcctcctctgagggaccttttcccaagcatgtaaacaagggggcccacagccctggctgcaggcatcatgacccatcttctaccaggcagatctttattacctgagcccctaaggcagtgtctcctcagctgggctgcttccactgagacccccgacccatcccctttccagtacacacacctgatgcatgtaagaatggtagaggggcttttctcagcattgaattaataattcagtggctcctcgggagtcgaatgggcatttgggacaccagaaggaaaagaaatcatcatagtctaaggttcagttgtagatcaaaaaatgcagccaggccgggcacggtggctcacacctgcaatcccagcactttgggaggccaaggcaggcggatcccttacactcaggagttcaagaccagtctgggcaacatggtaaaaccctgtctctaccaaaaaatacaaaattagccaggcatagtagtgtgtgcctatagtcctaacttgggaggctgagttgggaggatggcttgggcccaggaggtcgaggctgcggtgagccataagcatgccactatactccagcctgggcaacaaagcgagaccctgtctcaaaaaaaaaaaagaaactgcagccaagccagcccctaggtctctttctagagcgatcactgatggcaccagggtgagcaggggcactgtatgcatgtggagacaaacagcacatgcctggcacacatgtagggtagggagtggttaaaggcactggctgtcgactcatacacatgatctgaaatctgattctgctttaacccggctacaggagctaaggcctattttttagccctttgggatctgtaaaatcagaatggtacccacctcatggggacatgaaaggattcaaatgaattgatgaagatgggccataaagcccagcacagtccaagtgctcactcactgagagttacggttatcacaggggttgggcccccagcccctcccaggtcatctgctctaccactagctggtaggaaagagcctcctgccctcccaacccccgtcacctacttggcccaaatttggctgcaggctccccgagtgcctgggcttctctacccagggtcctgtctgtcggctgcaccatacgtccctgaccacaaggcatccacgtgcacaggagtatgcgcccagcagctgggaaggaggctgacctcagacggtggcctgtggatcccagctctgtcatttcctggctgggtgacctcaacctagtcaccctttttgagtcttgttttctcagattatgaaataggaaaaatttccttcctcgtgagataagcacgtgccattagctattaaggacacgcacataaatgagctgcatgtgaatccacacatgccattccatgaagacatcaaagaggatcatgtggatctttggtgccttccggttggcccctccctaggtctgtgagggtcagacctgtcctgaggcttttacaaattggcccagaactcatttaaccacagcatcatttcattagagggctgttattagagactgaatgtttgtgtcccccccaaattcctgtgttgaaaggctcacccccactatggtagtgttaggacgtggggcctttgggaggtgatggggttatgagggtggagccccagagagctctcacgccctttccaccatgtgaggttatggtgagaagatggtctctgaggaagctggcccttgccacacaccacatttgccagcgccttcatcttggatgtctatagcctccagaactgtgagaaataaacacttgttgtttaagccacccaggctattatatttttgttatagcagcctgaacaaagacagctttgattcttaacatatttaatgaaactcgagcttcataaaccagtgaaatgcctacccctatggagayggggagctggtcatgggacccaggtgcctggaggacatcccagtggctttgaaggctccagccagtcaagacggtcaatattagcccttctgccaacatctggcaatgtgaggctggggtggacgttggcctgatgttgccaggagtaggatgctgatgctgccagagagtaggtgggctccaaaccccaggcttctcwcttgcttactaagcacagcagtctgaagcttgggacctggcagtgcgtctttggagaaggcaraaaagccacagcagcaacacttaggagcaagacccttcccgctctccaccctatttcctcccctgaagaagagcaacagctcaagctctagcatggcacagaacgctaggttgggccaggcaagcagccatggtggggccaggtgaagcaatgtgggtctcagcaaggaacccctctgaaggtggcagtggctcccagggctgctgcacactggacaccacaactttggcatcagctgcatggtgagctgcagagtggtcagaggggctggggccctgccaagagagcaaggccagacctgcccagcgggaggcaggaaggccctgatccagcaaggagaagtagaggaagtccacagccacctctgttactcatcgctactgggacatctggggacaggctctgttcttgggagagcaggtcaccaggatttgtagggctgcctgccggtgacagacacgtaagtcacagggaaaggccgggatccaggcctcagctgtagcagcagctggaagaggtggagccgcacggtcacaatacatgcagacacagagcagcaatacgaaacagaacagctcagagcggtcagctcctcagcagaagctgcrtgggccgccrctccccctttctgcaatcaccccatgatgtctccaccccacctcacatccagatggggctggatggcagagcagatgaagcctgctctgtggcggggcagcctwactgaaatgcacacctttatgggggaagtggacggacacctcacctccctcatgtttcacaccgtggactgcacttgagtcccagctcttcaccacatccctaggagtcttaagaggaaatcagtctgatttcttcagacaggagcagcaagagcggccagagcgaggaggacctcgtgtgaatggaggacctgagaggctgacgccaaggagtgcagaagccaaagccaccaaggaaagcagacaggcagcaagcagccagagaaggcaggcccagcacccaggcaaagccaccaaggaaagcagacaggcagcaagcggccggagagggcaggcccagcacccaggcaaagccaccaaggaaagcagacaggcagcaagcggccggagagggcaggccagcacccaggcaagaagtctgggcccagcattggaagaaagtcgcctgctgaaaccagccgggagccctgggaagagcagagcttctgaggggagcacaggctgcaccaccaggagctcttgggagccccttcctgctgcttcactccccatcatgcagcaggggctggaaagagaggcagatgcccaggagttaatgacatgatgcaggagtcacaccaggcccaagctgttcagacagacccccagcctgcagggtggtccccatccaagccaccaaatccctcagggaagccccaaagtccctgagcctggtacacaccccgtctccctacatcccatcaagacctgctctgagcactcagctggtcaccaggcacccatcccactagactagcccccaggctggtaaaggagaaatcacacacccttgtcacagtcaagcccttccttggggaagaagataaggccacacttcaccccacagaaccacagtgatttgggggggaaattctgtctcccaatggacagactggggagtcccagcatttcactgggatgcgctggtttgggaccagtgctccccatcagccaccctaactccaccctcaagttacttggtttcctgctgtgccacagggtaagtcttcttgtcaaggccccagcctttcgtgggagatccttctctagacctggccctgtcccaccctggaatgtgggactggaacccatacctgtctgtcggtcaggatccccggctctgggcgcttccaagatgaagccagaaggatgtagagcaccagcagcccaaaggccaccaccagcatcccggtgctgttggcaaagaccgcctcactgggcaggctgtggtatggcctggtggtgtttttcctgaagatgacaaaacaatgtgagccctcgagagatttttccacctatttttgtctagtgggagactcgatgtcactaacagagggtgagaaaaccttcccgggtccatatgtgatctagaattttaacaccctttctttttttttttttttttttttttgaggcagagtcttgctctgtcacccgggctggagtgcagtggcacgatctcggctcactgcaagctccgcctcctgggttcacgccattctcctgcctcagcctcccaagtagctgggactgcaggtgcctgccaccacgcctggctaattttttgtatttttagtagagacagggtttcaccatgttagccaggatggtctcgatctcctgacctcatgatccacccgcctcggcctcccaaagtgctgggattacaggcgtgagccactgcgcccggctgaattttaacaccctttctaagtccctgcaaatatttgtataatgagccaggtgcagcggctcactcttgtaatcccagcactttgggaggccaaggcatgaggattgctttaccccaggagttggagactagcctgtgcaacatagtgagatcctgtctctacaaaaataaaacttagctaggtgaggtggtccatgcctgtagtcctagcttacttaggaggctacattgggaagatcgcttgagtgcaggagtttgatgctgcagtgagctatggtcacaccattgctctccaacctaggcaacagagtgagatgctatctcttggctggggggataaaaggagagagagagggtcttcctatgttgcccaggctggactccttccacctcagcctccctagtagctgggactacaggtgcatgccacggcacccagctgtaataatccttttacccatgaggaaactgaagctcaaagcaatgaaattaacttgcccaaagttgcataactagtaaatggcacagccaagatcgaaaccaaggtctgaccttaagtcctagttgcttttcactacaccccattgcctcaaaagaacggacagtagtggtcaggcatgcaaggctctagagtcagactgcctaatctgagtcccagctctgccacttactggctgtgtgccctcgggtaagttacgtaacccctctgttccctcattttttttatttttatttctacctgaacagtcctattgcagaatctgttccctcaattgaaaatggcaatgacggccgggtgcagtggctcatgcctgtaatcccagcactctgggaggccgaggcgggcagatcatgaggtcaggagtccgagaccagcctgcccagcatggtgaaaccccgtccctactaaaaattcaaaaaattagccgggcatggtggcacacacttgtaggcccagctacttgggaggcagaggcaggagaattgcttgaacccagcaggtggaggttgcagcgagccaagattgtgccactacactccagcctgggcgacagagtgagactccatctcaaaaaaaaagaaaaaagaaaatggcaatgacaacaataccaatcaataccaatgatgtagggtggttgacaggattaaatgtaaggtgcttagtactgtttctgacacacagcaggtgctaaatcaaactgatgctcaataaatatctgctgacttaccaatttcaacctaaagaaagatcaattctgttaccttccagatcaggagtggacccaaccccaaaatctctcctcccttgggtgagtcctgtgatcacagggtgtatcttttgaagaccctattccctcctcttcaccttagagttggggaccccactgcactcacaaactgaagaaaagcttctcattaatgcccgaaatgacggatgcgatggacagagagaggatggcggctccaaaaaagacgtggataggttttaggaggctgcgcagccacatggacgcccagggcaggaggaagacagcaaagcccaggaaccactgtggacaaaagggaggacacacccgactgtgctatgtgtgaccaaagcacatcccaccccatcagtgcctcctccccatctctgctccctggctcttctttcacaactcaaaccttcccacctggcattgcccactaccgtgctagcttcctcattgtggcctattacccaagcaacaagaacagtaaatgacatgcttagctaccatcccactcccagcaaacccaaccaccttgtttgtctctggttccttccagtccttgctcataaaactcttcactcgcacaggcctgagatcagaatatggaaaccacttcaagaattcttttggttcacagaggtgggagtggggaaagtggaagccagatggctgattagagtcagcatagtgcgtgccatgacaaagttagcagagagggctctgggacgagagacgggcaatgggagggataaaaggaacagggtaagttcaggccactgacctcccacagcccttgaataaactgtcagttctacaagataacaatctgcaagtccctctccaagcagtgagcagaggaatatttggtgctcatgcaagtgaacccmcaaccagagctcatggctctgggaacctcgaggaggagaacagagagaacccacctggcaggcgaagaggaagacagtggtgatgcccagccagctgtgaagggagtagaggttggcagtccttccatggttgtgaaacgtaaagacagcaaccagccccacaacagtgaggacgaaggccatcaggtgcagsgctgcatggaggagtttccagggcagtttgggccccacccacgactggggcaggcggtacaccagtgacgctgcaggagagagtagtgccagggctcagcctctcccctcgagctcacccagacatcagggaataaccctgataggatcctacacagcttcccagcaagggaacaggaaatgctagggcactggtatcaactcctcggcatcttctaccctcccatgatttgtgggataacagccatgaagggaggagagaagggccagttaaaaagggaggagtggtcaggcaaggtggctcatgcctgtaattccagcactttttgggaggccaaggtgggaggactgcttgaggccaggagtttgaggttacagtgagctatgatcatgccactgcaatctagcctgggccacagagagaaataaataaataaacagattccaattaaaaagggaggagggctgggcacggtgactcatgtcagcactttgggaggccagaagttcaagatcagcctgggcaacatagcaagatcctgtgtccacaaaaaataaaaataaaaaatattatccgggcatggtggcacatgcctgttctctcagctacttgggggactgaggtgggaggatcacttgagcctaagagttcaaggctgcagcaagctatgatcatcccactgcactctagcctgaaaaagagggaaacctgtctcctaaaaaaaaagtggaggggggaagcaggtttcttggacctctcattctattttcacaataataaattcagcttgtttgcagtttctaggctaaaaagcatcatgacagtcattgtttcatcaaactgaattgtcacaagtgaggctggctgtcaacacaggtactaaggtcaggcaacataggtccaaatccaggctctgcctcttagctgtttggcctctcctttctttcttttttttttttttttttgagacagagtctcgttctatcatccaggctggagtgcagcggcgcaatctcagctcactgcaagctccgcctcccgggttcacgccattctcctgcctcagcctcccaagtagctgggactacaggtgcctgccaccatacccggctaattttttgtatttttagtagagacggggtttcactgtgttagcgaggatggtctcgatcccctgacctcatgatccgcccacctcagtctcccaaagtgctgggattacaggcgtgagccaccacgcctggcctggcctctcctgtctaactctcaatttcctcatctgtaaaagggatataacagagcccacctcacaaacttgtaagaacaaaatgggatgatatatgtgaactgcacatggtaagctgctatcatcaatggcatcgtattgccattttacaaatggggaaaatgaggctcaccagggccccaaggcacagatttgaaagcatgggacaaagattacaaagatggatcccaggttgggcacagtggctcacacctgtaatcccagcactttgggaggcagaggcgggtggatcacctgaggtcaggagttcgaggccagcctgaccaacatggtgaaaccccatctctactaaaaaatataaaaattagctgggcatgatggcgggcacctataatctcaggtacttgggaggctgaggcaggagaatggcctgaacccaggaggcggaggttgcagtgagccaagatcacgccattgcactccagcctgggcaacaagagcaaaactccatctcaaaaaaagaaaaaaaaaaaaaagatggatcccggaagagcaagcaagtccctcattcggtggcctgactaaaccatgagaggcttcaatctcctgttctctagagctggttaaaaactacagctcaggtcgggcatgatggctcaagcctgtaatcccagcacttcaggaggctgaggtgggcagatcacaaggtcaggagatcaagaccatcctggctaacacggtgaaacgctgtctctactaaaaatacaaaaaaaaattagccggtcacggtggcaggcgcctgtagtcccagctactcgggaggctgaggcaggagaatggcgcaaacctgggaggtggagcttgcagtgagccgatatcacgccactgcactccagcctgggcgacacagcaagactccgtctagagaaaaaaaaaaaaaaaaaaaacactacagctcaaaggccaaatccagctcgctacctatgtttgcaaataaagctttattggaacacgtgatccacacttgtgtgtatgtgttgtctatggctgctctcacaatacagtggcagagctgagtaactgcaacacagattctgtcttgcaaaactgaaatatttatctgaccctctatagaaagtttgccaactcctgccctagagtatttgtgaagccacccttctgagatgccccccatcttaaccccttcctcccccaaatgacagctaggcccagagacagcccaacccaccctacccccatagccccaagcccaacatttacaaaggccagccttggagagggaaagtgcagctttgtccagcctgrgccctatcccgcctcccttcctgacctcttactcaccacctccatagaataccaccatgccagcaaccataagcactgggtgccagttgaacatgtagatgctgccattccaggcaaagccaccacgccagtactgcatccagtagatagtgaagaggatgcacatagagcccagggaccccagcagcaggcaggacaagtagaaccgtccagacaccattctgatcacgcactcctagaagaaggagaagtcacaaatctccactggctcagatgcacccagttctctggctaaaggaggtaacactgatttagctcttggcctgtgggatggaatmtttttgcttcagttcccctgcatcagcctgggcaccacccccygcccgaggcctcaatgcctgggtgggcctgatcttcagtcacaatgactgaggccccaccccagcacctggcagtgcccagacagagcagcaaactcaaggctatggctggccctggcgaaggccagatgccaaggcccaagacccagagtcctgggattcctctcccctcacaggaccagaaggtaaagaattaccaccccataccccccaggaaaaaagggacaggaatcaaaatccaggctaaattacgcaaacacccaggccttgggttctaagataagaaggcaaaaattacagtctgaaaagagcaaacaccccactattaccctagacaggaaggagtcagaaaagttcttccccatagagtaagctctatggggctaatcttcactggagaggtaaccaggccttcactccactgcccacactccacaccttgaaccagctgatgcccctcagctgtctccagccctgagacttctgctttctcttcctctggggaaagtccagagaaaaaaagaggaagcaacaactcatggtccagaaagcaagagatttattttgagatttccacaagtccttgataaacccagaaaccaactctggtttcaggcatggcaaatgcttaaagccctgagcagttgctcttaaacgctaggtgagtgggcaaagccacaggactggccctgctttcagctaatatgtaggcagcacgggcccaggcatcaaggcagtcaccctgtcccacggactcacaccaagaaggcaacagtgtggcttcctgcattgaggtccctcactcggaagcagctaatagccaatagcccccacggaggtaaaacatttgactgctcacctttagccctaatgataggctcagagaactggcctgggctccaattcctgcgaaatgggcaccttgagcaaatcacttaacatttgcaggactcacctgcaagaaaggcgtggcagtaagaatacttgaacagtaagaataacgaacaccagctacgagcaccagagccttacacacaagatcccatttactcctcttaaccctgggaggcatattattccgtgaggaaactaaggctgagagagataagtaattagcatgaggacccagtgagagtgggtggggagttccaaatcctgtgtgtttagcttcaaggcccacgctgcttccttgaccacaggttgtcagatcaagtgagaaaatgaatgtagcacactgtagaagtcaagtattagaattcttcgctgggcgcgatggcttatgcctgtaatcctgcactttgggaggctgaggcaggtggatcacctgaggtcaggagttcgagaccagactgatcaacatggtgaaaccccggtctctactaaaaatacaaaattagccaggagtggtggtgggcgcctgtaatcaatcccagctactcaggaggctgaggcaggagaattgcttgaaccagggaggcagaggttgcaatgagccaagattgtgccattgcactccaccctgagcaatgagagcgaaacttcatctcaaaaaaaaaaaaaaaaaaaggctgggtgaggtggctcacacctgtaatcctagcactttgggaggccgaggcgggcagatcataaggtcaagagatcgagaccatcctggccaatatggtgaacccccgcccccatctctactaaaaataaaaaattagctgggcatggtggcgcgcgcctttagtcccagctagctactcggtaggctgaggcaggaaaatcgcttgaacccgggaggtggaggttgcagtgagctgcgatcacgccactgcactccagcctggcgactgagcgagactccatctaaaaatatatatatatacatagaattcttagtcattgctgtcatgcacttcatcctaactactaacatgcagctcatgttccttgtgcctgcccaggcctctcagtggccctcagccatgccatgccagctctccccatgctaggggtccacctacttaggtaaagatgcacaaggtgacccaagttggcagtaatctctgagaaaggaaggtccagccaggctcggtggctcaagcctgtaatcccagcactttgggaggccgacgcggatggatcacctgaggtcaggagtttgagaccagcctggccaacatggtgaaaccacgtctctactgaaaatgcaaaaatgtgctgggtgtggtggcgcacgcctgtaattccagctaccagggaggctgaggcaggagaattgcttgaaccctggaggtggacgttgcagtgagccgagatcgcgccactgctctccagcctgggggacagagtgagactctgtctcaaaaaaaaaaaaaaaaaagaaaagaaggtccaagggctgcagggaaaaagcttccatgaagctggcaggagaaaatcatgccaccagcctcctagaagatttgtgactcaactacttaactcagagatttgctacccagcctcagaactgcctcctcaattcttccaagggcagaggacgtttcagatcaccagatattcacctaaaacactctccatccctcagtgaaatgtaagagatcttgatcagcaggctcactcatctgacaatatctacttccacaactgttttttttttctttgtaagaggaaaaagtaaatgcagtccgaaaggatctgtagccacaccctagaaaaggtcctggtttactgctctgtgacagacttagaatagaccctgggcacactttcctgacagagagctgcaaagttatattgccctgctcacaatacacagataagccctcctacttcctgaaatagagcaaagcaggagaaaaggaagaatgcagtgaaggaccagcacagtgattcatgcctgtaatcccagcactttgggaggcccaggcaggtgggttacctgaagtcaggggttcgagaccagcctggccaacatggcaaaatcccgtctctactaaaaatacaaaaattagccaggcacggtggcatgcgcttgtagtccaaggtactcgggaagctgaggcacgagaattgcttgaacccaggaggcagaggttgcagtgagccaagatcacgccactgcactgcagcctgtgcaacagagatagactctgtctataaataaatacccaggagttccagaccagcctgagcaacagtgagccctcatctcttaaaaaaaaaaaaaaattagctgggcgtgatggcatccacctgtagtctcagctactcaggaggctgaggtgggaggatggcttgagcccaggagaaggctgaagtgagccgagatcgcaccactgcactctagcctgggcgacagagctagactctgtctcaaaaacaaaacaaaacaaaaaaaccgtgaaaactgcaatgcaaatgcttgaaaatatcctctcatttgttctaagggcaggctgggctgtgatcccagggtgtgctcactttgcagagccccattctaagggagcagtcagcaagctcttctgtaaaggtccaggtagtaaatattctaggctttgtagagcacatggtctgtcacaactatgtcatcaactctgcccatgcaagagcagccacataaacatcttaacaaatgagcaccacggctgtgttccagtaatatttatttatggacactgaagtctgagtttcacataattttcacgtcacaagatattattaacttcttgcgaaaaaggattctcccggctgagctaaaacaggtcacatccaggggtaagaaatgctagttcccatccagcccttagtcttagaaaaaggctctacgcaggctgggcgcggtagctcacgcctgtaatcccagcactttgggaagccgaggcgggcggatcacatgaggtcaggagttcgagaccagcctgaccaacatggagaaaccccgtctctactaaaaatacaaaaattagccgggcgcggtagcgggcgcctgtaatcccagctacttgggaggctgaggcaggggaatcgcttgaacccrggaggcggaggttgcagtgagccgagatcgtgccactgcattccagcctgggcgacagagtgagactctgtctcagaaaaaaaaaaagaaagaaaaagaaaaaggctctactccaaactcttgcagtgttacttttataatttagaactacaaataaatgaaggggtagaaaatcagtttgttgctctccctccccgatggactgggggacttcaagaatcttgaggaccagatttaggatacaagccctaaaccctcatcttacaaatcaaaaacactgtgacactggggcccaaaacaagaaaatgacttagccaaggtaagtggccgagctggtacaggaattcgggtccactccctctcagctctgaggattccttattctcaaaggtagcttctgttaaagtcggaacatgaggagtgaagggctcaatattcctgccaaggaggtaggtgaacaagttaccccttagcaccggaataattatagaccccgacttcaggctgtgcctaggtccggctcaggtgtccaaagaaccgttccaggcacccgaggggtgatccctgactcctctgctgggtgctcgtgccagctaacaatgggtgaaaattggggtgaggagctccaggtgctttctgcgtcctctgaagagctttcgtgcctttataaccaccgcgttggaaggaagagcgcggagaaaggtgcccactttctaaaagagaaaattgaggccgagcaaggggatcgcgacagtgcgaagcgagatagcagcggaaccagcattcgaacccaggtccctgaactcccagccccgggatccttctcacccctaaccacagtgggacgaagtgaggccgggatctccggaacccgcctctcgctaccaggcgccggagctgccgctcccgaggttcctaggagatgcagaagacactgccctgaatgcctacagccggctggcaatgccgccccagagcagagcggsggktgccgcctcgccttcttataggctcgcagcacttccagtcgcgcgcgaggcctcctgggaagtgaagtccggagaccaggggtggccggctcccagcgcgccaagctgctaaccccctaactcccgttcctcctcggcgtttcttctccaagtccgaagtcagggtccaggactgctgcgatgcatcagccccgcctctcatcccccatccagaggaggcggaaatgttcaggtgaacgcgaagcctcccactacgagccggccctcagcaaggccgtgcgcagtgtgggcgggagccctaagtcagctagcggcgacgctgggagggcccggagcaggccgggccccgaacagcgaaagctccaacatggcggccagactggccatagagcgggaagagaaagccggggactagcaggccgcacggcgcagacggggcccgcctcctccatttacttccggaatttaaagccggcttccggaagccgggacgatgtccgcatgacaaccgacgttggagtttggaggtgagagtgattgacgaggagtgggttaagtgaccagaagtcagaatttttggtgctgttgttttgggcttgggttttatgctttgttgttgtttgccaaggaagcctcgtttttaagtggattgggaagcgtgaggaatactgccctaggtacaaagggaaggcggcaggtagcggtggacgaattaaagagcttcatgagcttgtgagtctccactgccctaaactggaggggatcgtcgtacgtagagacaggcatgggcgtttctgcataacggatcctcaaaacagccctggatggtggcctatgagtagtggttaagagcacgggtttggcgtcacagttatgaagccgggttctgctgacttgagacctggaggaatgccttgagctctgacttctgtgtcctttcctgtagaataggaataattcccaccttgcagacttgtagggaggattaaaggaaacgatcttggttgacaagtttatcgtggtgtgagtacctaggtagtagctatcagtgttatttaatgcggccgggcgcagtggctcacgcctgtaatcccagcactttgggaggccgaggcgggaggatcacgaggtcaggagatcgagaccatcctggctaacatggtgaaaccccgtctctactaaaaatacaaaaaattagccaggcgtggtggcacgcacctgtagtcccagctacttgggaggctgaggcaggagaatcgcttgaacccgagaggcggaggttgcagtgagccaagatcatgccactgcactccagcctggcgacagagcgagacactctctctctctctaaaatttaatgaatgaggaaaccgcgaacatatgtccaataaggtgggacttcaccagctgaggtggaggaggtgccttaaccttccggagcctctgtgtaaaatggggataatatacattgtaatggctacttctcaagatggttgtaggattacgtaaggttagaaatatgaaaagagcttataaattgcaaaacattttaccgatgctaatttaatcgctaacactccagagcattttgaaatttctttatagatttggcacagcagcgggtcataggacacccccagagcaacttgtgggtcttggaatagatgaaaagaaacaactgccactgtgttgcaaccataaccctaaagataaagctttccaggagacccctgtttcctctctgctttttctgcctagggcacttcacacttctttgctggcatttttcctgcctagttaaatactagtctatcaattatgtaagagacagcttagtccagtagttaagagcacagactgtggacccgtgcagcctgcatctgaatactagctctgccacttactaacgacgtgaccttggacaaattattttacctctcttggcctcaaatttctcatctgtaaaatggggaaggtaataatgtattatgtcatctaccttgtgaggtttaaataatgttagtgcttgtagaacactccctggcacattgtaagcaatgtataaggatttgctgccatttttgttaccaccgctactacatgaccaggcagtcattcttctcagtaatactactagattcctttggttagagacagctctgcattgagaagattccaggcatggagaaaagctggtgaaggtcctagaataaatgacttcttgggggtttttgttgttggttttgttcactaaagtatcccatgcaactggagtggtacctggcacacagtaggtcctcagtaaatgtttatggtattaatacatttctaaccttgcttatctttttgctccaacaggtgcttgccttagagcaagggaaacagctctcattcaaaggaactagaagcctctccctcagtggtagggagacagccaggagcggttttctgggaactgtgggatgtgcccttgggggcccgagaaaacagaaggaagatgctccagaccagtaactacagcctggtgctctctctgcagttcctgctgctgtcctatgacctctttgtcaattccttctcagaactgctccaaaagactcctgtcatccagcttgtgctcttcatgtgcgtgcagtaaggcactctggaaagctgaacccacgcaattcaaaggccctgacagtggtgatttagtgtcttaaagttattagtaggctgggtacggtggctcacacccataatcccaggactttgggaagccaaggcaggaggatcttttgaggctgggagtttgaggaccagcctaggcaacatagcaagaccctgtctctacctactaaaaatttttaaaattagctaggcatggtgccacacacctgtaatcgcagtgattcaggatgctgacgtggaaggattgcttaagcccaggagttcaaggctacagtgagccatgatcatgccactgcactccaaccaggtgacaaagaccctatctcaaaaaaaaaaaaaaaaagccaggtgtggtggttcacgcttgtaatcccaacactttgggagggccaaggtgggcagatcacctgaggtcgggaattcgggaccagtctgaccaacatggagaaaccccatctctactaaaaatacaaaaattagatgggcgtggtggtgcatgcctgtaatcccagcttcttgggaggctgaggcaggagaatcacttgaacctgggaggcagaggttgcagtgagccatgatcatgccactgcactccagcctgggcgacagaacaagactccatctcaaaaaaaaaaaaatgtttaagagtgtcagatagcctgggcaacatagtgagaccttgtttctattaaaacataattttatttttttttttttgagatggagtctagctgtgtcgccaggctggagtacagtggcacaatctcagctcactgcaacctccgccccctgggttcaagcaattctcctgcctcagcctccctagtagctgggattataggtgtgcgctaccacaccccactatgtatttaccacacccagctactttttgtatttttagtagagacggggttttgccatgttggccaggctggtctcaaactcttgacctcaagtgatctgcccacctcggcctcccaaagtgctgggattacaggcatgagctaattttttttttaattagctgagtatagtggcacacacctgtggtcacagctactcaggagggtgaggcgggaggatcacttgagcccaggaagttgctgcagtgagctgtgatcataccactgcactccagtctgggcaacagaatgaaaccctgtctcgaaaaataaggagtatcagagaatcttctataggactatgtatggaagaaattttaaaaataaaaaagagtattagagcaggaaagccttgactatggactgcaaacccaactgatggggccagtgggtaattttaggtaattttagcttcatgtcattcaggtcccaaaacccatgttatctctgtgagggtttaagatgtcagatgcctatctcacaacaaaggacaggcctcgtggtgtccctcaggacatagtacctgctcttgggtcctcacacaggccttcattggttgtacttttttttatgtctacagcatccaggatattgcagtcctcttcaacatcatcatcattttcctcatgttcttcaacaccttcgtcttccaggctggcctggtcaacctcctattccataagttcaaagggaccatcatcctgacagctgtgtactttgccctcagcatctcccttcatgtctgggtcatggtaagagtggcagtctgaattctttttttaatttttattttaaatagaggtggggtcttactttgttaccaaggctggtctcaaactcctgagctcaagcaattctcctgcttctgcctcccaagctcaagcaattctcctgcttctgcctcccaaagtgctggaattacaggcatgagtcactgtgcccggcctgaactctgaattcctgaatcgctaaagggctaggaataacttttcttttcttttcttttctttttttttttttttgagacagagtctcgctctgtcgcctggctggagtgcagtggcgtgatctcagctcactgcaacctccgcttcctgggttcaagcaattctcctccctcagtctcctgagtacctgggattacaggcacgcaccaccacgcccagctaatttttgtgtttttagtagagactgggtttcaccatgttggccgggatggtctcaatctcttgacctcgtgatcctcctgcctcggcctctgaagtgctaggattacaggcgtgagctactgcgcccggccactgggatatcttttctctgggaacccagcttcattctttgacatctcacacaatccttcgtagagaacaggtgaaatgaaagtggtttgggttggagccctgggcatgtgagagtttcataaggtactcttgaccaaccttatgtgttgaaaaacagccttgtccaagagtcaggggactcttccagaacattcaattcacctttgccccaaacaggcctaccagggctaaaacaggtagttgaatgtgtctcatcattagctatttgggcaggtggatgttgatacaggttattcttaggcatcagtgccccatggctaatgctgtaggcagtggatgtttttggaagtagccaagcaggattgctgcttgcccttgagtgctccatgccgtctgccaagctcccatcactttaactaggagaaccggcctccaggatccctccctttggttctaacataggcctcagatcagatccagtgtctgtggtttcagatttcttctgcttcacaaattcttccagctctttgagtatcttgtatatttctcatgtactcaattcaattgaactctaaaacctcagggttctctagttgtcacttcattattaaagccactttcacacctgaaccccctgttaggttgtgcttgtgattccacagaaagaagtagaggtcccaggaaagaagcaaagcaacaccagagtctccgggtgcttcctgaagaggattctgtgccctggttcctggagccaaaataggtcctggctttgtactataaaagccgttaatctcattaaaccctgagtacaccaaagtctttatctgacaggagctgagccagcgatttttcaaggcaagacagtgaccagctgaactcctgagataatgagtatatcatttctccttggcaaaggttatggaattaaagagaataaataacttagttcatacttcctccctcaaagttaaaagatattccctttgcagcgaaaaatggagctttgaggctccttcgagaaacgctccttggggttgtagaaaggaggaagaggttagcatgattttaaagcaactggcatctctgcagctaaccaagttggagacattagggcttcttgtggccattaacttttgtgtatctcacatctccttcagaacttacgctggaaaaactccaacagcttcatatggacagatggacttcaaatgctgtttgtattccagagactaggtaaggaccagagcaaggtcaggcctctctcaggtcccacatgtgtctctttcagtgagggccttgatgctggcttcccagacctgtcccagctggcttgggatggttgtgacagccacaccaggaacaggagggattactgcccctgcccttgctagaagactatgggaaatgaggaggcagggctgcccagcctcattaggttctgttctttttgtttgtttgtttgtttgtttgtttgtttttgagacagtcttgctctgtcgcccaggctggagtgctgtggcgctatctcaggctcactgcaagctccg

SEQ ID NO: 98186 - DNA, 44910 bp, Homo sapiens
  misc_feature (1)...(44910): n = A,T,C or G
cccctcctgcatgccaggcttacctgtgccggcctgggccacggccctgatggctgccaggatgctgcccactgccggggaggtgaacacagctcccgcgatgaccccagtcagcatccccttccctatgaaacctggaggtggaaagagtggagtgagcatgctgggtgggactcgcgcctgtagtcactggggcttcccacactccgggggtcatggtttggtgagccctactgtgtgcttggtgctcaaagatcccccaggtcttcacatggctgactccttcttaggaggcatcttagagaggccttctgtgacctcccagcctgaagcagtcaccagctccctccccagggactcactgttcctttgccccattttactgtctttactaagtcacttagcaccctctgaaatgatctcatttactttcgtgtttacttggttattgtctgtctcccctaagtagaatataagctccacgagggcagggaccttgcctgtctggtatccctagtgcccagtacagcgccaggtacacagtgggctcatgagtgtttgccaaatgaatggattttgctgaaggaagacaggaagcagagaaatgacgcgcatcctagtccctgccctccagcagccctcaaggagagtctgcgtccctggctccacacaggaaagaagccaggacagtccacaagtgggacacagcaggtgggaattcagaagaggggtgctgctgtaggctggaagagtcaggaagccttcatggaatcggggtgggtctgctgggcttggagggtccagaagattcatggaatcaccgactctcagagctagaaggacttgagagattgtttggcccaacttcgtagatttgtagatgtagaaacagattcagagaggccgtgatgggcccctgatcccagccggagggagtgggagagtgggaagtaccccagttcctgattctgggctgagctccatcctgcacttcatggcagcactaaggatcccccaggaggccctgtccactccactagtaccccctgccccaccccaggatactcaccagcatgggcaggctcatggccagagcccccacccgacagcagtgccacccggcccttgaggctgtccaggtcagaacggagggccacgcggtggccctgcaggagctgcaggttggggttgcaggccaccaggccagcaagagcgtcatcagcacagccagccaccgagttcaccagcttcttggaggtctgcaagggaggagtgagaaggaggtcagaatgtggtcagtacagatacccccatcctgcgcagccacactgctgtggtgtagacccctctcccgcatccacctaggaactccaggagcacaggacttccttgagttgggcgacatcttaggtgggtatttctgtgagttttcagtaatgtgtgactttctattcagtacctaatttatgaagtgtcttgcaccataccttcaatttattctgaaaaaatggctgcaatacaaagaaaatgggggagtggttgcctgcagtgtaaaatattttaataaaactggggcccaacaccttcttctgtcaaaaggaagaaaagcctcaggctgaggctcctatgctgggggaggagctgagcaggttccacagccaccgctgctccctggtgctccaacgcggggcaaacatttccccagcctcttggtatgccaggcccagcactagacactatgtgtagagataacagctcaggtgcagtggctcatgcctgtaatcccagcactttgggaggctgaggcaggcagatcgcctgagtccaagactttgagaccggcctgggcaacatgatgagactccatctctacaaaaaatatgaaaaatgatccaggcatggtggtgcatgcctggagtcccactagtcggaaggctgaggtgggaggatcacttgaacctgggaggtcatggctgcagtaagctgtcatcgtgccactgcactccagcctaggtgacagagtgagactccatctcggaaataaaaaaagagataacaatgctgttcctgccctcagtggaaacacagcagaggtcacagccatgtgtagtgggcactgctacacgaggagcgcacgtgcaccatgggagcatagaggaggggccgcagcctcccgaggggcctggaggtctctgggaaggataagcaggaccggggtagggaaaaagggggcaggagacatgggaggagggaaaagggaggctcttccagccagagggggagcataagccaaggcctggatgagtgaatagtgtggtggtgccaggaagcacgggtgaccagcaggaaggggtggggaggagaggactggccacaggcagcctcaggaggggttgtggacaggctggtggagggttacagagcagtgccgccaggcttggctgagtggatacagggtgcagacagaagtgagtagcgtgggggccagaatggagtgtggcttgagctctgctgttacagggacttgggttcaaatcccacttctgcctctcattagctgcaggaactcagggaagatacatcattgtcgggagctaaaattcttcctctgtaaaatagggatttactagaacagagtatatgcccatgatatagtggaaactcaatcaaatgaagctactccctttttcaaacaggctgtgaaaagccagagtctgctgaacaagggctgcagcccctggctttgtcctgaagacagagtgagactggggcccaacgtggactcagagggctgggctcccaccgccacctggtggcccggtgggaacctgcagctgagccaggtcctggcaaggtgaacttccggctgtggcttcttcctgagcttgctagcaccagctcctttgtacaaaatttggctctgctgcctccctgccaacctgtcctgcatccagccagggccagggctaagccacctgcttcagagtagcctaggtctgtagggagcaagaagaacaataagattggttccatttgctgagcagtgactaagagccaggcccagttctaagtgtttttgagcatgtctcatttaatcttcccaacaggccgggtgtggtagctcatgcctataatcccagaactttgggaggccaaggcgggtggatcacctgaggttgggagttcgagactagcctgatcaacatggagaaaccccatttctactaaaaatacaaaattagctgggcgtggtggcacatgcctgtaattccagctactcgggaggctgaggcaggagaattgcttgaacctgggaggcggaggttgtggtgagccgagattgcgccattgcactccagcctgggcaaaaagagcaaaactccgtctcaaaaaaaaaaacccaaactaaaacaaaacaaaacttcccaacagccctatggaggaaagatgagcccagtgaggaaactgaggcacagttaaactattttgcccaaggtcacacagccagcaggtgtccaggtctgcctggctccaaagctggttcccttttggccatatcatgctgctttctcgaggggctggagggaagtggagggtgacagaggttgccctagaaaggacatgggtttgtggctctcagagcctaccagggactggaacacacaatgaagttgtgagttggcctcactccaagcccagcctccagcagcactaccctccaagaaagtggcctgctccccatcatgataatctgtcttttacagagccagaagagggtttagggaccagtgctatccctggtttcagtggcctgaaaggatggaaaaggaaaggaagtcaagtgaggcctccaggactctgcttgatcaacaccacacaaccactggaggtaggccttaatttgccttataatgcagatgaagaaaaagaggcgcagagaggtctgtaaaaggtcatgcagctggtcagtggcaggctgaaatttgaatccagatatgttcaaggcttgttttggttcaaatcagtgggcctggagcaaagcccagggacgtggccagcctcccacactgtagatcccagctccagaccggcccacataagccccaaggttaggaacggtcacatggtcattcttcacgattccttctgtgaccggtacaatgtctattacagagcaggtaactgttactgttttactctgaatgcaagacccagataaggggcagagtggctctgaagggactcaagaggctgcagccccaggcctggctgggaccagcagcctccaggaaacaaagaaaagcagggatcagaccctgggagagaggatgaccctctctcttcacccgtgagcctcaggaggcaatagcatctctcagtcaaagtgtaaggagctttagcttgcccaaggctgggatcctgctttgagaccatgctgccattcccgtcccggccctgtatgactcaccatggtgtggaggctctgaaacaggctgagttcacaccgttgcactgagctgctggaggatggacaatcctgtgctacctgggtctgagtacagtggaggcagcagcagcacctgcaggagtgggtaacgatacaagctgcggaaggaactcgcagtcgactggcacaatcacgccttcagcaccctagtaattagggagctgccccagacttcggtccaagtccaaactctagtacatgggctacggatggagaagagtgtggggctgaccaaggttcatgcctgcacttcactgccagaagacagatcaatccatgtcaagcacaggtctgcctttatgtccaggaacagcacccacttcatcactaaaggacagtgatcctcagaataactatcttttacacgggcatcacatgcagcgaaaaagttaacaaagctcgtcacacgcttgccctcactggccttggcaccaaaagggaagggaatggggggagctagccaggtttgtgacccattttacttctgggaaacagactcagagagctctagggacttgtccaaggtaatacaggtaacagccagaatctaaaccaatgtctagtttttctacagagtgtgtttttactactgataattcagtgcctccaaagtcaggcagagtctctgctatgggaaaggcaagatgtaaaccacgatgactttctagcttttcctcagttcagcctggttcagcagcgtgttggcctctgtgtgggtgcacaataggaagaatcaacatagctctgcctcagcctacttggggttgtggggagggtcttaggtaaaccaattcctccctaagcctcagcttcctcatctgtaaaatgggggttggctcctctctggcattctgcgagtgtgccaagccacgtggtattcctcttgttcccggggagcctgtttgatgtggggtaccctggaggctgcagggctgacggctctcctggctcattaaggttccctacggagaaatactggttttgtgtttgaggttcgaatttgtagagcaataggggcactaataacgttgggcaagcagaccggtgggccctttgaagtctgaagaatcaacgcgcaaaagggaggaggtgagcaggtggtcgttcaaacgtcaggcgagggcaccagctggatctggaggaactgagacagtgaaaggaaagcaggcaaggttctagtctgggatatgcacgaatcgcggtctcccttccctctctatgcctccgcagtccttcccgttcccaaaggaggaacagcccgagggctcctggagcaacggaaggaggactggatgcggggaagggcaaagggcgcggaacggggtggggagtctgcgggcgagctcggaggacactggcgcacctcccccgccggctcacggccgcatccgccacatccgaaggcgccgcgacttcccggagaccccgaagcgtgcgctctcatccgggtcctgcgggcgctggcggaaagaggcgaggcggtgcctccgggggcggggcctccttcggttggcggcctcgggcttcgggagtcctccaagaggccaggtgaggccgtcccgtgatgccccgcgccccggccgctctggcctgcaacgtgtctctggggcggaggcagcggcagtggagttcgctgcgcgctgttgggggccacctgtcttttcgcttgtgyccctctttctagtgtcgcgctcgagtcccgacgggccgctccaagcctcgacatgtcgtacaactacgtggtaacggcccagaagcccaccgccgtgaacggctgcgtgaccggtgaggctgccggggccggagaccccggcgagtgagggagttggggggagccgcggcctagggaggcccgsgccccgggggcggccgggcaggagtgggcccggcgaatggaaggcgctggcggccgaggaacctcccccagcaccgcgacctcgaaagagtcgtccctgtacgcgctttttgggggttggaagccgctctcgagggtcccctttcgtcctggggaggtcattcggcctcgagaacagggcgggcccagtgagacagaggagtgtgagttggttgtgcggtgtcgtttgggccyggagattggctttctgtggccaggaaaaggggaggtggtaatgacgactttggggtcaagattttcctgtggggaagtctggggggcccaggaggtggagggatgtgaggaatgcccgcattatcccacagagggagaggagccctcttcaggctaacccctttgcctggggctgttgtttacatgagggccctgctggagaagagggtttggtttgcctggcccagtgctgggtttgccttgttgacgatgcgcttggattgttaaggacaccgatgttcagaacccgggaagagtcatcttaacccacattctcagctgaatatgcagaccccaagcttgcatgtttatatacaccctaatcatgattccaaaacaaaactgttgttcagagttggaggtagctgagtgtggatggaggtattggtagactgccaggagggcagggggtgtggacaaaacagtgttttcatataaagctctgggacttttcttcatttgacttggtctgtcagataaaagttttgtgagactttagatgaagactggaagaagtgaacactttctccggcattctcaattagagcctgccactgtaactgtaatagagtaaaattggaggggcaagaggcatgagaagggattacgcagtcattgtcatttggaggacacacggctcttaggtccagtccagttttcttagtctgattagggaagtagctttgttgaatgcatgaactgagactctttgaggtgccggatttggcaagaaggggagtagctggagggagttggagaagtatgtgaagtaaatgagaattctggaggtatttagacataagtgataggattattttgaagggatgggaggcccttcccctgagttcaaaagttagagggtctgttctttcaggacactttacttyggccgaagacttaaacctgttgattgccaaaaacacgagattagagatctatgtggtcaccgccgaggggcttcggcccgtcaaagaggtgggcatgtatgggaagattgcggtcatggagcttttcaggcccaaggtaagtgttgcagttgggacaagcagtggagggggaactgttggtcgtaggttgttttatgttatttttgtttgtttatttattttctttgagacgggggtctcacagtgttgcccaggatgtcttgaactcctgagctcaagcaatccctccactttagcctctggagtagagyagctggggtattgtaggcatgccaccgtgcttgggctgtgttaggttgttttgcgaattcttgggatgggtggaatatgctttaggagaaaaactcttctcttttttctctctttggatagcaaatttcagtatgtactcttgaccaagctttctagaagtaaaaggagagattcattagggaaacatttatgaagttgacttctttagaagggagaaattaaagcagtttgtttcagaggataggctacagagtggggcagtcctggcttcatttcttgttaattctgactttaggtgccacttaaggcacctttcagatcaaatcccctgggttgttgtgacgatgaaatgattcagtaacatagggcctatcatatagcaagcatttacagttatgttaacaattaccaggccgggcatggtggctcacgcctgtaaccccagcactttgggaggccgaggtgggtggatcacgtgaggtcaggagttcgagaccagcctggccaacatggtgaaaccccatctctactaaaaatacaaaagttagccgggtgtggtggcacgtgcctgtaatcccagctacttggcaggctgaggcacaagaattgcttgaactcaggaggcggaggttgcagtgagtggagatggcgcccattgcccggtgacagagcgagactccatctccaaaaaaaaaaacaccaaacaaaaaaaacaattaccatcagtattttcattattttagcgcaaatgttttcatccaaatcaccaccacattgctttatgttgtcttaactgaatctggcaagaaagcagtgggttcaaaattttaattataaccctttgaacaaaacagcaattttttggagtctgtgttaaataagtaggactttgttgatccattttagcttccgttgttattcccacattttttttctctttcttcaaatacttggggaggagtggaggaggcattacattcatctttcagaatttgaatgggatgattgagattagcttgagattgaaatagatgaagactttgtwtgtagaacagagagatggagaatcatgaaagtgagaactagatgtttaccagcttcagttctggctttttgtacatgcccttagggtgtatgtgtacctagtgtgggttacaagctcaccatgtattttctctttagggagagaagaatttggaaaattcttaaagaatttggtgtgcttaaagactggacaggttgttcctgttttaaaaagaacctcttttgatagcataatattggtttccagggggagagcaaggacctgctgtttatcttgacagcgaagtacaatgcctgcatcctggagtataaacagagtggcgagagcattgacatcattacgcgagcccatggcaatgtccaggtgaggtggctgctttaggccaatgaaagttttctaagtagggctgtcatgattcatggaaaaaattraagtgctgggggcagctctctattcgatcagagaaataaggagaagacactrtgggtttgagctttttggagaaaggactcctgtagttcactcaagacccaagggacagggtaataattcattgagattcagtgtttcatgaaaaaggcatgcactgacattggggctccaactatttggcctatcaaataratccattagttttaatacctctcctaaaatttttctgcacaagtggtgcccagcgtcctctgttgctctgtggatgttgargttcttccctaatcccgattttgtttctcaggaccgcattggccgcccctcakagaccggcattattggcatcattgaccctgagtgccggatgattggcctgcgtctctatgatggccttttcaaggttattccactagatcgcgataataaagaactcaaggccttcaacatccgcctggaggagctgcatgtcattgatgtcaagttcctatatggttgccaagcacctactatttgctttgtctaccaggtactggatcaggaagagagagcgagaaactgtgaggttgatgtgataggagttgtttttgctaactggcatgtctgggtttggtaggatagagagaagtgtttaatgtgtttgtcctgaaatgttttgaacaacacaattaatatgggtcagactttcgttgcttcttgagtgcagtagtacttattgtggaggcagcaagctctctggggcttgtagcaggttttaatcctgagattacactctggttgtgggccttgggagatttcataggatgacccagtttatactttgattctcttactggagtgctaggggattattaaaacttagttgtcaagaaattatctagatcttgcctttatattaagcaaagagaaattgtcttggtgatgccttatatgtgttttttaagaagaggtttacattttgtccagtaatcacttactggtgacttgctggcttattttaattttattttattattttttttgagacagagtctcactctgttgcccaggccggagtgcgatggcctgatcttggctcactgcaacctccgcctcctggttcaagcgattctcctgcctcagcctcctgagtagctggaattacaggtgcatgccaccacgcccagctaatttttgtatttttagtagagacgyggtttcaccatgttggccagaatcgtctcaaactcatgacctcatgatccgcctgcctcggcctcccaaagtgctgagatttcagacgtgagccaccgtgctcggcaacttgctggctcttaacttctattttagtctgcctaaaactgtagcagagctgatcctgggcagctgttctctggtccagatctgttaagcgggggtggggtggtagagcaccagactaacatgccagtatcttggtaaaatctcagccctttaacaaagggccatgcagcataagatcatttcatttgcatgtggctgaataagtgatggaaggaaatgatagtccagttccacatagagtgtgttggcacataaacagtttgatagccttgttatatrttggaggtgctgatatatttttgtatatttcttagtgttactgtagttctgaagctattggaataagacccaattgaataaggttgaaaccaggagattttgtttgatcttacttagtatgagttaaaataaaaacttagaatttctctatgttctttagttttgtaatattaggtcattaaaactttgatgttgttgattattcaaggctggttgttctaagcttcagggctgccagctgtgatcagatcttcatttctgcatgtgtgtctcagaggcccaaatccacacttgaactttttgcraagttgtgtcataaccctactcattgatggraaaatgttttcatcagccaaaaattactatcttctgttttatgccagaaattcaatttgacaaatatttaggtacttaatgctatgtgaaaggtattcatgcttcaggagctgtaacagtgactaagatgtgatccctgccctgaaacacattgctgaattccttccataacttctttgttgaagctgtcttccactggctgagtgtagctttcttctggtccctgctttttagcatcttaaaggtgaccttggcagtcccaggactgacatgagtcataattcagaaaaaggaggggaagatgatgttgacaatggcaggactgaaagttttgacaactttagcggagcaatcaattgtgttctctctaccattattccatcagaatgcttttaagaattgtatcaatttaaaaaaaatctcataggtgtagcttatcagtgcgtgtttcacttagctgttttgtaagtttctcgaggctaaggaacacacacaggcacacacactgtatctcttttttttttttttctgagatggagtcttgctcggtcgcccaggctggagctcaaccttcgcctcctgggttcaagtgattctcctgcctcagcctcccgagtagctgggactgtaggcacgcgcccccatgccagctaatttttgtatttttagcagggacggggttttgccgtgttggctaggctggtcttgaattcctgacctcaggtgatctgcccacctcagccttccaaagttctgggattacaggcgtgagccactgtgcctggcacacagtatctcttatagtacctagtgcagtgtgacaagttcatttttctaattctttaaacctttcttggttggttgaattgttaagaatggtagatctcagatgctgcagtctacctaggaattcatcccaggctcagctagtgcttgtcagtatagtgatggataagggtgggagggctgacatgacaggactgtcagatgctgggtagtggtggcttattccttacagcacctctctctagcccaaggctcacccttcctaagggctaaccattttacctttcccccccaggaccctcaggggcggcacgtaaaaacctatgaggtgtctctccgagaaaaggaattcaataagggcccttggaaacaggaaaatgtcgaagctgaagcttccatggtgatcgcaggttggtagggggtttaggaaatgtgcctccacctgggtctaggctagttccctgttcttgttcgctccctcaccttctctgcccttcgttttggcgctcggtattattgaaggtgtgcattgtttaccactcctttatgttttctttctctaattgtgctttgtttttttctgtctttgagattttctgtttttcacttctccccccaaaagtataacttgtcttttacttgggtggagggattgactataaaacattgagattgatttgcacagtggcatatggaaatgagtctcattattttattgctgggcataacatttaaaactgaaaggaagccaggatctatagtcccagctactcaagaggctgaggtgggaggttcacttgagcctaggagtttgagttcagcctgggcagcataatgagaccccatctctttaaaaaaaaaaacaacaacaaaaaactgaaagggagcaatagagcttatctgatttctttacctcatagatgaagaaacagggccagagggacctgcccatgcctgtccatgattgacaaagtctgggctagaatccaggcctcttcactccttgtcctaagtctgcccctacattatgtttgtctcactcagtagggaagttttaaaactcttaagagaaaattggctcttctcagtggtagccctgataatggggggaagttaagctaaggaacaagagtggaaaccaggaaaaaaaagtaaaagcttttacttggaaaggattagaagttgagaagaaaaatgggggagaatgcatggggaagaacatggagaagactccccacccataggaatagtcgaacaccagaagagtggcagtaaaaatactaccaggattagataatggccagttaacaaattctaagagtctcgtaaaggctatcatgttccctgggctttgatgtcctttttaaaataatgatgaccttaaagtttgccttggggctaactagacctgtactyttgccagtcctggtttggcagacccagagtgctgagcattctaattttgctgtctttcctgcagtcccagagccctttgggggggccatcatcattggacaggagtcaatcacctatcacaatggtgacaaatacctggctattgcccctcctatcatcaaggtgagcgcagtcctacctttttttcctttcatcttttctttccttgtcctcaccttgctcctccctttctcttatttatcaaaaggagattcacagatgcctgttacacaatttactatgtatataaggtattgcgttggccattgggaatacagagagagattagcctggatttgcttacagagaacttgcttgctaacttagataaatgataatcaaaataggcttccccttttcattgactggggcaactttttttgtcaaagagacagggtcttactctgtcgctcaggctggagagctagaatgcagtggcatgatcgtagctcactgtagccttgaactcctgggctcaagtgatcctcctgtctcaacctcccaagtagctaggattacaggcatgaactaccacatggggcaactttaagaggggaaaattttggcagtttcttttttttttttgagacggagttttgctcttrttgcccaggctggagtgcagtggcacgatctcagctcactgcaacctccgcctcccaggttcaggcgattctcctgcctcagcctccttagtagctgggattacaggcatgtgccatcacgccyggctaattttgtatttttagtagagatggggtttctccatgttggtcaggctggtcttgaactcccgacctcaggtgatccatccgcctcagcctcccaaagtgccgggattacaggcatgagccactgtgcccagccgtaattttggcaatttctattgcatgtaatgttttcagggctcaagtcatataaagtaatatattgataaattataaaggctaagaaagtcaaaaatgtcaaggacttagaatatcaagttgtaaaaattaagccttaaaagtttcattttactttctttttgagaaaaaagaacaaaatctagctggctacagtggcaagttcctgtagtactagccacttgggaggatggcttgagtccaggagtttaaggctacagtgcactgtgatcatgcctgtgaatagccaccgtactttagcctgggtgacatagaaagaccctgtctttaaaaaaaagaacaaaatctgtggtagcattgccacagtggtagggggtaattagtggtattaagaataaataacaacatttgtagtagcatgcatagttcagtagattttggcagcagcttcctattctgtgtatttctattttcctgcagaatgacgacatatcagtaaacatataagatatattgatggagcgcctcagaaaattatcttcaaaataaaaaagctccccattttctattaatgggcaataggatctatcctcattttcatgtaatgttatctgagcgatttgtctgctggtaaaatggctgggtttggtaaagggagtggtccagtagggtttgttttctggtgtagaagatgctgaatctctaatgactgtttccttccaattggcagcaaagcacgattgtgtgccacaatcgagtggaccctaatggctcaagatacctgctgggagacatggaaggccggctcttcatgctgcttttggagaaggaggaacagatggatggcaccgtcactctcaaggatctccgtgtagaactccttggagaggtagagcttgttctccctgttcctctacaatgttcttttaggttcctaaagacaccaaatgtgtggtcccacacctcaactctgggaattatgttacttaacacctawcaacaaactgttgttcctgctgtggaagttgactgttgaatgagttaggtattggagcatctcacaggatcctgtgataatctatccaagcagcctgtgagaaaaggaaaagaaagggaaacagaaaaggatataatctggaattaaagatcaatctagctggtttcagtggctcacacctgtgatcccagcactttgggagactgagtcaggcagattgtgtgagccccaggagttcgagattagcctgggcaatatggcaaaaccccatctctacaaaaagtacaaaaattaggtgggtatggtggtgtgtgcctgtagtcccagctactcgggaggctgaggtgggaggatcaccttagcccggggaggtcgatgttgcagtcagtgagccatggtggtaccactgcactccagcctgggtgacagtgagaccctgtctcaaaaaaagaaaaaaaaaagattattgctgatttcagttctgggaggaggctcccaaaaagtttaatattaatacttaggcagtatcttttggagcaggaatatgcaagacaaattatagatttttctgagtgtagggatgcaatagatgaagaatcaaaaacttcagagatttagaaacatttgcttagygtgacctgggaatttgaaacagaactgttctgaattatggctgcagttgggagttttctcagcagatgtctgagatgtgggtrgtatctggatcccacgtagggtccattctcatttctttcacgttgctgactttcttccagacctctattgctgagtgcttgacataccttgataatggtgttgtgtttgtcgggtctcgcctgggtgactcccagcttgtgaaggtgagaagacacttgtttctggtttcttttttgctgtactcactgtttcttcatcaaatttctcctatgtttggcacctctcagaatctctccattttatccacatccctactatccagctttctacttggttaatttaacatcctacccctgactagctctttgcctttgtggttcattcagcaaatttgccaggcaaggtgctaggtgctgtggatacattgatgaacaagacccagctcctaccttcaaataggtcatagtttaatgtaatggacttcttctagaatatgaaaacttcggaccttctctgcagaaaaatgcatgcaaacattttacattaattttcaaacattcactacttctctgaaatccatccatggactctaggtcagcaatccttggctgattaatgggtcacctgtgggacaaccatattctttcgtcaatagtccccttctggaatcatcccttggaacatgagaatggcagatctagaaactagttattgagagtttcttttggacaataaccatctcttttgggtgggtctgttagggtgttctaggactaacataacattgttctttcttattagctcaacgttgacagtaatgaacaaggctcctatgtagtggccatggaaacctttaccaacttaggacccattgtcgatatgtgcgtggtggacctggagaggcaggggcaggggcaggtaagggccattctgaaagtggatagttggtatatgcccactcaaactgtgtcctcctagctatgcttatctagaatggggagggtgcactgaaaatacttttaagagccccctcatgaatcccagtgatataaggataactactgtttattgagtgcctatcttggtctgccaggcactttatatacattatctctaattacacaagtaccctagatagggatatttggccatctcagaagtgaggaaaattagggctgagaaagattaagtaactttttccaaagtcacctaacttaataagtggcaggtgtatctaacagatcctgtgctcattctagtaaactaggtcccagcgatctaagcaagcttgctaggagcagtggtagaagctttttgcttcctggactaggatgtcctgtctgctctgtaaatttgaaagactttggaaatcaacctctgccaagtctgcatcctcaaacctagccccacaataaaggttcttggatttaggtataccgtgtttactttctgggcatcagtatgactggcccagtatcttgagggggttctttagaaacgttttctctgcttgcagctggtcacttgctctggggctttcaaggaaggttctttgcggatcatccggaatggaattggaatccacgagcatgccagcattgacttaccaggcatcaaaggtagcttttttggtgggcataggatgtagrtcttacatgagggactttggccttgttacatgttgtgaaggcgttttggtgggagccagaggaaagcagatcaagtgaagagtgaaagtcgtaacaacagatcagaagcttaaacatatctgaaagtataaaagtaaactttagaaaaaaaaaaaaaagaaaatactactgatcaaaattggtagtggaatagaggactaggggattaaaagattataaattaaaattaatgttgtttatatgaggcaaccgatagaattcataaagaaaggagagactgaggatattttatgaagatataagtataaatgtggtttctagataaaaaatataaatcttcctaaattccaggagaattttaataaaaaaaagatcagaggctaggcgaggtggcgtggctcatgcctgtcattacagcactttgggaggccaaggtggaaggattgcttaagcccaggagtttgagaccagcctaggcaacgtagacctcatctctataaaaaaaattaaaaattagccaggggtgatggtgcatgcctgtggttgcagttacttggttctagcctaggtggaagatcacttgagcccaggaggttgaggctgtagagagccatgattgtgccactgcactctagtttgggcgacaatgagaccttgtgtcaccaaaaaaaaaaaaaagagaggctacacagtgaaagacatttagaatgtataagcgtaacctaaaacagtatgacagaattgatatggaacatagctgtcatgtcagtaaatgtaaatgtcctgtttgaggacagcataatcagattaaatcataaaacaaaaccaccttaaagttgtatataggaggcacatctttaaaagagtaattctgaaggtaggtgcagtggcgtgtgactgtagtcctagccacttgggaggctgaggcaggaggattgcttgagtccaggagtttgagaccagcctgggcaacatagcaggatcccatctcaatttaaaaaaaggagtaattcagaatatgaaaaaaaaagtatgggaaaaggtcaataaagaaatagaagtatggccaggcatgttgcctgacacctgtaatcccagcactttgggaggctgaggtgggtggattacctgaggccaggagttcgagaccagcctggccaacatggtgaaaccctgtctctactaaaaatacaaaaaattagccaggcatggtgtgggtgcctgtaatcccagctactcgggaggctgagacgggagaggcacttgaacctgggaggcggaggttgcagtgagctgagactgcgccactgcactacagcctgggccacatagtgagactccatctcaaaaaaaaaaagaaaaaaagaaaagagaagtatatgaaattgcaaaggaagagatcatataactacaaacccaagataatcaactaaaaaactactatagacaatacaaattcactaagatagcaggatgtaaaagtaatgtactgaaattaatagctttcatgtaaacacagtcaattagaaagcatagtagaggaaagggggcaatttaccataacaagaaaatgattaagtaccaaggagtacatttaacaaaattgtgcaaaacctatacaaggaaaacttaaagatactcctgaaggaggaaaagaacaagttgatcaaacgaaaaagacacaccaagtactgcaaatcagtattataaagctgttctctctttatatttaatgtacctgaatatgtatacaatgtttccttgacttagacaagtccaaatggaaaaaggaagaagcaggcataaccaggaaaactttaaaaagagcaatgagaggccgggcgcaatgcctcatgcctgtaatcccagcactttgggaggccgaggcgggcagatcacaaggtcaggagatcgagatcatcctggccagcatggtgaaaccccatctctactaaaatacaaaaaattagccgggggtggtggcgcgtgcctgtagtcccagctactcgggaggctgaggcaggggaatcacttgaacccaggaggcggaggttgcagtgagccgagatcgtgccactgcactccagcctggcgtcacagcaagactccatctcaaaaaaaaaaagaaaaaaaaagaaagcagtgagacatgttagccctaccagatactgaagcatactgttaagcctctataattagaagtgtagtattgctgatgaataggcagagtctaatgggcagattcagaagtccagaaatgacataattacatgtggaaattcagtgtatgatagtggtggcttctcagttcagtgagtaaagttgggactttttaaatttttatttgtattcattttttgagatagggtctcactctgtcacccaggctggggtacagtggcatgatcacggcttaccatagcctcaatatcctgggttcaagagatcttctctatgtcagcctcccagtagctgggactccaaccatgcgccaccacgcctggctaattttgtttgtgtttggtagaggtagagacagggtctccctatgttgcccaggctggtctcaaactcctaggctcaagcggtcctcccgccttggccttctgaagtgctgtaatcacaggcatgagccactgagcctagcctaaagttgggacctaataaatggtgtttttgggataattgatagtcatttgggaaaagacaagtttgggttcatactgcctgccaaatgtacacttggctagaatctaaatggttgaaaaacttaatgtaaaaaaatgaagccataactatgactcaaagtacagaagccaaaaagaaagattgataaattccaactatataaaaataaaacacttcatagcaaaagcaaaacaaaacactattaggtaagtcagaagaaatgacaaaccagataaaaatattctgtagttcatcttatagacaaaaggcccagtcttcctaatttataacatatttatagaaagatcactaaattttctgtccccaaactagcaaaggacatgaatggacaggcaacagtcctgagaaatgcacattaacaccaaacagcagtactctactagatgaccaaaatccagaagtttgaccacacattatgttggtcgggctgtgagaaaataaacatgcttgtgcatcctctatagaagggaattgggcaatatcaaagacagcagttagcgatttacttagtagtcccagttctgagcctctacctgacctttatatgtataaagtgacataaaaatacaagcttatttcttgtggcattgtatgttatagcaaaatactgaataaatataatgagaagggatttgttaatctgcataatttaataattatagataaatgatttacacaattaaatactgtgttctgataagggcttcaagcatatattgttcaatgaaagaacaaggtgccaaatagtgcatgatagactattttatatttgcatttgtttgtaatactctatttccttaaagtaaaaaaaattaagcttagtgttgcatagtgggcctgtagtccttactgttcaggaggctgaggtgggaggatcacttgagcccaggagatcgaggccagactggagcaacatagcaagatcctcccacaccccatctctttaccagaaggctaaacaagatgcctttattgattacttgtttgggggatgggttggagggaggtatgggaatgagacttttctgtgtacttttaaaaaataaatttaggctgggtacagtggctcacacctgtaatcccagtactttgggagaccgagtgggcagatcatgaggtcaggagatcgagaccatcctggctaacacggtgaaatcctgtctctactaaaaatagaaaaaattagccaggcgtggtgacacgcacctgtagtcccagctactcaggaggctgaggcaggagaatcgcttgaacccgggaggcggaggttgtagtgagccgagatcgtgccattgcaccccagtctgggtgacagagcaagactccgtctcaaataaataagtaaataaataaataaataaatttagactttgggtcatggaaatgtatatccaatcccaaatttaaaataggctcaaaacagctttaaaattatctaacttttggcccggcgtggtggctcacgcctgtaatcccagcactttgggaggccaaggtggcggatcacgaggtcaggagatcgagaccatcctggctaacatggtgaaaccctgtctctactaaaaatacaaaaaattagccaggtgtggtggcgggcacctgccttcccagctactcgggaggctgaggcaggagaatggtgtgaacccgggaggtggagcttgcagtgagctgagatcgggccactgcactccagcctggtgacagagcgagactccgtctcaaaaaaaacaagcaaacaaacaaaacaaaactatttaactttttagagccttaaaaccaagaaggagcagagagggggttccagctcaggactccatgttccagcccttccagtggtgtcaggctgccatgtctatatatatatatatrtatatatatatatatatatatatatatatatatatatatatatmtatcctttttttttttttttttttttgagacaggatcttgctgtgtcacccaggctggagtgcaatgacatgatcatagctgcagcctctttctcctaatcttaagcaatccccccacctcagcctcccatgtagctgggactatagttttgtgccaccacacctagcaagttcttttgtatttttagcagggacaaggtctctccattttgcccaggctggtctagaactcctggttccaagcagtcctcctgcctctgccttcccaagtgttgagattataggcatgagccactgcccctggcctgccctgtccgtagatatgcatgctaagtgttggtctgtcctatgcatctgaatccttggtccttgttccaggattatggccactgcggtctgaccctaatcgtgagactgatgacactttggtgctctcttttgtgggccagacaaggtaaggatgggtctagtgccagctgtaggtgctggtgagaaggttgtgaggtggggaagctggtcccaggctgacccaggccctccattctgctgcagagttctcatgttaaatggagaggaggtagaagaaaccgaactgatgggtttcgtggatgatcagcagactttcttctgtggcaacgtggctcatcagcagcttatccaggtgataactgagaaaggggcaggtgttaccatatacttgaattgacctagatgcagtacagagcaccactggattttaaaacaaccaatttttatggctccaaaaataatgtaaaaattctagggaaaaaattacagataatccactactcagagatcacaactcttaaccttagagttgctccttttagctttatttttcttctgcaaatgtctgtgtatttatttacattttcttttatagactcgggtcattatatatataaacataaaaatatagtttcggatcctattttagcactaattatatcttccgagacactcaaattttttccctttgttaaactagtgatacatccttatttataaaattagaaaatgccaaaatgcacaaaaaaagaaaaaatcatgatgctaccatccaatatgactcttggcagccctttccacatactaattataaccgaagcttaccctattctgatccttactttcaatctatctgcaatacgggggcagatagccttctggcatattgttatccacgagagcctcatttctgacacccttccacccctcagcaattttttgaagtttggagtgaccctgacatccttcagcttttagcactctctccttaccttctgagctgttcttcactctgtggccagagtctgtcttgcctttggtgggtagggcactggagtgcctaaggattaatgaactgtctctgtctttttatccacctggttttccttttagccacctggcagtggtagattggtaaaaccggagggaaagttctgtcagtttgcagaccaagtgtgggacgtgcccagatactgagtcattgctttgtcagtgttatctaactattggcctgaagactggcaccagctcacctatttattattaaagagctttcatccttatatataaactcaattgtgctaggtaagatgaatgaatagataacagtgtcaccaacctacttcctgttttatttcagtgataaatttatacaatatatttctatacaattttgtaatctttactaaggaactttaaataatttaaatggctcatacacagtaaagaacttagatattttagaggtctgatttgggggttgagaaaaactgctaagactggtggtcacagtcaacatggtggctcacgcctgtaatcccagcactttgggaggccaaggcaggtggatcatgaggtcaggagttcaagatcagcctggccaacatggtgaaaccccatctctactcaaaaaacaaaagttaaccaggcatggtggcatgcgcctgtaatcgcagctacttgggaggctgaggcaggagaatggcttgaacctgggaggcgtaggttgtggtgagctgagattgcaccactgcactccagcctgggcaacagagagagactctgtcccaaaaaaaaaaaaaaaaaaaaaaaagccaaaaaactggtggtcacagggtcttactctattcatatcttcccacaggatgcagtttgtattacccaagtaagtctcaattagaatgaaataggccttttccccaccagctgtaggtttgtaagctgtaagctacttttaagctggcctccttcaggcattcatgcaaaaatgacatctattgtaatcattagcaggactttggggaataagaaatagaagcctcatgtagcttattcgtagggctctattagggctgcatttaccacctttccactcctgtgtggaccctggcagatgcttggagacatttgttcatctgctgtttatctagatcacttcagcatcggtgaggttggtctctcaagaacccaaagctctggtcagtgaatggaaggagcctcaggccaagaacatcagtgtggcctcctgcaatagcagccaggtggtggtggctgtaggcagggccctctactatctgcagatccatcctcaggagctccggcagatcaggtgtgtgtgtttttctgtctgctcgctttcctcctcttttctctaggacttmtttgagccttggattccttcctctgccatattcttctttgttcagccacacagagatggaacatgaagtggcttgcttggacatcaccccattaggagacagcaatggactgtcccctctttgtgccattggcctctggacggacatctcggctcgtatcttgaagttgccctcttttgaactactgcacaaggagatgctgggtggaggtatgtgtcatttagggacctgggttgggacagagtcaaaatgtggaacaagaacatartgtccccctttctcacagagatcattcctcgctccatcctgatgaccacctttgagagtagccattacctcctttgtgccttgggagatggagcgcttttctactttgggctcaacattgagacaggtgagagtagtattttgagtgagggactctttcaaaaatrgagtattagaattacacagaattcttagtcccagggttctgcttttgaactttcacaggccagctttttgtcctgttttctttcttcctttctcctgatgtcattctctctgtaggtctgttgagcgaccgtaagaaggtgactttgggcacycagcccaccgtattgaggacttttcgttctctttctaccaccaacgtctttgcttgttctgaccgccccactgtcatctatagcagcaaccacaaattggtcttctcaaatgtcaacctcaaggaagtgaactacatgtgtcccctcaattcagatggctatcctgacaggtgagtctctttttccttatttaatgagagctattgattgagggggtcatgatgttttcctcaaacccttacctcaaagcctttttccggtgtcaaaatcataactgagatgggaagtatagtgcagaggttctcaaaactggctacccaatagaaacacttgggaagttttttaaaactacaggatttttggaatcctcagtgggtctgaggttgagctctggaatctgtattttcagaaaacttatcaggtgattcagatgactgtttcataatccctaatttagagatcattttgtgtccctctagagcaggaattctcaaagggtgtccccaaccagcagctacagcattacttgggaacttgttagaaatgcagattctctggctgggcatggtggctcacacctgtartcccggcactttgggaggccgaggcaggaggatcatttgaagtcaggagtttgagaccagcctggccaacatggtgaaaccttgtctctaataaaaatacaaaaattagccaggtatggtggtgtgtgcctgtaatcccagctacttgggaggctgaggcaggagattcccttgaaattggaaggttgctgggtgcagtggctcatgcctgtaatcctagctctttgggaggctgaggtgggtggatcaccggaggtcaggagctcgagaccagtctggcygacatggcgaaaccccatctctactaaaaatacaaaagttagccgggtgtggtggcaggcacctgtaatcccagctactcaggaggctgaggcaggagaatcacttgaacccaggaggcagagttttcagtgagccaagatcccaccattgcgctccagcctggtgacaagaaaaaaaactgtcttaaaaaaaaagaaactgggaggtggaggttgcagtgagcttagatttcaccgctgcactccagcctgaataacagagctgagactctgtctcaaaaaaaaaaaaaaaaaaaagagagagagagagaggaaagaaaagaaagaaatgcagatgctcaagccccaccctgactcacagaatcagaaactctgggagggggcccagcagactgttttgacaagccctccagccaactctgacacaggcagtagtttgaaagtcacattcctggagcgttgatttttttaactggttgcacattatcattaaatggaaagctgttaaaaatctcagcctaggctcacccagaccaatgaaataagagtatcttgtggatgggaccaggaatcagaattgtctgtctctccaggtgatgtttagcatggagtcaaagctggtgtaatcctgccttgtttttcttcctctgtggagttgcctcatagaatctttgccttccttgagtctcctcagtctaaacccagacccttctttccagcctggcgctggccaacaatagcaccctcaccattggcaccatcgatgagatccagaagctgcacattcgcacagttcccctctatgagtctccaaggtgaggcccagggtgggagagtgggaagtgggggttggtgtagggtgcttctgactttctaartgacactgttgttctgtacttgttctgcaggaagatctgctaccaggaagtgtcccagtgtttcggggtcctctccagccgcattgaagtccaagacacgagtgggggcacgacagccttgaggcccagcgctagcacccaggtaagggcagtggacaaagaaagatgaccttagagcaggggccagcaagctttctgtacaggccaggtagtgaaggctttcggctttgcaggcagtgtggtctcagttaccactgactgttcaactttgccatcgtagcctgaaagcagctgtaggcaacaggtgagcatagctggcttctataaaagtttatttttaaaaaacagttcctacttggtggccttgcagcatctgtcaccatcagtttgggtcctttgtagagtggtcraatagaggaggaacatggggtttggagtccgacagaacgggcttccaggtttgtttgtttgttttttttttaagacagaaaccagcttttcaaaagtgcctactgggtttatgttatgttatgttatgttatgttttatgttatgttttatgttatgttatgtgttatgtttgttatgttatgttatgttatgtgttatgttatgttatgttatgttatgttatgttatgttatgttatgttatgttatgttatgtttgttattgagacggagtctcaccctgtcgtccaggctggagtgcagtggcacgatctcggctcactgcaacctctacctcccaggttcaagcgattctcctggcccagcctcctgagtagttgggattacaggcgcgtgccaccatgcccagctaatttttgtatttttagtacagatggggtttcactgtgttggccagcctggtctcgaactcttgcccttgtgatctgcctgcctcggcctcccgaagtgctggaattacaagcgtgagccactgtgcctggcctggcttccaggtttattgctagctgtgtgaccttgggaaagcctaaacttcagttttcttatctgcagaatgaggcagataacagtctggagctacacatactaggctcagtggtgataccagctggtcattttcttccatgtattctctgcctttcatgtttccacatatctgcgataggacctccctccgtagtccagagttgaagtcttcatggcttctgtttttatttgaagtgcccccctcctcttcccattgagggtagtggagtctgtccccattaggtcacctgagttcctttttagctgtgcttgattgacttgaagcatcactgttttgtctttaatgacccttagatttttactgtttgggattgatgtttcaactacatgcctcctctgaaacactctcctcaggctccttgagctgccagccatcrgagttcttggctagctgcagcctttgtgtcctgatctgacgggtcccttcacaatgatgtctcagcacttcttctgtgtttgagaaggatgatgtgcattctctctgtttgcaggcyctgtccagcagtgtaagctccagcaagctgttctccagcagcactgctcctcatgagacctcctttggagaagaggtggaggtgcacaacctacttatcattgaccaacacacctttgaaggtgcacatgagctctttcgataatttttatctacgccctccctaatccaggctgttctgggctctggtacctgcaaagcctgacagatgtggcagactgtcctaggaggagcagaaaggaggggtgggaaytctgtgagatggcagtgagtttggagggctgggcatcctctccttagcttaggctggtgggggatggataatctgatgagacagggacagcaggtggtacacgctttgtcactgcctaagccacaggcctcagaaatacggggttatgtgtgcgtgcagatatgggtaacctgtcatcacgtagtcatctctctactctctagtgcttcatgcccaccagtttctgcagaatgaatatgccctcagtctggtttcctgcaagctgggcaaagaccccaacacttacttcattgtgggcacagcaatggtgtatcctgaagaggcagagcccaagcagggtcgcattgtggtctttcagtattcggatggtaagtgggcgcagtctccagtttctgagggatgtgaaatgctgagaaagtcagcaggccattgtgaggtttcagagagcctcagttaagcagtagaagaagttgggttcattgctgtaaagagctattctcttctttatttgattgaattttggagcatgtgaacagtacacagtaaaatttagcttacatttctttctttgctactctttgaaaggccaaaagaacaaaagggaggggtgggagaagtgaacgatgggtaagggaatctagtgacaacaggtataaaaattcagaatcttaggtttgttttccacttggttgctcaggcatttaggtgctctttccagcttcaactctgtgtttatattttaatatcttttctcgttacacccacccaagatggctctaaagactatcagcccggaaatctcagatcagatagctgaaatgggatctggtttccatcttgagagagagatctagagtttcagggygagggggcagatcctagataccaactggatttctctgcacattatcttggggctcatacttcacgtggtcattaactccagtagatactgagtctgtgttgtttttttagatgagtggttttggggggcaagaatttgtaccacaggggcaaccagaggattcttttgatgaggtaaagtgtgggctcatagagactcaaacatattttttccacccccaggaaaactacagactgtggctgaaaaggaagtgaaaggggccgtgtactctatggtggaatttaacgggaagctgttagccagcatcaatagcacggtgaggcctggaccacttggtacttactttaggctgcccatcattgtctgcagaatgtgtctctcttaggttgtctggggccacgtgtgtgtcagatctgaaggagaacaaagtagcgggtgtggaggatagagctctgagttgagaatctcggaaactgaggttgaaccacgcattagactaggttacgtgaacccccatgtgtttcagatcctgagtgctgtgggacttgagaaacgagtgagacctatggtccctgcacgtaggatgttccatgccaaaagaaaatgagccaaatcagaatatcctgagtgcattcctgaaagctagtcctttgaaatattccactgcttatgccatgaccctacctcctcccttgctaaaaagtttttttccatctttattgaggtatagttgacaaaaattttgtatatcgaaaatggacaacttgatgttttggagtagggagatagcagcaaacaaaatggacaatgagctgcccttttggagtttatgagcaaataaagtacatagtacgtgaaatggtgagaagtaaaaggggtgcaggactggaggaatgccaggatgaatgtgggaagtggggtttgctgtttcatatcacatggtcgggagggtcttgtggatacacagtggcatttgagcagattccaaaatgaagggaggtaagaaccctacctgtgcttggggaagacaagtgcaaggggtggtaggtcataggtgagagtgggcgggcctggtgtctgtggggactgagctggtgttctggtgagagatgagtccaagggacagccaggggccagaacgtgcagagcctggtaggccatatcagggttttattcagagcatgatggcaacctctggagggtttgagcaagggtttgaacatgattgaacttgtattttcaaaaggtcatgttgcttctctggaaagactgtaggggagcaggggtagaagcagcggtataagaggtcagttaggggaggctcttgtagtaatctggatgcattcggtggttgctgggaccaggtggtgatggaggagaggaataagagtagtcacattctgcttatgttatgagggtaggattgaaggactttggtgatagattgaagatgagatgtgagaggcagaggaataaagggtcgggttttggctttgccatttactgatgggaaagatagtgcagcaggtttggagtggaaaccagaggttctggatatactcagtttcagtggttatctaagtggagatgttcactagataacaatgagagaggtatggaatccagggaagaggtacactggagatactagcatggcagttaaagctgaaagtctggatgacatcacctaagaccacccatgtgctgagagcccatagagacaggatctgaagatagccctaggagctgtccagcatttcagagatagggtgaagatccagccaaacaaagggtgacttgtgaagtaggaggagaaccgagagaatagtgttctggaagccatggagaaaaagttatctgaagcaggagggaattggtaaactccaagtgttgctggcaggtcaggtaacataaagattagtaacatggaagtcagtggtaaacttgatcagagctcttggttgagtggtggggctagaaacctgattgcagtcgcctcagcggagagtaggaggaaaggaagctggtacagaaaacccctcaaggagttttgcagtaaaggacagagtgatgtggacagtgaaatttcaggataagaattttctgtttttaatttttcaagctgggaaacactgctgcatgttttctatgctgatgggactgatgttagaaagagagccattgttcttggccaggcaaaaggaggtgggatctcaaaccgagtgacagagaagggaacagatgtggaagttcatggaaatgcccttttggctgtgtctctgttctctgtgaaattgctgagagagaagatgggaaggaggtattggcaatttgagtagagtggaaaagggatgaattcattgttttaggaccagaagagtgagaggagtaggaaaatgcattatttctgagaggtttaggaaccccctttcagttagtcgtcttgaatgtaaaagaacagtcatcctgttggttggttttccttacctggagtggaagatgaaaatttaatacaagtcgagttttgttaggtgagcatgagaaaggggagaggggtcagggcgttggaatctgcaagacagttattatgtgattatggtggtggactatgagcatctgagaagaggcagagcggaggacacgagattcaggaagagtgcagttacttgtaatgccaggctttaagaggtggtcataagaatggacaaagtaagtgggaaagaaggggtcagaaaagctaagaggtgagggtattagaaggaccttctctgtgaatattatagtcatcaagacttataggaggttgtgtgggagagagtgatgggtgggttggggattcaggtgactgctttagtgggtgatggtggttgtgtggtctggtggtgtgagccttaaaactgtggtgtttcaggggagggagtgacaagtctgaaagagcagacgaggagcttgggagactgtgctacctcctgttccagtgctatgagggacagtggaagagaaaacagacaagttaagagggccacaaggcccttaggaaagagccatggatatgagttagaatgaagtgaagggtttgcccagagaagtggctgtccatggttaatgactgtgttccagagggtgcagtgagtgggcacagggatcaggagggtggagggtggcatttgaggtcaggtgaggacatatctgttctgttgccagccaatagaaatattatatgagcgatgtatgtcattctgaattttctagtagccacattaacaaatgcaaaaagaagcaggtgaaatgaataaggtattttatttaacccaatatctaaaatattagcatttccacatgtaatcagtataaaaatgcttattaagatattttacagtttttcatactaataattcaaaatctggtgtgtattttatagtcagaacacatctcaacatggactaggcacatttcaagtgtttcatagccatgtgtggctagtgactaccatattggacagtggaagtctacagccttttgggaagagaatgggagtcttggccttctggtggtgtctggctttagtcttgactctctccaaggcgatggggaggttgagagtgtggagagagagtggtggcaggtgttggcaggaacatgtggagctctgaggccccccgcttcactctttctgttggaggtgtggaggcccagcaaggtgggcttacctgaagacggggcactctggaggtaccttttaccctgtgatagaggtgtggtaaccatagtatgtatgtatgtgtttatttatgagatggagtctcactctgtcgccacgctggagtgcaatggcgcagtcttggctcactgcaacctccgactccctggttgaagagattctcctgcctcagcctcccgagtagctgggattacaggcacacgtcacaatgcccagctgatttttatatttttagtagagatggggtttcaccacgttggccaggatggtctcgatctcctgacctcgtgatccgcctgccttggcctcccaaaatgctgggattacaggcgtaagccactgcgccccgccaaccattgtaattattacaaatgattcttggaatatattcctgtgtagctagggttctttggacaaatcttgagaaattgtggtttgattaatatgttctgcccaggagtttctagatgtgcagaggccatggggattatctggatcctgaaggatctgccaggggaggcttgtcagttcagatgggttgagtctgtcttctttagcactgggccgtgccaagtagctctccatttgtctactgatgataaagcattttcattcttttggagatgtggttgtaattgaagaagcactgtggtggagacagaaaaaagcagtttctttttttttcctttttttttttttttaggcggagtctcactctgtcccccaggctggagtgcagtggccccatcttggctcactgcaagctccgcctcccagattcgcaccattctcctgcctcagcctgccgagtagctgggactacaggtgcccgccaccacgcttggctaattttttttttgtatttttagtagagacggggtttcaccgtgttagccaggatggtctcgttctcctgacctcatgatctgcccgtctcggcctcccaaagtgctgggattacaggcgtgagccactgcggccggctgcacagtttctttttccctcttgcggggtggtagagggtggctgtagaatcaagttcttcaggttcctttagttatttgtcaatgtttctgttggacttttctttctttctttctttcttttttttgagacagagtctcgctgtgtcgcctaggctgggatgcagtggcatgatctcagctcagctcactgcaacctctgtctcctgggttcatgcaattcttgtgccacaacctcctgagtagctgggattacaggtgtgcgccaccaagcccgactacccacattactgtttcctttacgtggactcatttttttatgtaaaggaaaacttgggaagttttgtattcctggtttggtgtgttcattgtgttttcatatttcataaatatgtaatagtgaaataataaatgttcaccccagtgcctcataaaaccgtttcctgtcccgcattgcactttgagaagtagtgctgcagatgaagggtygaagagttggggggagtcattctgagagagctctggcccctttggctgagagagacaatgcccttcccaggtgcggctctatgagtggacaacagagaaggagctgcgcactgagtgcaaccactacaacaacatcatggccctctacctgaagaccaagggcgacttcatcctggtgggcgaccttatgcgctcagtgctgctgcttgcctacaagcccatggaaggaaactttgaagaggtgatrctggtggggggatgcgagcagacttcttgcttgagccaccgcccctgcaagtgtctctggtggggaaggataagccagcccagtattaggggcagaaatgttttccccggagcagacattctacattgattaagttttttttttttttttttttttttgagacgcagtctggctctgtccaggctgaagtgcggtggtgcgatctcggcttactgcaagctctgcctcccaggttcacgccattctcctgcctcagtctcccaagtaactgggactacgagtagctgggactacaggcacctgccaacacgcctggctaatttttggtatttttagtagagacggggtttcaccttgttagccaggatggtctcgatctcctgacctcataatcggcccgccacggcctcccaaagtgctgggattacaggcgtgagccactgtgcccggccctgattaagtatttttagagactcccaactcaaactctgactaggctccatctctgggcagttggcaaccaaatgggctgcgttggcagagaggtcggggagaatccctctagggtgacacttgttgaacaccatgctatatcttctgcagggtggggccttgctcctgaataaaggaaacacaagtcccagaactggattccgtgcaaactgctgattatgctttcttctttcaccttgtctgttttaagattgctcgagactttaatcccaactggatgagtgctgtggaaatcttggatgatgacaattttctgggggctgaaaatgcctttaacttgtttgtgtgtcaaaaggataggtgagtagtggccagctctgggagtggtggggagggctgggagttccttggtctctggtggatgcaagcattgggttctgtgtcaggttcaggtgctcctgtttacagagatagaactttcctcgtcagagaataaaaggtgacagaaatccacctctttagactggctcccctactgtggagtatgtcagctccccagggaaattgagcaccgtgaccactgcacgtggtcctgtctcagggcctgtggtggaaacaggaggttcagaaagtgactttcttaccgcctttcagcgctgccaccactgacgaggagcggcagcacctccaggaggttggtcttttccacctgggcgagtttgtcaatgtcttttgccacggctctctggtaatgcagaatctgggtgagacttccacccccacacaaggctcggtgctcttcggcacggtcaacggcatgataggtaaggtcacccctgtggggcacacccccacacaggcctccttcctgataccagcattctgagggactggggagagcaactgtacaagacctaggtgtttactagaggaggctgcagcacattagccctccctgagctgctcacctgggctgccctttacgtagaggatacatgctgtggggttgagctctctgcagctcactgcctccttcacttcttcagggctggtgacctcactgtcagagagctggtacaacctcctgctggacatgcagaatcgactcaataaagtcatcaaaagtgtggggaagatcgagcactccttatatccttcccagagccatccccttgctgggaagcacatcccggcatatgtggcacayggagtcacattacccggaagctactacatgtcttgattaggttcctgtacagaacaggttttttgttttgttttgtttttgactttttcatgtggaaaatttcaaacatacacaatagaacagtatattgactcccaaagtacttatcacctagcttccgctggtccatcttggaaatgtacatttatattcctgaaatgtgtccgcctctggccctctcggtgtagcaggccaaatgtgaatttagatcacaacacaggagcacatcctttcagggatttggttgagggcaacagtgtctgagactagagaaactaccagaagaaagggaaaggtgaagaagcggaaaacactgaaagaatctgccaccctgggacccccagaatccaagtgctattggaagtttgtgtagtacaggagatataaagggccctccccgcccccctggaggtgggaggagctcctgtctgtgactctggccctgctctagccaaggagggctgatgggctggtttattggttttttgctaacaagacttttggcagccttgtctcactgagtctcagtttattcatcaacggagctgctgcgtttatacttcttcttcatnnnnnnnnnnnnnnnnnnnncgggcttcacattaatagactctgatctgtacttttaaaaactattttgaagatcaccccaattgagaaccaattagattaggtcatatttttacatttttttcaattccaaaaatgtccaaataaaagcaaggcgaaaggaagtgtcatttcctttctaatcctgatgattgctttagattgtggtcttattcaaaggtggggatgactgaggagggtgtttcctgataagcacgtgttccttaactcacccatccacctggagatcctttcacaccgagcggaagacagaaccagccacaggtttcatcgacggtgacttgattgagagtttcctggatattagccgccccaagatgcaggaggtggtggcaaacctacaggtgagctgtgtggtgtttaaccctgggccagacaagtccactgcaggttggggcatgccaggagactgtctctgggcacctctcctcctcagttccaagatgcgaggggacctctgtgtaatccttaccagatggaaggtggagtctgagggaaaagagatgtttgtagttgtggctcgtgggtacccactaggtaccagatgctgtgctagtaactctacccatgttaaccccgtccttgagcagtgaagacatatctgggatctttagcaagacccaaaggtgggaggcagggtcaggatcccgtagggaggagaaatggccacaattctggagtttgggatattgctcactggagatggtgtctcggggatagcagaagagggagaatcttgaagagggagaaatagaccaggtggtgtccttgctgacctgtgccacccagggggaggcgtgggtttctggtgagtccttcctctgccatgacaatggtggagtcttgtgcctccttcactgggggcattcccttccccacctgtgggagagcaccctcttggtcctcacagccccgcccatcttctcattgcagtatgacgatggcagcggtatgaagcgagaggccactgcagacgacctcatcaaggttgtggaggagctaactcggatccattagccaagggcagggggcccctttgctgaccctccccaaaggctttgccctgctgccctccccctcctctccaccatcgtcttcttggccatgggaggcctttccctaagccagctgcccccagagccacagttcccctatgtggaagtggggcgggcttcatagagacttgggaatgagctgaaggtgaaacattttctccctggagttttaccagtctcnnnnnnnnnnnnnnnnnnnnnnnnnnnnnnnnnnnnnnnnnnnnnnnnnnnnnnnnnnnnnnnnnnnnnnnnnnnnnnnnnnnnnnnnnnnnnnnnnnnnnnnnnnnnnnnnnnnnnnnnnnnnnnnnnnnnnnnnnnnnnnnnnnnnnnnnnnnnnnnnnnnnnnnnnnnnnnnnnnnnnnnnnnnnnnnnnnnnnnnnnnnnnnnnnnnnnnnnnnnnnnnnnnnnnnnnnnnnnnnnnnnnnnnnnnnnnnnnnnnnnnnnnnnnnnnnnnnnnnnnnnnnnnnnnnnnnnnnnnnnnnnnnnnnnnnnnnnnnnnnnnnnnnnnnnnnnnnnnnnnnnnnnnnnnnnnnnnnnnnnnnnnnnnnnnnnnnnnnnnnnnnnnnnnnnnnnnnnnnnnnnnnnnnnnnnnnnnnnnnnnnnnnnnnnnnnnnnnnnnnnnnnnnnnnnnnnnnnnnnnnnnnnnnnnnnnnnnnnnnnnnnnnnnnnnnnnnnnnnnnnnnnnnnnnnnnnnnnnnnnnnnnnnnnnnnnnnnnnnnnnnnnnnnnnnnnnnnnnnnnnnnnnnnnnnnnnnnnnnnnnnnnnnnnnnnnnnnnnnnnnnnnnnnnnnnnnnnnnnnnnnnnnnnnnnnnnnnnnnnnnnnnnnnnnnnnnnnnnnnnnnnnnnnnnnnnnnnnnnnnnnnnnnnnnnnnnnnnnnnnnnnnnnnnnnnnnnnnnnnnnnnnnnnnnnnnnnnnnnnnnnnnnnnnnnnnnnnnnnnnnnnnnnnnnnnnnnnnnnnnnnnnnnnnnnnnnnnnnnnnnnnnnnnnnnnnnnnnnnnnnnnnnnnnnnnnnnnnnnnnnnnnnnnnnnnnnnnnnnnnnnnnnnnnnnnnnnnnnnnnnnnnnnnnnnnnnnnnnnnnnnnnnnnnnnnnnnnnnnnnnnnnnnnnnnnnnnnnnnnnnnnnnnnnnnnnnnnnnnnnnnnnnnnnnnnnnnnnnnnnnnnnnnnnnnnnnnnnnnnnnnnnnnnnnnnnnnnnnnnnnnnnnnnnnnnnnnnnnnnnnnnnnnnnnnnnnnnnnnnnnnnnnnnnnnnnnnnnnnnnnnnnnnnnnnnnnnnnnnnnnnnnnnnnnnnnnnnnnnnnnnnnnnnnnnnnnnnnnnnnnnnnnnnnnnnnnnnnnnnnnnnnnnnnnnnnnnnnnnnnnnnnnnnnnnnnnnnnnnnnnnnnnnnnnnnnnnnnnnnnnnnnnnnnnnnnnnnnnnnnnnnnnnnnnnnnnnnnnnnnnnnnnnnnnnnnnnnnnnnnnnnnnnnnnnnnnnnnnnnnnnnnnnnnnnnnnnnnnnnnnnnnnnnnnnnnnnnnnnnnnnnnnnnnnnnnnnnnnnnnnnnnnnnnnnnnnnnnnnnnnnnnnnnnnnnnnnnnnnnnnnnnnnnnnnnnnnnnnnnnnnnnnnnnnnnnnnnnnnnnnnnnnnnnnnnnnnnnnnnnnnnnnnnnnnnnnnnnnnnnnnnnnnnnnnnnnnnnnnnnnnnnnnnnnnnnnnnnnnnnnnnnnnnnnnnnnnnnnnnnnnnnnnnnnnnnnnnnnnnnnnnnnnnnnnnnnnnnnnnnnnnnnnnnnnnnnnnnnnnnnnnnnnnnnnnnnnnnnnnnnnnnnnnnnnnnnnnnnnnnnnnnnnnnnnnnnnnnnnnnnnnnnnnnnnnnnnnnnnnnnnnnnnnnnnnnnnnnnnnnnnnnnnnnnnnnnnnnnnnnnnnnnnnnnnnnnnnnnnnnnnnnnnnnnnnnnnnnnnnnnnnnnnnnnnnnnnnnnnnnnnnnnnnnnnnnnnnnnnnnnnnnnnnnnnnnnnnnnnnnnnnnnnnnnnnnnnnnnnnnnnnnnnnnnnnnnnnnnnnnnnnnnnnnnnnnnnnnnnnnnnnnnnnnnnnnnnnnnnnnnnnnnnnnnnnnnnnnnnnnnnnnnnnnnnnnnnnnnnnnnnnnnnnnnnnnnnnnnnnnnnnnnnnnnnnnnnnnnnnnnnnnnnnnnnnnnnnnnnnnnnnnnnnnnnnnnnnnnnnnnnnnnnnnnnnnnnnnnnnnnnnnnnnnnnnnnnnnnnnnnnnnnnnnnnnnnnnnnnnnnnnnnnnnnnnnnnnnnnnnnnnnnnnnnnnnnnnnnnnnnnnnnnnnnnnnnnnnnnnnnnnnnnnnnnnnnnnnnnnnnnnnnnnnnnnnnnnnnnnnnnnnnnnnnnnnnnnnnnnnnnnnnnnnnnnnnnnnnnnnnnnnnnnnnnnnnnnnnnnnnnnnnnnnnnnnnnnnnnnnnnnnnnnnnnnnnnnnnnnnnnnnnnnnnnnnnnnnnnnnnnnnnnnnnnnnnnnnnnnnnnnnnnnnnnnnnnnnnnnnnnnnnnnnnnnnnnnnnnnnnnnnnnnnnnnnnnnnnnnnnnnnnnnnnnnnnnnnnnnnnnnnnnnnnnnnnnnnnnnnnnnnnnnnnnnnnnnnnnnnnnnnnnnnnnnnnnnnnnnnnnnnnnnnnnnnnnnnnnnnnnnnnnnnnnnnnnnnnnnnnnnnnnnnnnnnnnnnnnnnnnnnnnnnnnnnnnnnnnnnnnnnnnnnnnnnnnnnnnnnnnnnnnnnnnnnnnnnnnnnnnnnnnnnnnnnnnnnnnnnnnnnnnnnnnnnnnnnnnnnnnnnnnnnnnnnnnnnnnnnnnnnnnnnnnnnnnnnnnnnnnnnnnnnnnnnnnnnnnnnnnnnnnnnnnnnnnnnnnnnnnnnnnnnnnnnnnnnnnnnnnnnnnnnnnnnnnnnnnnnnnnnnnnnnnnnnnnnnnnnnnnnnnnnnnnnnnnnnnnnnnnnnnnnnnnnnnnnnnnnnnnnnnnnnnnnnnnnnnnnnnnnnnnnnnnnnnnnnnnnnnnnnnnnnnnnnnnnnnnnnnnnnnnnnnnnnnnnnnnnnnnnnnnnnnnnnnnnnnnnnnnnnnnnnnnnnnnnnnnnnnnnnnnnnnnnnnnnnnnnnnnnnnnnnnnnnnnnnnnnnnnnnnnnnnnnnnnnnnnnnnnnnnnnnnnnnnnnnnnnnnnnnnnnnnnnnnnnnnnnnnnnnnnnnnnnnnnnnnnnnnnnnnnnnnnnnnnnnnnnnnnnnnnnnnnnnnnnnnnnnnnnnnnnnnnnnnnnnnnnnnnnnnnnnnnnnnnnnnnnnnnnnnnnnnnnnnnnnnnnnnnnnnnnnnnnnnnnnnnnnnnnnnnnnnnnnnnnnnnnnnnnnnnnnnnnnnnnnnnnnnnnnnnnnnnnnnnnnnnnnnnnnnnnnnnnnnnnnnnnnnnnnnnnnnnnnnnnnnnnnnnnnnnnnnnnnnnnnnnnnnnnnnnnnnnnnnnnnnnnnnnnnnnnnnnnnnnnnnnnnnnnnnnnnnnnnnnnnnnnnnnnnnnnnnnnnnnnnnnnnnnnnnnnnnnnnnnnnnnnnnnnnnnnnnnnnnnnnnnnnnnnnnnnnnnnnnnnnnnnnnnnnnnnnnnnnnnnnnnnnnnnnnnnnnnnnnnnnnnnnnnnnnnnnnnnnnnnnnnnnnnnnnnnnnnnnnnnnnnnnnnnnnnnnnnnnnnnnnnnnnnnnnnnnnnnnnnnnnnnnnnnnnnnnnnnnnnnnnnnnnnnnnnnnnnnnnnnnnnnnnnnnnnnnnnnnnnnnnnnnnnnnnnnnnnnnnnnnnnnnnnnnnnncctcccaaagtgctgggataacaggtgtgagccacagcgcccggccacctgtggtttttctttactgcaaactcaatgtgtcataattaacatcatggggttgccaaaaacgtaatattagggtgcattagtaaaagtatggtgtctgcaggaaggaggcacgagtccaggccaccgctggtacgccatgtccatttgtggccaccaatgttaagcacctcagtaaaggcagaggtagcaggaaggccaaaggaacagggattgttcaactgggaagtgaagacactttaaaacaaatgtggttcaaaactggattgggccgcttcttaacagatagtgagtttcttacccctggaagtatttaagcaaaatcttgactaattgtgggtggctaagggaaagattactgcatggagcagaaggtaaaatcagttatcctttcagctttctcccagcgggatgattttgatttccgcaccccttctttgcctaaatccctaggcagccccccagtctctgaccacggcctggggcagctgcagaaggggcaaagaggagccttccagatctgctgctgcctctccactgccaacggcgccagctgcttcctggtcttgccaccagcagtcgggaggccggccatctgccccctgggtgcccagaggagcccggggcttcaaaagtggctagggccccaggccagggagcggttggacccacagatcaacgcactccggcgttagggtgcagaccttctggcaggctgggggcaggcctagaactgctcagcggcacagcgacctggcgtcgtgggttcgaatttccacggttcccacctcgtcacaacaaggcgtctcgggtcccaccgacaggggccatgcccggggcgcgcagcctctggtgctagccttgttcccgaagtctgtttcctcccggggcctcggtctgacgccttcagtcagcgcttcgcaggaagccgactcccaaaccggggcagggggtgtgggccgagggcgaaaccccgcccccaggggtccctgatctttgcccccgccccgggctccgcgcctctcggagaggcatcagcaggcgggcggcgttgcctttgtgtgtttcgcttcgaggtgccagagaccctccccacaatcgtccgccgcgtcccctcgcggccctcggcccctcctctcggcgtcccaagcccccctgctcagctctgcgtgccatttcggggatcgctggttcgctccccacggcgccaggaggaggggcgagggccggcagccccctctcccgcgcgcggcgcaggagccgagcccagcccgggggacccgccgccgccggtcatgtgggccggactgctccttcgggccgcctgtgtcgcgctcctgctgccgggggcaccagcccgaggctacaccgggaggaagccgcccgggcacttcgcggccgagaggtaagcgcccggagctcctccccgctcccccgcccgggagagcgctaccggcgtgcagtcgagaggcgcggaggggcgctcaggagccgcaggcagccgcgtgtcggggcttcctctggggtgctatcagcgcgggcacagctcggggacggcacaaagagtcagcaacttgtgcctctaggcgggtgctcatcgtgcccccctggctggggctgtccagactgggacctgggagatcggaggtccaggcgttgggtgactcctaatgtgccctggagcgcggacctctggagaggggagcccaggacgtgccatctggtctccggactggctggctcaccccccagcgtgcccgtggctctgcccgggcagcgcctggcctcccctgccgcgcggggctttccctgggtcttggccctacgaacttcatggaccttggaacagccggggtctctgggtcacttttcgttttctgtccgtgcgtgtgcgcgcgtgggggtggggtgcatgcccctccgctgtctttcgcgatggatgccgccctccgcacgtgctttcccccgggccgcggtggggccgtgcgcgtgtgtgcgtgatgctcggagctagggaacactgtgtcagcaggcggcctggcccgcggccacgtcctccggggggcgcgcagcgggggcggcccggccaggcttgtagctcacacgtgtgttccacagccaccgccagttcctgctcagaacctgccccgactccccggcgttccacaggctcccaccacctgtccctctgtcaccagccctaggaggctccttagggcgctctggcgggtgctcggtccctgcccacctgagagttcgactccatcagcctccctgggcacccttttatctgccgccttggtggcactgcctgtccgtttct

SEQ ID NO: 98187 - DNA, 38769 bp, Homo sapiens
ccacagctttaactgcattagagcagagaggcgctttccagatattgctgaggcactaaccctctgaagaatttccaacaaagtctttactcattagacccagagtaacataatggggttccccgctgcactgtaaaccccatcttttcaagctgttcaataataaaaggctttaggaaataacagtgaatgacgtttataggccagagccctggaccagtttccagggaaaatgtctaggagaaaacaagaagttgaattttgacttaacaacttaaaaatagaatcccaaacaggtagcagcagaaaaaagtcaaatgccagcaatcactgttaactgatgtcctgaggtgggttacccacagaccctcaatgtggactaaccgtggcccatttccgtctgggcgtaggtgccaattatctggagtcctttggatgaaagcagccatttctctttctgagcagtggtgccctgattcagcaaggtaggaataaacatggagtaattgaggcccacaggttccacaaaattgaccaaatgtagtctacaggagagaagagaaaaggatctcagccttcctttagaaactgcatcctacaaccccttcttgccaaacagctttggccttcaaggagaaggtcaggaaaatgtaaacccccttcttatgaaattaaatataagatttaccattttactacctaaaaagccagcagcagaacctgatgatctctcttcttctaattatttcaaggccacagttcccacagttcatttcgtatttacatttaatccactaagcaaattctacctaagttttagcataaaaacttctctaatttttggaaggggaggttgttggtgttatttgctggtttgattggttgaattttttagaatgtgtgtggttttttttttttgctttatttaggttttacctgtttgtttcaaagagcaaaaataactccatagaacacttatttatagcgctgttaacaagagctccaaggaagaaataatttcaactatgtttccctagataatataagcaaatatccaaaagagtaaatacatattccagggcagaatcatacatcgctaaaggtcttcagggtttacaataagtaatgtgggcatgtaaaaatttatccccaatggtcaatgaacattactacggattaactctacatcacattgaaatttagtcctcaactctcttcttacaaaacagaatccacagtagttggccttggctgtgctgtgtcatagattttatagggatcaattttgtactttgacaaagctcgtatctaaaaagtttaaagtacaaaatacatctcatctaactgatcttcacgacttctcaacacatgattaggaagcaatgttactaccagtttatcctaacctgtgcaatgagcagagcatgaactaaaggacagaagggataggctgccattgcagtgctgggggaccctgaaaccaaactaccaccttaaaagaaataatagtagccgggcgcggtggctcacgcctgtaatcccagcacgttgggaggccaaggcgggtggatcacgaggtcaggagatcgagaccatcagatcgagaccatcctggctaacatggtgaaaccccgtctctacgaaaaatacaaaaaaaaaattagccgggtgtggtggtgggctcctgtagtcccagctactcaggaggctgaggcgggagaatggcgtgaacccgggaggcggagcttgtagtgagccgagatcgcaccactgcactccagcctgggcgacagagcgagactctgtctccaaaaaaaaaaaaaaaaaaaaaaagaaagaaagaaagaaataatagtaaacacaatatacccttatttttctatttcctaaataagtactacacggttatccccgccatttctttttttttcttttttggagacagtctccctctgttgcccaggctggagtacagtggtgtgatcccagctcacggcaacctctgcctcctaggttcaagtgattctcatgcctcagcctcccaagtagctgggattataggcgtgtgccaccaagcccggttaattttgtattttagtagagaaggcgttttgccatgttggccaggctggtcatgaagtggcctggcctcaagtgatctgcccacctcagccacccaaagtgctgggattacaggcgtgagccaccatgccccagtcccattgtcttttctatcttacataaatcataatccacttagaaacaaaaaactctcaacatggatgctcttagatacgaatatttctaattaatcaaaatgaattaatgtaatcattatagattccaccagagggaacgacttctgcgtcctaatcatgtgtttagaagctgctcattaacatcagttaaaaatgttttctcagccaggcgcagtggcttatgcctgtaatcccagcattttgggaggaaggggcgggtggatcacaaggccaggagttcgagaccagcctggccaacatggtgaaaccccatttctactaaaaatacaaaagttagctgggtgaggtggcagatgcctcttcacctgctgataatggaaataaatggaaatgcagagagagagagagagagagaaagaaagagagagaaagaaaaagaaagaggaagagaaagagaaagaaaaagaaaggaaaagaaagaaaagaaaagaaagaaagaaagaaaagaaaagaaagaaaggtgatgtatttcacaattaatagcatgtcacggttaactggcagcattctttctttcttagtggtacacaaaacactggtgtgagttataatcgatgagattatataaccgaggctttaactcgatagcatgcgataatttccaggactcatttacaaaccccttctcttacttaaaaactgatctccttgtcatatcctaaggacattggaagtgtgtcaaagggtgtgttaaagtttgtactttaatacttcacatgaaaaatgatacacaaaacaacttcccggtgtccatgaatctttaacccgcataaaagactttgttctatttcattgtgacctcactcgagtctggttcacattatcaacaggtcacaggttatgaaatcatctctatcagctttgaaatgcactgcaccacccattcaaacacacacacacacactcaacccacttttttcctgacgtttcaagaaggaataaaatcttactaattttttcaaatttacaaacacaacacaggtatcagtaacataatcttctaggaggagttactctatctcaatatccccacagccatgagttacaaacttcaaaaacaaaacagaccatttggaagtatgctgatttgaactaccaaaaataaataaacaaaattttttcgtttaaaactgagtggagctctgaggaaagtccaaagtgccagagtaaaccatttcatcttcacaaaaataacccaagtcaagctgaaaatcgataccaaaggcactagaggcagtgaccattattaccataaaggcagaacgtgcaacatgttctatttagcttggttctagtctatacaccactcatacgatttagtctttaccgatgaaaatactggagttcctttaaaatggagaaacctaaaagagaaaatgcccaggaataaatgagaaaaaaatgctataggccaaaataatcttgtactaggatcatgtaatagtgtttgtttaggttaaggcaaaaaagtcttttttttttttttttttttttttgagacagagtctctctttgttgcccagtctggagtgcagtggcgtgatctcggctcagtgcagcctttgcctcccaggttcaagggattctcctgcctcagcctcctgaatagctgggaccccagaagcgcaccaccaggcccggctaatttttgtatttttagtagagagagtttcaccattttggccaggctggtctcgagctcctggcctcaagtgatccacctgccttggcttcccaaagtgctgagattacaggcatgagccactgtgcccggcccgaagtccttatttttatttatttttaccgttccttgtggagcagggtggatcacgaggtgaggagtttgagaccagcctggcaacatggcgaaaccccatctctactaaaaatacaaaaattagccgggtgtggtggcgggcgcctgtaatcccagctactcaggaggctgaagtaggagaatcgcttgaatccgggaggtggaggctggagtgagccgagatcgtgccactgcactgcagcctgggcgacagagcgagactccgtctcaaaaaacaaaaacaaaaacaaaaaacacaacaaaacacatggtctgaaaaaaggatatactctcttccacactagaaccaaggcaggtttttatgacgtctctctcatatgcacaagacaaccattcaagcactgtcatggattcagaactactgggttcttagactttctattcattcagaggcgtcacagatcattcttcatccaggtccacactaccatataatataatctgctattgctccaaaatatttaaatggtcgtgcaactaaaaaaaaaaatgctcccagattcagaattttagcagtcctccttacaaagagcaaaatgattctgcatttaaatcagtcaaatttgagttgcttgggcagaacaatgcttttacaacatccttgaaactgtactcttgagaacaaaaactcctgcatttccatttattatcagcattctacaaacacgtcatcccacgaaaaggcttggatacaaaagtgatcacattatttttcacacatataactttatttatttatttatttatttattttttgagatggagtctcgcactcttgcccaggctggagtgcagtggcgcgatctcggctcactgcaagctccgcctccctagttcacgctattctcctgcctcagcctcccgagtagctggaactacaggcgcccgccaccacgcccggctaatttttgtattttcagtagagatggggtttcaccgtgttagccagaatggtctcgatctcctgacttggtgatccgcccgcctcggcctcccaaagtgctgggattacaggcgtgagccaccgcgcccggccacacatataactttataaagttgcatgaaaatatgccagtttgcatcttcaaacaccaagcacggtgatgaaaggccaccatagaccgcagctgtaaagtttaggcttaacaacacttgctctgttctaaggcatacctactttttaaaccacataatttcatcagggtcagcgatgccaaactccctcatcttcttcaccatgatggcacttttcctgacagccacctcataacgctggctgcgagtgaggaagttcaagtcctcatgctggaagtctgggtcgttcaggatcatgttctctgaaagggggttaaagggcattaaaaggcagacagacactcgggcctccgttccaccctccctgaatcacaataggcttcagagtcgcggacacacctggggaatggcgatatccccccaccagggacacaggctgttcctcgaagtgggggtcccggctcccctaacgctgggccagagggcctaggccccacagcgcccctgactccgcatcgagggagtctccagcttttctcgggaaaggagggaggtctcgcccgccgccctcaccgatctctcggcggcgccgggttttctcggggctgccgtccaggatgtgtgtaagcagctccgggttgaagctggcggaatcccgctccctgcgcaggtccgggttcatggcgacgaccagctggcagcgaagtaagcaccgaccgaggtggcagtgacaatctaaatccgcagctccagcgccggccggaccctaggaggcagcctcaggacggcgcaagtccccgcctccgctcgcccggcccgccccggcccgccccttctttctccgtggccctttggcgcgtgagtgacagcggcccagacagagggggcgatgtccgcgtcgtggctggggccggtcgcggggcagactaatcccctgctcctggccaggggaggctcccgagcggatcctcgggaaaggggctccgaaggtcaagaaaytgccctgctgggcgtccggggagtgggaaaataaagcactttttgtatcccgcccctcccccgtcacgtgaccacgcgaggcggaaagaagaaatccgaggaccggcgacgcctagaacaggttggctggggccttgggaagggggcgggacaacgaggctgaggagggattgcgcctgcacttgcccccctcttaccccgcggcctctgtcacgcttccgggtccgtgcccctaggcctctccgaaatgagagtggtcgggagactctggagtctggggcgggagatggggctttgcggaattgctagggagggtcacttgggcttttgccaaatccacccggattggagaagaatgggacgggaaccagtctctttggggagaggctccagttaccttttgttaagataatggcgtctttactggcagaggcgtgggttccggggccctgggtgtgggattgtgagcgctgttcaaggggtggacggggacttagaatgagaccaagcgggcggtgctgctctaagccttctgtctgggaaaccagacattttcccccgcaacctggcagttactagaggtcttggaatccagacttctttgctttcgccatcaccgtcatcaaagtgggaaatgcacacttactgttaaaacctagtgtagggccgggcgcggtggctcacgcctggaatcccagcactttgggaggacgaggcgggcgtatcacttgagcccaggagttcaagaccagcctgggcaacatggcaaaaccccatccctacaaaaaataccaaaaaattagctgggtgtagtggcatgcgcctgtagtcccagctactctgaaggctgagatgggatggtggcttgagccccggaggtggaggttgcggtgagccaagattgtgacattgcactccatcctgggcaacatagtgagaccctgtctctacagaaaaaaaacaaaaaacaaaaacagttctgcccagtgggattgtagacaagggagattcagggatttgttgaatcatctctagtcattttttttttttttcttgagacggagtctcgctctgtcgcccaggctgcagtgtggtggtatgatctcagctcattgcaacctccaccccctgggttcaagcgattctcctatctcagcctcccgagtagctgggattataggggctcgccaccacacccagctaattgtatttttagtagagacaggattttgccatgttggccaggctggtctcgaattcctgacctgttgatccacctgcctcggcctcccaaagcgccgggattacaggcgtgagccgctgcgcctagcctgtctgtagtctgtgtaatactatgactttggttttctcagaagtaaaactacgagagatgcataacattcataatttgaataatagaactataatacacactcttaacccctaggacctcaggatcctcatttgtcttattaagctgctgatctcaggccccttcaacagcagagagggtgtctagtttattctctgtacctggcacagtgcctgccccgctaaaggtgctcaggaaatctttgtggagtgaacaaatggctgcttgacagctgaccttctagttctaatattctaggaaaccaattgctcttaatgtaacaatgataaggggtgtacttagcattgaatagaaaagacttagatgaagagctaaatttgctgagtttttattttgaaataatttcaaatttacacgagaattacaagaatagaacaaagaacttttcttctgtgactttaacgctttttttttttcttttgagatgatgtcttcctctgtcacccaggctggagtgcagttgcatgatttcagctcactgcaacctccgcctcctgggttcaaatgattctcatgcctcagcctccagagtagctgggactacaggaatgtactaccacacttggctaatttttgtgtctttattagaggcagggtttcactatgttgaccaggctggtctccaactcctggcctcatgtgatccgctcgcctcagccttccaaagtgctgagattacaggcgtgagccactgcgcctggctggctgacattaacacttttgaagtgtataagcccattgttttgtagtgttgggtctcagaaaacaataccccaaaatgaaggcctcagaagcaacccacaaagcaagttgtttttttttttttttttaccttctgtcctcctctccctcaggtgcattctcccccgagcctagccagagaagttagaatcctcttccccaaggcaggtcatagaaaacagagtcatttacccccaaagccagccataaaaccctaaatataagctgggtgyggtggctcacgcctataatcctggcactttgggaggccaaggcaggtggatmgcgaggtcaggagatcgagaccatcctggctaacacggtgaaaccccgtctctactaaaaatacaaaaaaagccgagcgaggtgccatgtgcctgtagtcccrgctactcgggagtctgaggcaggagaatcgcttgaaccggggaggcagaggttgcagtgagccgagattgcaccactgcattccagcctgggcgacagagtgagactctgtctcaaaaaacaaacaaaaaaaaccctaaatatattactcttaactttccctccttcttttggtgtaaaaactggccaaaaagaaattatctgacctagcttgtttgactgtaggccataagactccattccagagagggtcctcccccacacccagaaggaaggaatgcctgttccaagaggccaagaagaatctagacagacaggccttgctgggcctccccactcagtctatcagcattagatcataccttttatgttcaatcatttgcataaaaatgtacaatttcccctgtatctttgggtcttccttctgaaggctcccatatgtacatgttacataaatttgtacacatttttgactattactctgccttttgtaagttgattttttgcagcgaaacttcagagggccccttggcacctacagtagaatgtcccttaattcagatttgtctgatatttcttcatgattagattcagatgatgcatttttggcaggaataccacacaagtgattaataggagaaaaggcatacacatgtatttgatcatagttttgctttgttttgttttgtttgagacaaggccttgctctgtcacccagactagaatgcagtggcgcaaccatagttcactgcagcctcaaactcttaggctcaagcattgatcatagttttatttatttatttatttattattttttcaggcagagtctcactctgtcgcccaggctggagtgcagtggcatgatctcggctcactgcagcctccgcctcccgggttcaagcaattctgctgccttagccttccctgtagctgggattacaggcacccgccatcatgcctggctaatttttgtatttttagtagagacggggtgtcaccacattggccaggctagtctcgaactcctgacctcaagtgatctgcccgccttggctcaaaaaaaaaaaaaagaaagaaaaaggaagaggcccggtgaggtgtctcacgcctgtagtcccaacactctgggaggccgaggtgggtggatcacctgaggtcagaagttcatgaccagcctggccaacatggtgaaaccccgtctctactaaaaatacaaaaattagccgggcatggtggcacacgcctgtattcccagctactcaggaggctgaggcaggaaaatcgcttgaacccgggaggcagtggttacagtgagccgagatcccgccactgcactccagcctggcagacagagcgagactccatctcaaaaaagaaagaaagaaagaaagaaaaatgtataatcattataccagcaaattcctccctcggtgagaattgcatagcaaccccagcatcctccccacctctttttccccagatccaccagaaaaacaggaacatctagtggggacactcctttagtcccctcatgttagtgagcacacactcgtgtacactagcccttcataattgttatctccccctgttttagacaaccagtgttttcatagcctatgccacctctataaccacctgatgggttcccacagcacaaacgaaatcatttcatggagagcatggcattacagtcaagaaagactaattgacacaaggctggccacaccacgtgggagttggtattattagtcaatcttctggaaggctcagagattagacattatttaaatgtagtttcggggaaggggtggtggcagctaggcaatgggtgcttgctgctgattggttgggggtgcaaccttaggggtgtggcaaatggtcctcctgcaggctgagtcacctctgaggggggccgcaggagtggtgggtggggtccatgtggagttgttggtgtcagacatgcaaaaaacctgaaaagatatctccaaaggccaatcttaggttctgcaatagtgatgttatctgcaggagtaactggggaagttgcctagcttgtgacccctggaataatggctggcaatcttagcagagttcgggcttctctgtgctcctagcctggtggtttctcattagctttacaaaggtggctgcgttttagggaagggctattttcatttaaactgtaaactaaatgtctcccaaagttagcttggcccaaatccaggaataattaagggcagcttagaggccaaaggcaagagggggactggctagatcagctctcccccgctgtcctaattctctcactgatacaatttttgcaaaggacatcttacttctctatcaaactatgactctgaggaggagatctttttgctcattgttggccattatgggctgtacaatgtgttccttgttctgaagaaataatggtcggctttccaaatctgtgcactgtctcttgttctactttttcattttttwaaatttaattttgtttttgtgagacagcatctcactctgtcacccaggctggagtgcaatggtgcaatcatagctcactgcagcctcgacctcgcagactcaagcgatcctcccatctcatcctcccaagtagctgggattacaggcatgcacgaccacacccggataatttttatatttttagtagagacgaggttgccctcaaactcctgagctcaagtgatctgcccgcctcagcctcctcaagtgctgggattataggcatgagccactgcacccaaccttgttctgattgttttgaagcatttgtagcttctagcaggtaagcaaagcccagtccagagtcacagtctgttcctgtcaaggaacagagttcagtggtactgccccagagctaccagcatgagtctcacttgccagctatgatcaggaccttccaccacgttatctgcaccatagccacaggcagtctctgtctcttttgctgacaaacagaacagttcttcctggcactatgtgcctgagagggtgcaagaggaacgtgttgatgaagagagtcaaattgggcaaggcgcggtggctcatgcctgtaatcccagcactttgggaggccaaggtgggtagatcatctgaggtcaagagttcgagaccaggctgacaaacatggtgaaaccccatctctactaaaaagcactgggattacaggtgtgagccaccattctgggccacacatagctttttaaatattgttttggtttattattattttgagacagggtcttactctattgccgaggctacagtatagtggtgtgatcatagctcactgcagcttcaacctcctgtggtggtgatcctcctgcctcagcctcctaagttgctgggactacaggtgagagacaccacacctggcccatttttgtattttttytgtggagatgggctgttgccatgttgcccagactggtcccgaattcctagtctcaagggatccacctggcttggcctccgaaagagctgggattacaggcatgagccactgtgcctggcctaatgttttaattttttcatagagatgaagtctcactatgttgtcaaggctggtctgtgtttgttttttgtttgtttgtcttgctttgttttttgagacggagtctcgctcttattgccctggctggagtgcaatggcacgatcttggctcactgaaacttccacctcctgggttcaagctattctcctgcctcagcctcccaagtagctgggattacaggcatgcgccaccatgcccggctaattttgtatttttagtagagacagcgtttctccatgttggtcaggctggtcttgaactcctgacctcaggtgatccgcccgcctcagcctcccaaagtgctgggattataggcatgagccactgcacccggccatgtttttttttcttttttttttaatacatgaatgtatattatatcaaaaaaattttttcttttttatatatattttttattatactttaagttctagggtccatgtgcacaacatgcaggtttgttacatatgtatacatgtgccatgttggtgtgctgcacccattaactcgtcatttacattaggtatatctcctaatgctatccctccccccaaaaaattttttttttaattttaaaacactgcctactggaattagtcttcaagatgctgttggtctcatatatctgctaatctctgttttgtagtctatccggtttatcaggaatcttcaaaatccctctcaactatttggttacaggagcccatgatgctgcccaaacctgggacctattacctcccctgggaggttagtgcaggccaagttcctgatgggagcacgctgagaacatttggcaggtgagaacggttatttttttcactggtgggggtgatgatatgttaaatgtctttctctacctccaaaaagacataattagaaaagatttttataacttcatctaattatgttaaaatactaaaaaaaaaattagttgccgggcgcggtggctcatgcctgtaatcgcagcactttgggaggccgaggtgggtggatcacctgaggttgggagtttgagaccagcctgaccaacatggagaaaccctgtctctactaaaaatacaaaattagctgggcgtggtggcgcatgcctataatcccagctaatcgagaggctgaggcaggagaattgcttgaacgtggaaggtggaggttgtagcgagccgaaatcgcgccattgcactccagcctgggcgacaagagcaaaactctgtctcaaaaaataataataataaatatatatacatatatatattgaaaaaattaatattcattgtaaaaagtgtagatagtccataaaggtgtagagaggaaggaaaagtcacccataatcccattacccagacaaccactgctaacctttggtgattatcctcgtgcttttccatatgtatgtgtttgtatatgtgggtgggtatggagacacccaatatacgtatatacatatatactctgtcagttatwtatcagttayatattgctatgtaacatattacccatacacacaattttagtttttcgtagagacagggtatccctatattctcaaggctggtgtctaactcctgggctcaagcgatcctcctgactcagcctcccaaagtgctgggattacaggcgtaagccactgtgcccagcctcccccaaatttaaaataattattgtctcatagttactgtgggtcaggaatttgggagtggtttaactgtttggatctggctcagggtcgctcatgggagtggcatccagatgttggccagggctgcagttatctggaggcttgactggggccaggacctctacttccaagatggcttgttcacgtttggcaaattagtgctggctcttggcaagataactcagttccagacaatgtggatttctctgtagttctgtgtgagggtcctcataacacagcagtttctgccagaagcagtgaccaagagaaagagcagggtgaaaaccacagtgtctttcatgacttagcttccagagtcagtctcagtcatttctgcagtatcctactgattacacaggtcagccttactcagcatcgtaggggatgcacaaggatgtaaatatcgggggtgagaatcacaggggaccatcttagagacaygtgtacatacatatagaagtattttaacctaggccaggtgcggtggctcacgcctgtaaccccagcactttgggaggccgaggcaggyggatcacctgaggtcaggagtttgagactagccggaccaaaatggcgaaaccctgtctctactaaaaatacaaaaattagccgggcttggtggtgggtgcctataatcccagctactcaggaggctgaggcaggagaatcgcttaaacctaggaggtggaggttgcagtgagctgagattgcgccactgcactccagcctgggggacagggtgagactccatctcaaaaaaaaaaaaaaaaaaaaaaagactagtattttaacctagcctgggtgcggtggttcacgcctgtaatgccaacactttgggaagcctaagtgggcagatcacctgaggtcagaagttcaaaaccagcctggccaacatggtgaaaccccgtctctataaaaaatacaaaaattagccaggtgtggtggcaggcgcctgtaatcccagctattcgggaggctgaggcaggagaattgcttgaacccgggaggcagaggtggcagtgagctgagatcatgccattacactccagcctgggtgacaagagtgaaattcggcctcaaaaaaaaaaaaaaaagaagtattttaacctagttaagggctgggtgtggaggcttacacctgtgatcctagcactttgggaggctgaggtgggaggattgcttgagtccaggagtttgagacaagcctgggcaacatggtgaaaccctgtctctacaaaatatacaaaaaattagccaggcatggcagtgtgcgcctgtagccccagctactggggaggctgaagtgggaggatcacctgaacctgggaggtttaggctgcagtgagccgagactgcaccactgtactctatcctgggtgacagagtgagatcctgcctcaaaaaaaaaaaaaaaaaaaaaaaaaagaaaagaagaagaaagcaatattttaacctagatgagatcctattatattactgtattgtagcatttatttacttagctgtgtatggtagacctagtgccatctcagacatgtagatctatatcatcattttgaatggttccattttgtttcactgtggtgatattgcatcatttacttagccaagtcttttgtttttttttgagacggagtctaactctgtcaccaggctggagtgcagtggtgcaatctcggctcactgcaacctctgcctgccaggttcaagcgattctcctgcctcagcctcccgagtagctggtattacaggcaactgccatcacacccggctaattttttttattttttagtagaaacggtgtttcaccatcttggccaggctggtctcgaactcctgaccttgtaatccacccgcctcggccccccaaagtgctgggattacaggcgtgagccaccacgcccggcctacttagccaattctttattgattttcttttctttttttctttttttgagacagagccttgctctgttgcccaggctggagtgcagtggcgcgatctcagctcactgcaagttctgcctcccaggttcacgccattctcctgcctcagcctcccaagtagctgggactacaggcacctgccaccacgcccggctaattttttttkttgttttttttttgtttttgtagagatggggtttcaccgtgttagccaggatggtctcgatctcctgacctcgtgatctgcctgcctaggcctcccaaagtgctgggattacagatgtgagccaccgcacctggccttttttgtttttttaaattgagatggagtcttgctctgtcgccaggctggagtgcagtggcgtgagcttggctcactgcaacctccaactccctggttcaagcgattctcctgtctcagcctcccaagtaggtgggattacaggcgtgccccaccacacccagctaatttttgtatttttttaagtagagatgggatttcaccatgttggccaggatggtctccatctcttgaccttgtgatctgtctgcctcagcctaccaaagtgctgggattacaggcgtgagccatcgtgcctggctttattgattttcaataaagacatcaagataattcagtagggaaagcatagtcctttcaacaagtggaactactggatattgacactgtgtcgcccaggctgaagtgcaagtgacatgatcatggctcacaacagccttgacccctcagcctcccaagtagctgagaccacaggcgtgcaccactgtacctggctaattaaaaaaaaaaaaaaattatagagacggcatctcgctgtattgcccaggctggtctctaacacctgggctcaagcaatcctcttgcctcagcctcccaaagtgctgggattacagatgtgagccaccatgcccaacctagatttttttttttttgagacggagtcttgctctgttgcccagactggagtgcagtggtacgatctcggctcactgcagcctctgcctcttgggctccagtgatcctcccgtcttggcctcccaagtatctgggaccacagctgcrtgccaccatgmctggctaattttttttatatttttagtagagacagggtttcaacatgttgcccaggttggtctcaaactcttggactcaagtgatccatctgccttggcctcccaaagtgctgggattaccagcatgagccaccacgcccagctagatattcttatggtaggggaaaacatcttgatctttacttcacaacatacaaaaaaaaatttacactgtgtcatagattacaagctaagactgaaatgtctcaagtaaacagcagaatatctttacaactttgagtaggcaaagatttcttttttttttttctatttatagcatttgtagcccatattgaaaaaaaaaagatggccaggcacagtggctcatgagtgtaatcccagcactttgggaggctgaggcaggtggatcacgtgagcccaggagttcgagaccagtgtggacaacatagcaaaaccctgtctgtacaaaaaattaaaatattagccacgtgtgatggcaagtacctatagtcccagctactcaggaggctgagatgggaggattgcttgagcagcctggaaggtcaaggctgcagcctgggatacagaaaaaaaaaaaaaagaaaggaagaaaaagatttcttagacaagacatagaaagcaaaagtcataaaagaaaaaaatgatcaggtgtggtggctcatgcctgtaatcccagtactttgggaggctgaggtgggtggatcccttgaggtcaggagttggagaccagcctggacaatatggtaaaaccccttctctactaaaaatacaaaaattagccaggcctggtggcaggcacctgtaatcccagctactcgggaggctgaggcacaagaattgcttgaacccaggaggcggaggttgcagtgagccgagattgctccattgcactccagcctgggcaacaaagcgagactccatctcaaaaaaaaaaaaaaaaaaagaaaaaagaaaaagaaaaaaatgaataaactgatcatcaacaaaattaaaagcttctgcttatcaaaatatgccattaagaaaattgaaggcaaggagatgaaaattaaaaggaattccttcayattctacagtgtagactgaaacatttttttctggtttgttgctgcaatttgcatttctgtgatgagactgaggctgaacacttttctatagatttcttggccatgcaaaccttttgagcgtggtggtgattctacgtatggatggaaattattgcatttcttctgccttccaggttgtgcctctatgacatgattcagtccagagtaacactgatggctcagcacggatccgatcagcaccaggttcttgtctgtaccaagttggtggagcccttccaygcccaggtgggctccctgtacatcgtcctcggggagctccagcatcagcagggtgagctgcagcctcagatcccctttctcatcctggggcctgagctggggcagtcttcggggcagtcagtgagaaatgggctcgtgacccaacagcaatgtctcatcagggttaatgtttcttccaaattagcccacaagttcaacactcttgaggattcaactcagagtggactggcctcatggtgccaactcaaagacagggtggctggtcaggagttcgagaccagcctagccaacatggcgaaaccccatccctactaaaagtacaaaacttagctgggcgtggtggcatgtgcctgtagtcccagctactcaggagactgaggcaggagaatcacttgcaccagggaggtacaggttgcagtgagccaagatcgttccactgcactccagcctrgatgacagagtgagactccgtctcaaaaaaaaaaaaaaaaaaaaaagacaggtacagtgaagagacaatcccccatggggaagtgagaacgaggagagagaaaccactaatttctcaaggcctacaacacaccaggcctgatgtgaggcagcttgcttagatctttttgaatttgcctgtcagcctttaatctgagtcttaaaaattttttttttttagtttttttgagacaagatctctctctgttacccaggctggagtgcagtggtatgatcacagctcactgcaacctccatctcctgggctcatgaggctcccacctcagcctcctgagtagctgggaccacaggcgtgcaccaccacacctggctaattttaaaattttctgtggagacaaggtgtcattattttgggatgagggatctgcgtgccttggcctcccaaaatgctgggattacaggtgtgcagcaccaaactcagccttacttctgattcctttttattttttgagacrgagtcttgctctgtcgcccaggctggagtgcagtggcgcgatctcggctcactgcaagctccgcctcccgggttcacgccattctcctgcctcagcctcccaagtagctgggactatgggcgcccgccaccacgcctggctaattttttgtatttttagtagagacggggtttcaccgtattagccaggatggtcttgatctcctgaccttgtgatccacccgcctcggcctcccaaagtgctgggattacaggcgtgagccaccgtttttttttttttttttagacagtgccttgctctgtcaccaggctggagtgcagtggcgcgatctcagcccactgcaacctccagctccctggatcaagcgattctcctgtctcagcctcccgagtagccctgcctgcttctgattcttactgctggtttttttttttttttgtctcgagacagagtcttggtctgctgtccaggctgagtgcagtggcgcgatcttggcaccaggctctatcctgccatttctgtatggattgcctgtagtggaaaccaaatggttgatgaaggaaagttatttctttttttttttttttttgagacggagtgtcgctctcgccaggctggagtgtagtggcatgatctcagctcactgcaacctccgcctcccgggttcaagcgattctcctgcctcagccttccgagtagctgggactacaggcatgcgccaccacgcctggctaatttttgtatttttagtagagatgggggtttcaccatgttggccaggatggtctcgatctcttgaccttgtgatctgcccgcctcggcctcccaaagtgttgggattacaagcgtgagctaccgcgcctggcctggaaagttctttagagaagagtcacagcgaatgaacgcaggagaaatccgtaaattcaaagtcatcactttaaaagccctgacaaaataaaaaatccaggcaacagtcctcgctagtggccaaaatcattaggaaacatcttgatgagatcattgtgatggagggacccgccagcagtgcctaggctggcctgatcaatgtcgacgtgataaaaatcagaagggcaaacatcaggtacctccgatgtgagtcatgaggaagacacacatagcaacacctctgttgggttcttgccaaaaaaattgaacctgggctgggcgccgtggctcacgcctgtaatcccagcactttgggaggccgaggcgggcggatctcgaggtcaggagattgagaccatcctggctaacatggcgaaaccccgtctctactaaaaatacaaaaagttagccgggcgtggtggcacacgcctgtagtcccagctactcaggaggctgaggcaggagaatcgcttgaacccgggaggcggaggaggttgcagtgagcggagatcgtgccactgcactccagcctggcagagcgagactccatctcaaaaaaacaacaacagaagaaaaaacaaaaaaaattgaacctgaagctaatcaggcctcagaggaagtagcctgttaccgggcactggctagtttagtactcttataatttgcatcacaacctgttttttgtggggttttttcttaaaacatttttgtcgctgggcgcggtggctcacacctgtaatcctagcactttgggaggctaaggcaggaggatcaccggaggtcggraattcaagaccagcctgaccaacatggagaaaccctgcctctactaaaaatacaaaattagctgggcgtggtggtgcatgcctgtaatcccagctactcgggaggctgaggcaggagaatcgcttgaacccgggaggcggaggttgctgtgagccgagatcgcaccattgcactccagcctgggcaacaagagcaaaactccgtctcaaaaaaaaaaaagaaaaagaaaaagtttgtcttgattttctcttattttttgtgagacggagtctcactctctcactctgtcacccagcctggagtgcagtggcgtgatctcagctcactgcaacctccgcctcccaggttcaagcgattctcctgccttggcctcctgagtagctgggattacaggcgcctgccactgtgcctggctaagttttgtatttttagtagagacagggtttcaccatcttggccaggctggtcttgagctcctgacctcatgatccacctgcctcagcttcccaaagtgctgggattacaagcgtgagccaccgcgcccggcctgtcttgattatctaagtcatacacgctcgtcattcacggagggaactcgaatcaaagatgaggaggtgggaggagagcatcctggctgactgtgctctgtccaccctgacctctggcctgggcagagggggcaccctgtggctgctttaaacctccctgtgaaaaccaagtgtggtggctcatgcctgtaatctcagcaatttgggatgccaaggaaggaggactgcttgagatcaggagtttaagaccaacctgggcaacatagtgagaccccatctttacaaaaattaaaaagttatccaggtgtggtggcacaggcttgtagtcccagttacttgagacgctgaggtggcaggattgcttgagtccaggagttcaaggttacagtgagccaagattgctctactgcactccagcctggatgacagagtgagaccctgtttcaaaaaaaaaaaaaaggaaaaaaaagtccaggtgtggttgctcacacctgtaatcccagcactttgagaggctagggagggaggatcgcttgagcccaggagttcaagaccagcctgggaaatgtagcaagagcctgtctctacaaaataataaataagtagaaataaaaccataaaccttcctgtgccaggcccaaagctctatggggacacaaaggttgatcagatgtgaatcctgccctgtggccagactgacagtactgaggacaggtgagaggtcacccttctcaaatgtttgcctaagagctagctaagaagaccaacaggtgaagacatgctggtgtgtgataaaacccatggacctgacacccgctggcgccatccaaaggcccgagggccccctgttctggaactaaggtgtggggcacagcctttcccaggcctactccagaggccctcggagcatgcccaggctgaagggcactggaccacagcaaacagcaagcagctgcccacaagcccttgccatgcatcctctgccttctgcttttctctcactgcacccctgcactttgccctcagaaaccttccttgtgtggctgggctcaggagctcactaatctagcatgttcggaggctgaggtgggaggatcacttgaacccaggagtttgagaccaacctgggcaacgcagagagacgccatctctacaaaaatgaaaatattagtggggtgtggtggcttgtgcttgtagtcccagctacttgggaggctgaggcaggaggatggcttgaggcaggagttcgatgytgcagtgagctatgatcatgccactgcactccaacctgggtgacaaaatgagaccctgtttctaaagaaaaagaaaagaggctgggcacagtggctcatgcctgtaatctcagaacttttgggaggctgaggctggtggattacttgagtccaggagttcaagaccagcctggacggccgggtgtggtggctcacgcctgtaatcccagcactttgggaggccgaggtgggtggatcacttgaggtcaggagttcgagaccggcctgaccaacatggtgaaaccctgtctctacaaaaaatacgaaattagctgagcgtggtggcacatgcctgtaatcccagctattcaggaggccaaggcaggagaatcgcttgaaactgggaggcggaggttgcagtgagctgagatcacaccattgcactccagcctgggtgacaagagcaaaactccatctcaaaaaaaaataataataataaccagcctgggtaacatggtgaaaccccgtctctacaaaaaatgcaaaaattagcagggtgcgttgttgcacacatgcctgtagtctcagctactggggaggctgaggtgggaggatcacttgagccagggaggcagagattgcagtgagctgagactgtaccactgtactgcagcctgggtgacagagtgagaccctgtcaaaaaaaaaaaaaaaagagagagagagagaaagaaagaaaaagaaagaaaagaaaagaaagagaaaagagaagagaaagggagggagggaaaccttcctgtgtgtcccctgtgcacctccctcttcgagcatccttacagctctgggacttgcccaaacctttctccccaaaccacacacccacagagtctggagcagggccggagtttccccggctcctcgggtgtgtcagcatcacacatccctccctgtctccctgctgccaaccagttccaccactgtgcacctctgccccaattccacctcccacgcctgctgctgcaccttggacttgttttcctgaaattgcatgccatccactctcccttctacttctgctgcgtccctcttgccctatcaggacctgtggactcaggactcccgggctttctcccccatctctcttccccgttgggcctcactaccatttcagccactttcctggcagcttcactcctgccccaagaccccagcctccaccctcctggttctgccaactgttgagtgcagaaagatcacagaactccaaggatttggagctcaatgatttcaggggctcactggcattcccctgctctgcctagaaatccttcctgtgtcctggccacacccccctccccggcgccaccacagctagtccagaaattcccctgcctcacaagaacccacttcctctcctcccctgtccctcccggcttattgctttatgagccagctagaattgaggccayaggcagccgttcttcctcctaccatcagacactgaaacggccaccgaccatcagacactgaaacggccaccgttagctccttcctytagtctaagaggaagcggggtccctcctacctaaggggttaccacagttcttccctgtccacatataaggtgttcaagcctcctctatatggaaataatagtctcaatgacaagaagtcatcttctacactagagtctgacctacctgcccatgaccttccctccctttgcagacaaacctcctaaaagaacatctgtgctccgtataaccccttcctcttcccaggcctcaccccactgcattctgactgctttttataacccaggcccttcttctttgctccaggttcttaatctttttttttttttcctgagatggagtctcgctctgtcacccaggctgggagtgcagtggcacgatctctgcttactgcaacctctgcttcctgggttcaagcgattctgcctcagcctccctagtagctgggattacaggtgcccgccaccacacccagctaatttttgtctttttagtagagacagggtttcaccatgttggccaggctggtcttcagctcctgacctcaggtgatccgcctgcgtcagcctcccagagtgctgggattacagatgtgagccactgcgcctggcctttttcctttttttttccytttttttttttttttgagacagagtctcattctgtttcccaggctggagtgcagtggcgcaatcttggctcactgcgacatccacctccccggttcaagtgattctcgtgcctcagcctcccaagtagtcgggcctgggtaacttttgtatttttagtagagacagggttttcgcttgttggccaggctggtcttgagctcctggcctcaagtgatctgcttgtcttgccctcccaaagtgttgggattacagtgttgggagccaccgcgccacgccccgattcctctctgacctgtgtcagcactggggctaacagaagctgagacacacaggcaacctcatgtttcaaatgagttcattgcctaagggtagcctgtatagacagctaggcaggatgacaycctgaattctgccctcaggctgtgctataaatgacctagactagaggaaagggcaggcagagcctttatctcaaacagcgtcaaaagaaaacaatgtaatagcctagaacattgaatctatttatttacttattttgagacagagtctcactctgttgcccaggctggagtgcagtggcttgatctcggctcactgcaacgtctgcctcccaggttcaagcgattctcctgcctcagcctcccgagtagctgggtttacaggtgccagctaccacacctggctaatttttgtatttttagtagagacggggttttgccgtgttggccaagctggtcatgaactcctgacctcaggtgatccacccatctcggaaatctatttattaaagtgctcagagagcagaaagagcatgagtgcaaaaaatttttttaacttttttttttctcttgcaagctatgactggggaaaaaagaaagaaaaaaaaaatgtcagcaatgcacagtggctcacgcctataatccatgcatgttgggaggccgaggcgggcagatcacttgaccccaggagtttgaaaccagcctgggcaacatggcgagaccccatctctacaagaaatacaaaaattagctgggtgtggtggtgcgtccctgtagtcccagctcctcaggaagctgagatgatcacctgagcctgggaggtggaggctacattgagccatgattgagccactgcattccagcccaagtgacagagcaacaccctgtctcaaaaaaaaaatttttttttttaggtggagtcttgctctgttgcccaggctggagtgcagtggcgtgatcttggctcactgcaacctccacctcctgggttcaagcaattctcctgcctcagccttccaagtagctgggattacaggcatgcaccactacacgcggctaatttttgtatttttagtagagatggggtttcatcatgttggccaggctggtcttgaactcctgacctcaagtgttccacatgccttggcctcccaaagtgctgagattacaggtgtgagccagttcacctgtcaaaagaaagaaaatttttaaaaagtctctcggagatgtctttcctgtttggtgccacctgaatagtggcaaacctttccattatgtatcaggtcaccaccgcatctgctagaagcccccctcgtccagggtgggatgacctgctcctataaagccaaacttaccgggagctcagtctcttggatttttaaaatatgggtgtctcttttccccggttcctgatgacattgtgtcccaaggtgccaagggggcctttccctcagtccagaggggttttctgaccacctgctaagttccagacacgggccgactgtgcatgacaggcccacggttctaggcccaaatactcagttgcctttgccccatatgctgttattgtccacatcacttgctgccaaaacccaggactgagctgtggagggaacagctggaatgcaccttggaggacgttgttgacacgccgctcagtcgccgttcgtgccctggtgtttgtcttgcagacagaggctccgtggtgaaggcgcgcgtgctgacctgtgtggaggggatgaacctgcccttgttggaacaagccatccgggagcagagactgtacaagcaggagcggggcggcagcyagtaggaaacagcagcctagcaacaccctcacctgcttcagagcccgaaccctctggagctgcaggagcccgggagagcacagacgcctccccagcrayggccttgtctggagctcgaaagccgaggggcgggtgatgaatccagccccttcccctactttgggattggctcagcaatgagaacccagaaagcatgccataaatccracagccccaccccrggagactgcaggtggccgagcttgggcgccggggccgtgcttggtgtggggccatggagggttccagaaggtcctggtgaataaaggcccagggggcgtgctcttgaagtgtgctcgtggtgcagcgccggcgggggccaggagggggagctgcaacccaggctgtgggctgcagcctctcagggcttctggtgaattctgggcctggggcctcagggtagggcaccaggggcccaggggctggggtggggggcccaggatgcaggggtctgcccctggccaggctctgccttcagaggaggctgagcgtcgtcacacgggccgggcygaggccctgggccctgaccgtgcagcctaagacaggactgtggctttaagaccctcctgacccctgacctctgcccccagtggccctggcccctgggcagcccttcctggccgccatgtgtacccagagcctgggactggctgggctgggcagtgacccaggtgggaaagggtggtcttgccctctaaggcccggcacaagtgagaggcctgggggtccatgttgggctgggctgggcgaggggtggtctctgacttcctgggggttctggctgggatgggcagggggctgggtgggagagtgtgggccctgccctccgaggccgggcatgggcgagaagcctgggggtcctggctgaactgggctgggtgaagggggccccctgacccccttggggtccgggctgggctgggtgaggggcggtttccgacccccagccaggttcccaggcaggatgagctggggttggggtggctaggccgtgggccttgggagctgggcagtctgggctgggctgggctgggcagggcgccacatggaagctggaggagcaacrggagcgctgggcgtggggtgcaaattgcccrgtgccttctgtttcccaggcagctctgtggccatggatatgttccagaaggtagagaagatcggagagggcacctatggggtggtgtacaaggccaagaacagggagacagggcagctggtggccctgaagaagatcagactggatttgtgagtgctgggacggmccctgagttacccaccctgggccatcacaacctgggcgctccctgatccgttccctctttcctggagtccacgtttractcctctgggtgctgcccagcagcccttacctgtcctctccccagttcactgccttctgaccagcctttgccggggccctgactgtggagtttggtggatgacgtgccaaggagcacaggtctccattgccggggccctggtcattctgtggggttaaggagaagccgatccccctggctggaagtgcccttcttggcccaagtctctgcccacggctgtgcccttgtttcttgcagggagatggagggggkcccaagcactgccatcagggagatctcgctgctcaaggaactgaagcaccccaacatcgtccggtgagttggggattgaggtggggaagctgggatggygaaggtagcatcctgactgccatctccctgtcagactgctggacgtggtgcacaacgagaggaagctctatctggtgtttgagttcctcagccaggacctgaagaagtacatggactccaccccaggctcagagctccccctgcacctcatcaaggtagggaaggaagggcagggaaggagaggtgacaccccatccctgccatccctrtccacgcagcacctccgctcagctggctgcacctcgcgctcgtttctccagagctacctcttccagctgctgcagggggtgagtttctgccactcacatcgggtcatccaccgagacctgaagccccagaacctgctcatcaatgagttgggtgccatcaagctggctgacttcggcctggctcgcgccttcggggtgcccctgcgcacctacacccatgaggtattgtgagacaaagaggagagaggggcagcaggaggagtgtcacccatgcactcagccaccctgagtgatactgtttctttgccctgcaggtggtgacactgtggtatcgygcccccgagattctcttgggcagcaagttctataccacagctgtggatatctggagcattggttgcatctttgcagagatggtagagagaggggcacacatggccacagggtgccacaggcagggtcctactggggttgggtggggtccactgatgctcccattcgaggcggattaaagagtgtttggggctggacatggctcacgcccgtaatcccagcactttgggaggctgagatgggaggatggcttgagcccaggagtttgagaccagcctgggcaacgtaacaaatccccagctcttaaaaaactacaaaaattagctgggtgtggtggtgcatgcttgtagtcccagctacttgggaggttgaggcaggaggattgcttgagcctgtggttgaggctgcagtgagctgtgatcgcacgactgcactctagcctgggtgacagagcaagactccgtctctattttttaaaaaaaggtgtttggtactggctaaaggactgaggaaggtagctttattccaaaagaggccagaattctttgcacagtcatggaaaagatatcttgacaggcctctccctgggtctggccacttatctggtattggattctgtataacaaagtggcggaccccacaccttctcttcttccccatttcaggtgactcgaaaagccctgtttcctggtgactctgagattgaccagctctttcgtatctttcgtatgctggggacacccagcgaagacayatggcccggggtcacccagctgcctgactataagggcagcttccctaagtggaccaggaagggactggaagagattgtgcccaatctggagccagagggcagggacctgctcatggtaggtgcatgtgggctccagctgctgctccgactacagtttcccctcatcagccagcctcttacataaccctggcactttctgagtccaaggccagggtctctttcctgacctttgtacacaactggcttgggtatactgattgttcaaccyggaagcctcccccaggataagtgcagtatttatcttccctgtgaaagtggcgctcattgagttagctctgtctttatgctgtgctacacgccctttttccctagttgtcttgtgtgtttggttattctactttgtggacattactgctccatctaagctgtatgcctccccaggctggggccataccttcttttcttttcttttttttgagatggagttttgctcttgttgccygggctggagtgcaatggcgtgatctcagctcactgcaacttctgcctcctgggttcaagtcattctcctgcctcagcctcccgagtagctgggactacaggtgcctgccaccacgcccagctaatttttgtatttttttttttagtagagacagggtttcaccatgttggccagactggtcttgaactcctcaggtgatctgcccacctcggcttcccaaagtgctgggattacaggcatgagccactgtgcccggctggggcctctcgttctactgcctggctgttcccctgtgactcctacagtggtcagtcttcagaacaggctgttccctactgcctgggcccatgccacagttctcactcacccctcctgttggtgtcttgagctgacccaggccggactgcccaggaagtctctggcagaaccgtctgtttttttttttttttttttttttttgagacagggtctcagtctgtcactcaggctggcgtgcagtggtgtgaccatgacttactgcagccttgacctcccaggcacaagcgatcctcccatctcagcctcctgagtagctgggaccacaggtrtacgccactatgcctggctaccttttgtattttttttgtagagacagcatttcaccacgttgcccaggctggtctcgaactcctgggctcaattgatcctcccacctcagcttcctgagtagctgagactataggggtgcaccaccatgcccagctaattttatttttgtagaaatggggtctcactatgttgctcagactggtctcgaactcctgggctcaagcgatcctcctaccttggcctctcaaagtgctggggggatcacaggtgtgagccactgcgcccgtccactgtccattcttgcccacaaagtcttggagccacatttctctccttaatctggtgttgaatgagaggaaggtgggtcagtattttcatcttcaggctgtgtgtccagctctccagaagtctctgtgtgttgtgtacccgcccaatggcagcaggacggcacagactccagccaaggccccgagccctccagctgggctactccaccacagggggtcyttccacatcctgtctgggtttagggactctagggcagagggctggacaggtttggcctcttggagtgtcagtccctgagcccccactcagtgttcctccctggacagcttcagtyccctgcttcctgatacgtggggttctgtgctcttcccractagaagcaggctgggacctgggaccctccccgagaaggggggtgactcagcttcagtggcctgaggagacctgggtgactyrttaggactgtccagattccaggagtgtccggaactggctggagagctgggaggtcatggcttcatgcggttctgggtttgagggcagccaatttggggcccaggcccttgatctgggacctgggaggggaatttctcaccccaccctggctgcacccagaccacatcttcttccttctttcttcctagcaactcctgcagtatgaccccagccagcggatcacagccaagactgccctggcccacccgtacttctcatcccctgagccctccccagctgcccgccagtatgtgctgcagcgattccgccattgagaatgtcaaggccacactcagatcctttctcgagcagctgctgccccagctgcctcctacccattgccaagagaggatgcatctggggagagcaaagcactaaggaattcagcatcagcctgcagagggctgagtctgggttagtcctgcccgcaggttagcgagatcctgtgttgttttttgggttggacggtgccgtttcaaaatagaggcacagatgctccrtgcacgaggggtccccgggcactggaacaagtgccaagttgaaggcagggggcctgccagagctgggtgtgggtattcaggccctcacctgccctgcctgcagggccagaccctgaggaaagggcgccccctgctggtctttttggatttaaaatgtttgggggaagagttgagttccagttcagtcccaagttaaacaggagggagtgagggagaggagagagggcgttccccggatcccaggagagctgggctatgactgcaataaggagttgttccttcacctgagatgtgcttcttttggttcatttctggcttgacaacaakaaataaacgtggtatgttcctgagttttctgattgttctgctcacaggggacacctgggcttcctgacaaggggaacattgacacagggctggagacagctctggcccaaactgagacagtggggaaatgggcaaggagtaggtggggagacaggggctagtccatgatttttttttttttttttttttttgagacagagtctcactctgtcacccaggctagagtgcagtgacataatctcagctcactgcaacctctgcctcatgggttcaagcagttctcctgcctcagtctcccgagtagctgggattacaggcatatgccaccaagcccccatttttttttttttttttgagatggagtctcgctgtctcaggtctaccctgttgcccagggtagagtgcagtggcatgatctctgctcactggaacgtccgcctcccaggttcaagtgattctcctgcctcagcctcctgagtagcgggaattttaggtgtgcaccaccacacccagctaatttttgtatttttagtagagtcggggtttcaccgtgttcgtcaggctggtctcgaactcctgacctcggatccacccgccttggcccccctaaatgctggtattacaggtgtgagccactgtgcccggcctcctttagtgattttaaaccataatctctttccatgacctgccactgcatccctgccccgcactcaaggaggcacagccctccgaggatgcctgtttcccaggcaggcaaattgagcacgtccgcccaggcaaggacttgagcaacgctgtccttgcactcatcccccagacacatgggtcctgcactctcaaatgtgaatgaatgggacaccacatggcacagggagacagaattcgtttattgggatcactgggtggaggtggaggaagaactgagtggctgctgtcctggtctggggatggatcaggcaccaaggttaggggagggagcccatcaccatgttagtaaaataataaaacagtggttggacagagggaagacccactgcctgggatgaggctgctctgaggcaagaggtgtacgtatcctacctggcccaacacacgcacttccccactggctccttggcccgtgtcagcgaagggagcgcgggacggtgggggaggcggagcggtagcagcggtacccctccagtgccgctggcaggagcagcaggccgctcagggggtctttgcggcagcggcccatggcctccttgtagctcagccgttccttggagatggggtctgtcaaatccttctcgtagctggactcgtcctgcaggagctgggccagctcttcactgatcatcccggagaggagggcctgctggatggggatgcggcctgtcctcttggggtcgatgagccccccggtcaggtgctgcacctgcaggtgtgggagcacgctctcccggggcatccagcccttctggacggcctcgcccaccgagagcctcttcttggtgacggggtcctcgatgccggtgaaggccttctgggcgttaagcagcctctgtgtggaggtgttctcgatcaggcccctctccatcgccttgtgcacagagtagcgctcacggctgagcaggtccacgatgccccctgtggccgcctgggcctccagtagcttctgcccagtgatggggtccagcatgttcttggccacggccgtcttgatgctgcacttgttgtctgtggttgtgtcatagatcccggcgatagggaagctgtcatcaccgagcccgagagagaagctgggagagaagaaactggtgctctggggggccggggaggcgagcggggacttggagatgatagagccgatggagagtgaggagcttggcttggtctccccagctacaagcagcgcaaactcggagatgggcaggtggccgtccttgtacagatggtactcctccttagagatgcgccggcagcggagggcggcctcgatggagtactgcttcccgctcttgcggtccaggagcacagactcctccccacagggccccgaggtggtgacctcctcccagtcacactcgagctcctgcagctgcaagtactggcccctgtcgatgatgcccctcttgtaggcctcgtatggggacatgtccttccccgtctcgggttccaggatggagatcttggtggaaaggttggtctctcgcgtctgggtctcctggctgagctcctcccggctcaccttggcgtggaggtcccggagcgtccgctccttctcgtagatctggtccttctcgcggaggatggccgcctccagccgcgagagctcctggccccgctgggccgccttctgtcgctcgctctccgtcttctggctgagcagcttcgactcctcctgcagctgcagtgtctgctgctgcttctgcctctccagagcccgcagctcctgctgcagccgcccacactcctggtcggcctggtcccgggccctctgcagctcggactcctcccgggaccaggttctccccagcgtctcggcccggtcaatgcgctcccgcaggcgccgtgcctcctcctcccgggcctgccgggccgtgcgctccctgttgagcatctcccacacgcgggcccgctcatcttccaggacgcggtccttctgcacccggatcacttccttgtagatggtcttctcctgcgatttggctttctggaggacgtcaatctggacctgcaggttcttgcactcccgattcagctcggttacctgggtcttctcctggtccaggtcccaccgcagggcttccgtggacttctccaggtccgggtccttctccagcttgaccacttcctccatgatgatcttctcctgcaccgtgggaggccgcttctcgagctcctggatcctcaaggtcagctgccgcagctccctctccacggccagcttcttgctgcggtcctcctggaagctgagcaggccctcctgctcctccacgccggcccgcagctgctgcacctcaagctctagctggcgccgccggcccacctcctcatccaggctcccgctcagccggctgtgctcctcgcgcagcttcgggtccttctgggtgaccaccacctcctgcaccaccaccttctcctcgggcttcctcctctccagcagcaggcgcttgctctgcagctcgtacaccgcgtcctccgcggcccgcctcttctgggccgcctcccgcacctcctggcggagccgctctgcttctttctccagcaccgggtccttctcgtggcgcaccacctccttgctcaccgtcttggtctccaccttggcccgctcgcgcctccactcgtcgcgctcaccctgcaggcggatgagctgctcctgggagcgcccgtggctgttgacgagctcgttgagctgagccttcaggcggtcgatctcacgcagcacctcggggctcctctcatgcctcaccacctcctgggtcacctccttgtactccaccgtgggcttctgggcccgcaggacctccaggtcgggcagcagcttctccacctccttctccacaccgctcctcttgcccgccatctcctgcagcttggccttgagccgagtgatctcctgctctgtctccggatccacctggaagatctcgtggacgcgctcctggagctgcactttgggcctctgcttctccaccacgctgtacttgctgtgcaggtcgctcagctccctggccagcgtcgcgttcttggtcctctcctcctcgaggaggctcctcagcctggaggactcctggaggagccctgggtcctgctccaccttcttcacctccttcacgatgaccttgggctccaccgagctgatagcccgctccaggtcttcgatgcgagcctgtagcttggccacagcctcctccgcctgcttcctccgcgcagcatcctcctccatctgcagcctcagagcctgggctgccttgaccatttccagattcttctccaccttgactacctctttcaccacgaccttctccttcacgtccacctccctcttctcaagggccagtagctccttcttcagcccttccagccgggccgagatgacggcatcctccccgcggagctgctggatctggatcctgagctgggccgcctggctgtccaggccggggtccctctccacctgggtgacctccttggtcagcagatgaggctgcatggtcttcctcttgctttccagctgcacgaccttctgggctgccacttccaggtctgcctgcaggccagcccgccgcttgccctcctcctccacctgggccttcaccctggacaggctgccctccagctgggggtcccggtagaactctaccacttccttctcctccagcctctccaagggccgctgggtcctcagctgcagcagttggctcctctgcgcctccagctcatgctgcacccgggccacccgcttcctctcctcttccagctgggccttcagggcctctgactctctccctgcttgggcagggctctcggagccctgctttgcatcatgggtccttcggatgtcctcactgagctccttctgcagagaggaagaagggtagagcacggggtgggcggtagagataggagctccatgtttttcctgagatgaaagacccctccctgtttcctgagactccccagtgggtcctcagaggtggagctgaagacctaagatgcttggatataggattttgagaagacccagtcaatgcaatgattttaggacccaaggcagtgcgcaggcctggtttgcattagaaagtgcaagtaagggccaggtgcaatggctgatgcctttaatcccaacactttgggaggccaaggtgggcggatcacctgaggtcaggagttcgagaccagcctgatcaacatagtgaaaccccatctctactaaaaatccaaaaaattagctgggcgtggtgacgcatgcctgtaatcccagttactcaggaggccgaggcaggagaatcgcttgaaccagggaggcggaggttgcagtgagctgagattgtgccactgcactccagccttggtgatagagcgagactccgtctcaaaaaaaacaaaaaacaaaaaaaaagtgcaaacaggacaggttctccctgtccctccagaacctctcccttttccccttccatccagggaccctgactgtggccgagggtaacagaaaagctggcaagtcaccaggagtcctggagaagttctggcttgagggtgtgtaggccgaaggtggagagccaggtggctgagggtgaagctctaggggattttctctgctctctggggttagaggtcttgtcccattggaggatgcccagtggccatgaatgccatctccagggcctaaccctgggatggacaccagcctgtaagagctgctggagagaaaactgggtggctggaatccgctcccctctccagcagccagagctgcccaggggctgcaggcaggagggagaggagggaaggagactaccagggtgacagcctggcattttgggaatggagtgggcattcctggttattcctggctattgtgggaaagctgtaggtgttgtctgtgtaccttctccagcatttttctagcaaactccagctgctggagcagctgctgctgtgctgctgcaacctcagtataggcctttgcaaggttcttctcctggagaaggcagagggagaggggaagggcagagtcagctcctgccttggaccctacagagctggtgtcaaggtccactgagccccgcaaggtcccatctcacctgggcttggatgctctcttgcaggggagccactcggggtctcttgggggctgacactgccagggtgggctccaaagagcagcggtaggtgtctgcctggagctcatagtcctgagcagggaggaaaggacagcaggctggcaaccagtgggggaggctgggtgtgggggatagggctggaagagggacaagggtgatgcatggagaggggcaagctgaaggcaagctgct

SEQ ID NO: 98188 - DNA, 125560 bp, Homo sapiens
  misc_feature (1)...(125560): n = A,T,C or G
ctgactatgttacatattgcttccagactacatttttaaaaataggctcacgttgcatcactgggggttgaagaaatacttgacactaatggcgatgtcaggaagagaggtctggaagaaataccataaaactgaaaaacatggtatagatagatttgtaaatcttttttatagatttgaaaaacatatttctaacacaaagttacagtcaaatatttaatacactttatctctcaagcatggtatgctttaattgaaacaatggacctaatcattactaggacttttagaaggtcacttctttgtttgcctttgttttaatagcctgaaatctcccaaaaatatatcctatttggtttccagtatcaatttaaagtctttctggaaaaagataaggtcaaaattcaaaatctattttaaaatccttatttctagacttgtaacgagttgattgctttgattttaagtaagcaaatctagttaattagctttttaaaaataaaaaaggtccatttttaactcaatgttggttcatatcagatacaaccagccttgtattgacaattggttgaatatacaatattatattaataacaacagatactacagttgatcttagccaaaaggccgagaagtgatgaatatacagtattgaatattgtattgcatattggttgaataaccaaccctgcacaatcaaattttttaaaaagaatccttacattctaacggtacttaaaaaaattttaggcttggggcagtggctcatgcctgtaatcccatccttttgggaggccaagtggggaggataatttgagcccaggagtttgagactagcctgggcaacacagtgagaccccgtctcacttaaaaaatagaggtcacttaatagagaccccgtctctattaaaaaaacatattttttaatgtatatacagaaagtcccccccgagctcaatcaatgtttatgtatagtattaatataccactccctacaaataagtttctaagtcaaaggtattgtcagaagttcaaatgactggaccactcagtgctttgtgatattattttgatgattttttgactgcattccattccgaaaactaatttactctgagtagaagcagagttaataaagtatgcaaaaatactaatctggcttatttaagtagtctagtgacacatctgagaaaaattttgtgtgagattcaataaaagctgagatttaaagaacaggttactgctggtctccccaagttaacatactttacctgagacatacacaaaatgaacttttatccatctctctctctctttttttttttaagtatttgcttgaggcataatcataatcaacttctaaagttacattttacttgatttgttgtcccaaatgtagacaaaaaacccataaatagccacaggcacagtggctcatgcctggaatcccagcactttggaaggctgaggcgggaggagcccaggagttccagaccagcctaggcaacatagcaagactctatatctaaaaaatttgtttaaaaatgttttaaaaaatatttttaaacataaatatcaagatttctgttgttaacaaagtaatgggtagtcattttacatgaactttaataaaacaataatagatgaactgtgttgtgcgttctacggtggctagaggaaaatataatcattttggggaatgccaatgcatgaactcctcaggagtaggtactcttccattaatcctcccagattttcagctcccttttctgaccactggtctttagtctccacgggttcttccacaatcagcccctccccacaaggtaaaatgtgcatacttcagggctctatcccttaccctcttattccacataatatccctggagaaaatcatcacattttaacttcaatcactaaatgcttaatccaaattctatcttcatctcagactttttcctttcgttccagacccacatgtccaactactactacttatgggacctcccaacgtatatgacaggcatctcaaactgaacacatctaccccacttcttaaactcctcaaaaaatttttttcttctttagagttcaatgaataacagaacaatccagtctatcaccccactgtcatccctggcttctccttcctcatctcctatatcaccaagatctgccaattctaccttttttagtggcccctccttcttattcccaccatcgctctcctggttctcttcatttcttcactgagcttcagcaacatctccaatttttttgtctctcatttaggctctctaccaatctgtcatttgagtgttgccagtgatcctttccaaatgcaaaactgatccagtcactgacccaaatcctccttattacctttaaggaaaataaactcatggtccttaggttccttctgatttggcccacatttgcctttctgggcttacttcctcccattttctgctaatacacatgaagaagtattctccagttcagccacaataaaccacggcttagttgttctcccggccttcgtgcctcagcccaggctgttctgcttcggaagcacctggtcatttcctgtttaccctttatgacatgcaattccagagcccaggaagtacctaacacattgtgaatgtggaatcaatgtctgctctatgcctaagtcaataacagccctttatattaaaaaagttcattacgacatacaagatattttcattcataatctataatcacatttatcttgattctcacaactagactatcagacaaccattgcaggttttattatcccaagttatcaatgacaaaataatagcttctggttttccaaaagggcaaagctagaaattaatgcaatgacccctaactaaaggtttgacctctctattattaccctacttaaattatcaggtacacaatgaagaccaccatgtgctaaaagcaacacagaagaagcgtaagtcatgcacttagctccaaacatatttaatccagtcagaggtacaagatccatccatatgagataaaattctataggaaagcatcctacagagctaaatgctaaaccgtgtagcacccccagtaggagagcgaagtgcatttagtgggcattagcctaatcctgaaagactttccagaaactggggcagcatgctcctgcagtcccatttatttatttatttatttaacttttattttattttttttgagacggagtcttgctctgtcacccaggttggagtacagtggcccaatctcggctcactgcaagctccgcctcccgggttcacgccattctcctggctcagcctcccgagtagctgggactacgggcgcccgccaccatgcccggctaattttttgtatttttagtagagacgggatttcaccgtgttacccagcatggtctcgatctcctgacctcgtgatccgcctgccttggcctcccaaagtgctgggattacaggcgtgagccaccgcgcccggccagtgtcctttagactgtggacgagtaaagggcggagagatagacattccatttgagtgcaacaaattgaatgtagaccatgacaagtttggagaacaaagaggaaaacaccaaaaatagaaattgattgttttccacctttgacagaactccctaagagtttcagaaagtatcagatagagaaaaaagtaccctcactctggtaaagaaaacaaaaatcaacaaaaaccctaaaaccaacaaaaacaaaaatgaaaacttccttcaacttaccacagtaaggctagaagacagaactattaataacatgttcatttgctacattttttatcaacctatttgcattaaataatgttaacctcccactaaagttatttctactttgaattctgaggtagtcaagagatttaaataagaaaaagactacatctgtctcttcattgttactttgttattcccgatccataatgcttcagtttgctacatttagttaaacatcagcaaagtaaacaataatgtaactattctatctagtaatgagcttggagacttaaaaaaatatatatagaactttattccttttcatttgaccactaataacatactgaacatgcccgtgaaaagaaataaaacacaatggtagaaaactccaaaaaggtagagtgtctttaccattcatcccccacccctatctcattagcaactttctgatctcgggtgttttctccaatagtaaagtgtatccctatatccaaaacaatttctctaaagcccttctcactcattcaacaaacatttaacaggtacattgcacaaggtgatagaggaagagaaactgaatattgtccctgcctcggacatttcagtgcctttacgcctgacttccactcctaaccagtcttctttcacaggtaccctgtcccctaaaatcaaatgttgcttttcacagttgcctttacttgtcacctaaagtatttcaattcaaaatttcctcaaagtcaacttaacagctgctgataaaataatcattctatatgattacaaagtgtttcaccaatacatatccccattttttccaaacttaaaacttcttcagtccttattactttagcatagagacctgcactgttgtttcttctttttaaaaaaatactaatgctaatcctttactgtttgagcagacttaatcctaccttttcttttgtcaataaatgccaggtgttttttaaatcactatcttgtcacttttgattatgatatactgatcactctatttgtatcttgaatgaaaagaccgctttgtgattttgctaatgatatgtaaactagaacttgagaaccactggatacaggagtactgctgatctttatactttctgtctaaaaatgaagcccctgtctctaaatttcaggaacagggagttaaggttccatgaagtgtttactttccacccttaatttattaccttaatacttcagcttaagaattatgtgttctgtatatatcacgctgcttgtcaatatccacacataaaccttcttgttttgacaattaatctgaaaaagtccccatatagtctgagagggggaaaacctaatttggaagaatataataaatgtcagtttccatcacagaatatatgcttctcaagttcaattaacctctcaatgattccctaagaggaaagtaattctccttagtgtccttgtcatccatggagtggaaatctttctactggcaagattagtaatcacttccatgacccccaaaacggctcttccttccatttccctcaagtactgtctggagcagcggttggaattaatagaggggccataatctccagacctgaataccaaatcaatcctgcagccccccacacccttaatgcccctgcactttcttgcttatcctttttctctcgtctccatttttctttcctccttctggtgttccggaacctatgatactctcctggttgtttgaatttttacaacctaccagataataatctcttgtgatcctcaaagcttccttaaagcaaaccctgaatcactgtgttttaaaaccagtatgaaagactattgtgtgggataatgttacattgtttcacagccctacaaagtttggccacaaaacgtgtgggcagattccgtaactcaaccggaaacgcgaaggactgaaacaaatcaacacacaaaaaacgaagccagcgagaaagatccaacccgggccccctgcctgaaatgggacacggggatgacggggcaaagccgggcaaaaccgtgctcctggctctcgcgattcaggagacgcgccaggctcactggggacgacagcgacgacggcggcggctcgcattgctccacgcttcccgtcaggggggctcgagggaccgccccaggcccggcccatgcccgggctcggagggagcccctggtgcgagggctgcccgcagggctccgtcctcccgctgaggcgcggctcccggagcaggaggcgcggaggccgccctcggcgtttcggagtcggggcggggaacgtccacggccaactgcgggcaggggacccccaggcggctacaacaggtgcgccggggccgcccacccggctcggggcgcgcccgcccctgcgccgacccccgaccccttccgccgccggggccccgctgttacctgcagcggcggctcccgattcccgggagggcggcccagggccggcgccttacccgcgggcaggcccactcgcccgacggacgccgcgggtcggcgacagcggggaccgcgggtcggcgacgtcggggcacaggtcctgcsgggccgcgggggccgccagggagggcgcgaccgcctgaccgggcttcaggagcagtgtcctcagccggtgacctggccgctaccctcgctcagtgtccccggcgacgcgcggrtcctcacgcgctccctcacttcctgcggcttttggtccctcccgctcgccgtccctttagttctgcccacttcgcctccgggttgtcagggcaaccgtagcgacgccggccctggctgagaggcgttaggagtccgggggttcgcccgcggaggccggggagcagccgaccatggagccccagagtaagggaggccyggrctggagctgggaccggggcdggygaccgggctrgggctccccgggaamgagtgtgggcgccccgcgcgcgactccgcaggtttcaacgctcggacacggaaatacggtttgcgtctcctcgcgcttttctctcctggagaggggagaagggggctacatcctgccaagtctgtatggttgggccgccggcgccctagagtccgcgctgggggctgggagcgactggagagccccgaggtatgggtggggaagggcgcagcgaccccagcgtgcgtcttcctgaaacttcgcccggacggttccatttactcctcctcctactcatgattttagtttggtagtttggttcattaattgtaagtagcccatttttcttctaaaatgtcagcaattaaacacgtccgaggctgggtcttgtrtttattagagaccccgtcttactccccgccccccgccccacacccctagtctgygacttgaaggagagagagagaaaagaagarctttgtccaagtgtatttgattcattcttaggggttctacaagttaggacactcaaaaaatgtttgtaatctctttttctgttttcccatgttgctttcgatgtatggcaaaagttgtgcagttttgagttatcagatctaaacacgagctctaacttactatttttgttgttgtttttacctttccagggactttgtttcaaggcctttctttctctgccccgcctaagctgtcttattgttccttttgttctcaaaataaggggagtgttttgtatggagacttaaaatttatctaaaacctttatagaaggatgcagtttgactctcaaaccaagtcgtcttatcttgtacaatttcagaaaygaagaactcagaccaaatctattctctggggaaaatgttggcatttttaaaggtcattcgttttccaccaagaaagtttcaaatacttttccttttaactcatttgctgaggagaaagcttgcaagttgtgacttatagttgcttgatagattttgtacagtatttgtcatttgcatttacagctctttggattctacatttttttaacctagtaaaagaaatttagcatacaagaacgctaaaatttttgttttatgtcaaactgatggcaggctgtgtatattcccgccttagagaagtgagttgaaatataccttttaaaaacagcaacttggcctggcccggtggctcacgcctgtaatcccagcactttgggaggctgaggcaggcggatcacgaggtcaggagattgagaccatcttggccagcatagtgaaacccatctctactaaaatacaaaaaaaaaaaaaaaaaaaaaaaaaaaaaaaaaaaagccaggtgtggtggcgcgtgcctggagtcctagctatttgggacgctgaggccgaggcaggggaatcgcttgaacccgggaggcggaggttgcagtgaggccagattgcaccgctgcactccagcctggtgacagagcgagactccatctcgaaaaaacaaaaaaaagaactttatttcttcagatttatgttactgttttcatgtgtaaactataatttsaagttmttcagtgctktctttatccmttcattcatttatagtgcctgttatgttgcagctctgttctagggattgrggattgaacaacggatcggacagtgttagttttggtcatcccaggaaaaytaagcagaggcttgctcaagaactcctgasgtcttggtggggttcggagattgggggaagaggagatggacaaaggctcccaagaggaagtagtaytgggtctgcagaatgacccagcaaagaatgagggcaagggattccaggcagtgggaattactkgtacataggccctgagacctgagagcagcgtgggtttgagkctcacggtaggaagattagtaaagctgtagctaaggagaggaggaggaaaaaacagggttggaaggagggaggagaaatgagataaggctggaaaattcaaccggagcctgatcagaaaggttctgtaaccatgtgagaaatgtattacttatgtgaactatacatttatatctcatgtcattggattttgaggtggaaaatatttaatttatacctgaggaatgactgtaaatttctttctttccacatattcttaaattatttcatcaatttaattttaaataattcaatcaccatttagctcaagttttgttgtttttttttttttttgagacagggtcttgctctgtcacccaggctggagtatagtggtgcgatcatagctcagtacaccctcgaactcttggactcaagcaatcctctcacctgagcctcctggctagatgtgactacaggtgtgtgccaccataccccgctaatttatttatttatttagagacagagtttcgctgttgttgcccaagctggagtgcaatgatgtgatcttggcttactgcaacctccgcctcccgggttcaagtaattctcctgcctcagcctcccaagtagctgggattacaggcatgcgccaccatgcctggctaattttgtatttttagtagagatggggtttctccatgttggtccggctggtcttgaactcctaacttcaggtgatcctcccgccctggcctcccaaagtgctgggattacaggcgtgagccaccgtgcccggcccctaattttctttttaattttatttactttgaatagagctaaagtctgattttgttgcccaatttgttctcgaacgcctggcctcaagtgatcctcctgcctcgtcctcccaaagtgctaagattacaggcgtgagccagcacacccagcctggaaattcttttacagtctaagaaacataatttggataaatatttactaccattcacagttactaaatatttaaaaggacaagattaaatgatctttgaggtttcttttaacttggagatttgtatccaaccagatttcacctgagacggaagttatttcctactgtcagccataatggaagcactacagaygtggcatcaagtattacagtgaattacarttatactgtcagcaatattatgttaacwgtacattgtttatgccgatattatctaacatattttaarccctgttccttttgttactgagaggtctaaaataacattttacaagtrtagttgaatatagcatcagtaaattsgttatgaggaagactccttcataattgcttttawggattaaacatgtatctaaggacaacaccaaggaactactagaaataaccctcgagtcagtcttttccgttctgtttccacasccttagttttctattacttttaggaatgacctttgttaactaagtcattaaaatccaataaacataractcttcagaccccacwgctggatcatactcttggcagcaagcagaggaaggcaggggctaccactgttttacagaataatagtaagtcaatgatccaagaaatgacttcccagggaaagggcaaattaaatacgttcacaaccttgggctgttgagagtggttttggctcttggcttgcacattgamgtctttaattattttcttgctaaaccaacttcagtgttggaaagatagctcatgtataaaataacatggaaaacgtacatcacttcccatttgttttgggtttttgtccttttttttttttctttttttggaaaatagttcaatagtactatctcttccttaatttcttaatgagttttaataccaaggggtggctttggggatctttagcccaaatctaagcaaacatataatctgagtaaaaactgtatatttatcaaatgcagcatcaagagaagccccccggctcccacttggtgctacctgttctgtaagctcttgctatatatatgtattttaaaaatccagcaggcagcagttttctgctacacgtttctttctgtttttktttgtttgtttgtttgttgtttgttttttgttttttgagacggagtctcactctgttacccaggctgcagtgtggtggcactagcttggctcactgcaacctccgcctcccaggttccagcgattctcctgtctcagcctcccaagtagctgggattacaggtgcacgccatcatgcctggctaattttgtatttttatagagacagggtttcaccatgttggtcaggctggtctcgaactcctgatctcatgtgatccacccgcctcggcctcccaaagtgctgggattataggcgtgtgccactgtgcccagcctttttctgccccccttttttttttgtagttgttgtttttagagagacagggtcttgctgtgtggcccaggtatgcctcaaactcctgggttcaagggatccttccccattggcctcccgagtagccaggactgcctactgggctcacgcatgtttttaaagaaatggtagataagagatctaaggtatttcagtgactaagaaactgaggtgaatgactaagggactgagacttctctctccaaacctgtttctccactagtcttycaagccttcccagttactccaacctgaaaatgagtcatccttggctcctcattatcaaccctcaccccacccttctccatccaccagcaggtctgtttattccacttccaaaatataccccaaatgtgcttcctcttcctccgtactccaagctaccatgccgtgtaagttatgattgtgatttttgcatgtcttcttccactgctacctggaagctggagtgacctttcaaaatatacatcaaatcagatcatgtcactctcctgccaaaagccctccaaagtccttacgktgatctagctgcctcttcaaactcatcacacatctgatcttagatgtattatgcttcaagcacattggtcttcttgtagtccctcaaacaagcttctttcaggactrtggctcwgaacaagctttcctctctgccagggatgctattccctcctgctatggcaggtctgactcctaatgtccttcaatctttgcctaaatttcacctcctgcaacccttccctggcttcctaaagtggtggtgccccctctctgatgttattctatctctgcgcttttctcttaayagtaataatcagaacttrtaattattttgttaatatttaaaatctagctggacgtggtggctcacgcctgtaatcccagcattttgggaggccaaggcgggcggatcacctgaggtcaggagtttgagaccagtctggccaactggcgaaaccccgtctctactaaaaatacaaaattagccaggtgtggtgttgcacgcctgtaatcctagctactcacgtggctgaggcaggagaattgcttgaacctgggaggtggaggttgcagtgagccgagatagcaccactgtactccatcgtgggagacaagagcaatgtgaggtggggggaggagggagggatagcgttaggagatatacctaatgctaaatgatgagttaatgggtgcagcacaccagcatggcacatgtatacatatgtaactaacctgcacattgtgcacatgtaccctaaaacttaaagtataataataattaaataaaaaattctactttcttcactcgactgtagggtggtggaagaggtcaggggacctgtctgccctgtttgccatcccgtccctagtgcctaacacggagtaaaccctaaacattcatggaatggatagcactgctgttcacagatagatgccttacctactttcatttccttaagagtgttgtggtgtacttaaaaaaagaaagccattttattctacattattctacaacacaaagggctgtgctccagtgaaatttgaagtgcctcttgtggattgtgctttgggtaaagttcatttaaatcaggtacttataaatgttaggtcgattacaaatatggtgtcccattttcttttctaacctaaacgagatgttttaaacgagtctcattctatccggtaagaataaggaaggaggcaagtaaacttattttttggaccaagcggccacgaggtcataagacctaaaaatctttacactcccagccagcacctgctcattaattatctgggagactggtaaggatttaaaagtaattttttccttaagcccaggaatcatttaaaaaatctgtataacatttttttctcatgtagtcttagccccgaagaatattaagtctatcaattaggttataattcaaatcttatcaagaaataaatgcttaataaatcaagattaaaaaaawttttcaaagcagtgtcttttaaacagtcatgttttaaaatccccatcaaaatggtaaaattcattgtgatcctgacctctgatgctgtcagccacaggaaggggcaaaacracttgaggcttgaagccgtgtstttcccgaagctcaggttcaccaaacatggtctccagatggagtctgttcctcagaacctgggctttacttcttgatgggagaaggaagcagtgttaaaacttgtctattctgaactagccaaccagattaaaggaggggtttgtgcataccarcatcatcccagaatgacctgaatgactcattacatgcagacagtggtgcaaactcattaacaagtaaacaactcacaccagtgctctgtgctcacagggctgggggcgttcttgggtatttttcttaagggaggctggargaagggaggaggcattcctttctcctagaggcaaaggccagttccttttgctgtgccccagacctttcctggttgttagaaactcttccaggccttttcttgggaaggtgctctcatccccacacccctgcctcctccctccacctgttgtgcactccctgagagaaacaaaacaacttaatcagcttattcagctacttgggaagctgaggcggggggactgcttgagcctaggagtttggattcagcccgggcaacatgtcgagaccccatctctaatttttttttaagttttawtttttttaatttaaataaacatattcaggctagtgcacgtactttggttctctactgaagtaattcaccctaaattgaaactagcattgctagtttagtgtattactcctctctaggcagcctctctctctctatatataaatatatattttgtttgtttgtttgttttgttttgtttttttgagacagagtttcactcttgtcgcccaggctggagtgcagtggcacaagctaggctcactgcaacctccacctcctgggtttaagctattctcctgcctcagcctscygcgtagctgggaccacagaatgtgatcccacagctgtgaccacacctggctaattttttatttttttgaactggagtctctctttgttccccaggctagtcttgccactatcctagtttttcttctgtattgttagacagggcctcagtgtccttgaactgcaaggaattaacactgagcgtagtattagtaaaacctatcttctactcatgaaaagtcaatcatttttttaaaaaaagattccacaattattataagcagaaacaaattaaaaggttgtatacctactgtttgaaaaacacgacttaccaaaccaaacataagaagtatgtatacccstatatttatgaaataaatagaatccataatttaaaacttcctcacaaaaacaatcccaagttcctgatggcatcactggtgaattcttcaatgaaagggaaaaaataacaccaacattacagattttttttttttttaatcttagggacagggtctcactatgttgcacaggctggagtgcagtggctattcacagtcaygttccagtgatcctcccacctcagcctcttgagtagmtgggactacaggctgcagaaacttttaagagaacaaaaataaagggaactcctgagctcaagcacttctcccatctcggcctcccaaagtgctgggattacaggcatgaaccactgyaccccgcttagtgtgctgtttttaaaaatgacttttgggcttgtgttcatgtgactgatgagcctgtagttttactttttgtaattttttagactacttttggtatcaagtttattgtaatctcaaaaaatgagcatggctctgttccctttatttttgttctcttaaaagtttctggccgggcgcggtggctcacgcctgtaatcccagccctttgggaggccgaggcgggcggatcacgaggtcaggagatcgagaccgtcctggctaacagggtgaaaccccgtctctgctaaaaatacaacaaaaaaaaattagccgggtgtggtggtgggcgcctgtagtcccagctaccagggaggctgagacaggagaatggtgtgaacccgggaggcggaccttgcagtgagctgaaactgcgccactgcactccagcccaggtgacagagcgagactctgtcccaaaaaaaaaaaaaaaaaaacaaaaaaaacgtttctgtagcctgtagtcccagctactctggaggctgaggtgggaggatcactggaacgtgactgtgaatagccactgcactccagcctgggcaacatagtgagactctgtcactaagattaaaaaaaaaaaatctgtccctaaaattaaaaaagaaattctgtagtgttggtgttacttttccctttcattgaagaattcaccagtgaagccatcaggaactgggaattgtttttgtgggaaagttttaaattacagattctacctattactagacataggagtttacatacttcttctgtttggctttggtaagttgtgtttttcaaacagcaggtgtaggtgtacaacctttcaatttgttgctgcctctaataattctggaatctttaaaaaatgacttttcatgatgaatagaacataagttttactaatgctataatcagtataaattccttgcagatcaaggacagtgaggccatgtctrataatccagaggcagaacttggatttgggarataactcccscctcttgcactctctgtgacaagtctagtttcgatatcaagtttatcttaatctcaaaaaatgagcttggctctgttccctctattttctcttaaaagtttctgcagcctgaagtcccagctactcaggaaggtgaggtgggaggatcacttgaggccaggagttcaaggctgtttactgaaacaatcaggaatgagcattcccaagagaatacaattacaaaagtaaaatcacctagagctttggggctgcttaaaaagcccagaaagaagtaccaagtgagaaaataatcaaattcagtggaaaaactcacttgagggtatcatggtcagctgggtttccacccctttgatgcacttcaagtcctgtgtatcccacaaagacttgctcctttctaaaggctatggttcacgttcaacagaatagcagcaaccgccataagcctgagggctggctagtctttaatattctgccctattcaaagaaatgagtctttccctcatttgtaaagatctcccaggtccgttacaaaaaaagaaggagcagctaggcacagtggctcatgcctgtaatcccagctctttgagaggccaaggtgggccgatcacctgaggtcaggagtttgagaccaccctggccaacatggtgaaaccccatctctattaaaactacaaaaatcagctgggcatggtggtgtgtgcctgtaatcccagctactagcgaggctgaggcaggagaattgcttgaacctgggaagtggaggttgcagtgagccaagatcacgctgctgcattccagccttggggacagagcaagactctgtctcaaaaaaaaaaaaaaaaaaaaaaaaaaaaaattcttacctcctggaagtgttttactagtgttggtttctatttgacattaaacacttccccaggccagtgcattagcagttagctccttactgaatattatctgtagcaaacagtagctgactcctagctctcttcagtgaacttgatttaaatttatagaattcttatgacttctatttcatcttgaaccaagagattgcttccttttcctactgatttacctttcagttacatgtagactgaaccagtcccagccatctttagttggtctctattcaaacattgtacttttgtttcttgattacatcttcaattattttagttatttctgagattctcccctgyagtttctccagttatctagagaagagtgtggcaaggtacaaagagtgcctgaataacattatgaaggctgtgagacttcaaataaatgagtagcctctctgagcattaggtttgtcctctgtaaaccaggaataatttttactgaaccagggttgttctaaggrttagtgaaatgtatgtaaagcctttagcatttaataggtgatcaaatggtaagtgatgcttatagaatgtttttatcatggtaaaatatacaaaacataaaacttaccagccttttaatctaaattgtcttattgtgataggcttgcttatagtaaaacaaactctttttagtatctgtaggatctatagtgataactsttcactccttatattctaacttgtgcctaattagttaggcacaactctaattagttatctattgctgcataagaaattacctraaacttaatgtcttcaaacaacaacaagtatttattatctgtgataggcagacttctaagatgtttcccatgatctcaatgtcctggtgttgtactctgtatgatctcttccttttttagtgyggatgggatcactgctcagrcttttggatgaaatcgagtraacgtrrgtaggatctgtgacttgtttctaactgacgyaatattgcaaatgtgatgggttgttactcctgggatgtgtgtgtgtgtgtgtgtgtgtatgtgtgtgtgtgtgtgygcacagaagaaaggagagrgaagaggagaggaggaggaggagagagacatacattaggatatgagatagacatatwgctagcatgcacgcaagattctccttgctgatttgaggaagtgtgtgaccatattgagaaagcccaacagcaggtggtgtctaggacctgagggtggcctccagccaatacccaataaaaaacakagctacataatcatacagacataaggaaatgaattttgtcaacaacctsaatgagcttgaacccagctcagctgacaccttgcctgcaaccttgtgagagcctatgcagtgaacccagttgagctgtgccccaattcctgacccacagaaaatacgagasaataaataysttttttytccctttttttttttttttttgagacaagagtttccctcttgtttcccaggctggagtgcagtgrtgygctctcggctcactacaacctctgcctcctgggttcaagcaattctcctgcctcagcctcccagktagctgagattataggcatgcgccaccacacgcagctaattttgtatttttagtagagataaggtttctgcatgttggtcaggctggtctcgaactcctcacctcaggtgatctgtctgcctcggcctcccaaagggctgggattacaggtgtgagccactgtgcctggccttttctcatatgtttatagcagcacaatctgcaactgaaaawatatggaatcagttcaaatgcccatcagtgaacgaatggataaagaaaatgtggtatatatgtaccatggaatactactcagccataaaaaggaacaaaataatggcatttgcagcaatctggatggaattagagacttgttctacgttaagtaactcaggaatggaaaaccgaatatcatatgttctcactcataggtgggagcaaagctatgaagatgcaaaggcataagaatgatacaattgacttggggacccaggggaaagggtgggagggggatgagggagaaaagactatacattgggtacagtgtaccctgctcgagtgatgggtgcactaaaatctcagaaatcaccactaaagaacttactcatgtaaccaaacaccatctgttccccaaaaacctattgaaataaaaaataaatttaaaaaaagtaaaaaaaccacttaaaaaagaacatgtattttcttaaatgaaatcctgacccacagaaactgtataagagaaaatatactagacaatatatgtatatttcctgagatgttcatttgttatacaacaatagcaaactaatatagagcttctgtgggtcctgatttgagaaatgctttagctgggtggttctgtcttggtcaatatgttgattargcctgcagtcatccgaaggcttgactgaggctagggcatccaatttcaagayggctcacttaacatggctagcaagtcaatgctgtctgttagcaggagacctctgtaatgtaatgcattaacttctgtagggttgcttgaatgtccttgcagtatggtagctactttcacccagggtgagcaaggtggaagctgccatrtgttttataatstagcctaggaaatttgaactatctttttgataacacaggtcagccayatttaatatgagagagaactacacaaggcctggatagcrgaagygaaaatcactgsgggccatcttggakgctggctgccacagagattagcaactggaatactgttttcaaagaaacagctttggctttttatrttttctctattatgtctttgtttttttttcattgatttcacttttatccttattatttccatcattttaatttcattcggcttaatttgctgggatttttgagatggatgcttagatcagtggggttttcttctttttctttttttttttttgagacagggtcttactgtgtcacttaggctatagtgcagtgatgaatcatagctcatagcagccttaaattactgagctcaagtgatccaatcctccctcctcagccttccaagtagctgggacracaggtgtgcgtcaccatgaccaattaactttttttttttttttttttttgctgtgacaggtctcactatgttgcctggggtggtattgaagttctggcctcaagcaaacctcctgccttggccttccaaaatgttgggattatacatgtgagccaccacacctatcatatcattgttttttagtactttgttttgttttcaaatacatgtgtttacgattatagatttcccccaccccagagttagtcacatcccacaagttttctacttttgtaaaattrtattgaagtataatatacctgagagaaagtgtgccatcttaaatgtacaggtggatgaattatcacaatgtaaatgaatctctgtaactagcaccaagataaaaaaaaaactactagttatttaaacctaagtttgataatattaccaattactttaaagttcatgtctgataattctaatacctgaagcacttgtgggtttgtttcttttttctgttttttattttgttcatagttttcagtcacttgatcatatatcctggsattcctggtaacatatacatacttctaatttttaaaaattgtacagctctagcataaagagtcytacaatgggtacttatcccccatctataactttttttacactttgttttstttttactctttctagaatttattattttactttttggataagtaatatagttacaagtttcaaagataaaaaattaygaaagaatgttagtgaaaagtctcattcttgcaatgccaccaccctcttcctgtcctacaggtaaccaccatgattaatttctggtatatcattccagagatagtttaraccttgtatatagaagcaaattatgtatactgcattcctgtgtctgttctgtactttgcttttttcacctgacattatattttggtgagttttctgtttagtacataatacattttctcgtattttaaacaactgtattctgttgtatgaatttatcataatktattgaatcagtccactgctgatggacatccagtttgtttccagacgtttgctattgtgataggctgaataaaagatgtccacaggctgggtgcggtggctcactcctgtaatcccagcactttgggaggccgaggtgggcggatcatgaggttaggagattgagaccatcctggctaacacagtgaaaccccgtctctactaaaaacacaaaaaattagccgggtgtggtggcatgtgcctgtagttccagttacttgggaggctgaggcaggagaattacttgaacccgggasgcagagtttgtagtgaaccgagattgcaccactgcactccagcctgggtgacacagtgagactccgtctttccaaaaaaaaaaaaagatgtccacattcaaatccctgaatctaggagtrtattactttacatagccaaaggggccttgggagtaaggattgtgagatgggcagaggagcgtgtatcatccaggtgggcacratggaatcaatcacaagcgtccttataagtgggaagaagaarcgtcagactcaggyaatacgaagatggaagtggtggttgcagtgatayacgatcatagagccaaggtgtgtggaaagccgtcagcagaaggaagaggcatggaaacggactctcccctrgagcctccagaaggaaccagcctttgattttagctccgcaagacgcgttttggacttctgacctctgggctcataataagataagtttctgttgttttaagctgctacatttgtggtaactaattatagcagcaataggaaacttagaagagctgtttttacaattataagcaaagctgcaagaaacaatgtgtatctgasaytttgcatttgggcaagtatatctgcagaatgaatgtctagatgtggactaggtrgttagttttgataattgttaaatcactctcctctagacrggttataccagtttatacttctagtagcaatatgagtgaatacctctttcgcacagcctcctcaactcaatgtgttaccaaacttagaatttttactgttctgctagtaaaaagccctaatttctttggataacttactaattattgagtcttcctcatctgcacaacatggttagaagctccttcagagttacgyctgggtccttatttctgtttttttctccactgcatacctttgtgtccttcctgttaaccttatatagggcgggctccctgcacagaaggaggagatgatatactcaacagcatctgtgcatgatagttagaggggaaaaaatgcgatgtagaatccattctatccatctatcaagttccatttaggaaaacaaaatgttagaactaaaatatcctaatcacaataattgactagtgaagactgaagaagtggttgcctagcaatgccctgatcgtctttgatgttgactggttgacataaggcgggatcaacaaacacacagcacgtgtgtggccctggcacctgattcagatccttcccactaaggtcaacaatacccaggctcttggaggcagccactcctcatygattatttgcacatgagataaacctgtttgttttaccataytgaaggactaacagaagcacaaactgtaactmaagtgcttttccagtgaagagtgaaataggaaagaatgaaaataacatatatctacccccctcctcctcttcctttagcttggggktcatcattacctccatttctccrttttatttttrtttcctttttattggcaccaccyaygtryrtgtgtrtgtgtgtgtgtgtgtgtgtgtgtgtgtgtttttgagattaaaactttagrgaaagaaacagctctcttaaaaatgtcagcaayttcaattcattgctttttaaatatcctsgttaatwatttacaccyttggttaaaatattcaatcatctacttaatatatagtgcttacctttgtttttattttattttttgagacatagtcttgcttgctctgttgtccgggctggagtgcagtggcccagtcttggctcactgcaacctccacctcctgagttcaagcaattctcatgcctcagcctcccgagtagctgggattacaggtgcccaccaccatgcccagctaattgtgtttttagtggagacgggctttcaccatgttggccaggcaagtctcaaactcctgacctcaagtgatccgcccgtctcggcctcccaaagtgttgggattacaggcgtaagccatcgtgtccagcctattgcttagctttaatgtgaatyagtgttarcatatacattcagaattctttaaacttcaaagaaaccacaaaattatgtatcatggaaatacaaatcagaacaaaaatctattgactgtgagcccacaaaacataatttttgtttcctgaaaacagaaaagtatgcaaatgaatgaggccttttaagggaatcttgtggcttctcagtccttgctgttctgaattggtgattatcaacagaaatgcccaacaggtgattctaaagatactggtaattctccacccttatctgattgcacctacattttgcttgttgctcattctgcatgacacctaaacgctgcatgacacccaaactcattctgcatgacacctaaactcaggtgacacctaaatgctgcatgacacccaaactcattctgcatgacacctaaaccctttagcagtcggccaaaaggaggaaggagggcgtgtttatgaaacagacagctgtcgtgagtcctggcgctcagcttcattcactaatcagttgcccgttggtaacttgattacagataacttcagtgtgactcaggctcgtttgccacagctgtttctcttaaaagttctctgataagtcattgccaccactacttccaaatagcrtaygttaactttgagttaattttasataaacyygggttaatttacamaattttggcaccaacaacatggttaggcaagkcagcatggatgggtatwggaatcyrtcaatctggkttgctgtrtaccagctctgggactgggggcaagttgtagcagccctgagcctsctgcttcacctgtatcaggggaggctgagacccaccttgcaggggtcttgtgaagattaaatgcagtgctgtgtgaatggtgcctaccttcgtgcccggcctgtcaasaccaggcagtttacacaaaaacacttgatattgactatgaaacaagatccrgaagagaacaaatataaatacagatggatcagctaaatgaaggactgycgagtaaaaacacaaagaagatgtttgtgagtggagggggatggatctccttcyccacccagcagtgaatatcatgggaatctctctctacctgaatctacctcttataattcttaaattaagaaccattagaactcttctaaactttctaagtactcattacagtatgaaaccctgcccgcctcccagacaacttcctatggacattagattttttaaacataggatatgttaagtgatggtcttcattcctcaatgtcacattctaaatttgtattactttttcttcattttccaaagctccagctcagcatctttgtatgccatatatatatatttaaaaagtctcagtggtctttttatgtgtcagtttctacaccccagcctcaggtagtgtaagcttcatgaggacaggaaccagccctgcctgctcacgctgtcaccagcatgtttgcagggaggacacatgacagtcaggtattggttgaataggtaaatggaagactggaaaatgtaggctggactgagaacttgtggatagacacacctcagtgattagtgaaaaggaagattggtccaaagcaatgtttgttaaccawattttcattatcaaagaggaaaaactaaacattccctaacagaaatgaaaaaggaataaaatttttgttagatgatgttgarctttgaaaggccaccaaggacactttyaatatcaaatcttcctcatccccccaactccagaaaactagtttttgctcagrtaytggctcagtggaaaatgtgtggtctgaagctgtagtctcctagtttgtgagcttattttcgctgcctgaaggtttgagtcaccgtagaaggggaggaggggtggtggagatcagaagtgaggtctgaactcccgggttgacttaggtgcggaggggatgacttaggtgcggaggggatgaggtagaactgctggcagggaggccccatctgatctgagagtgagcttggcaggcagaaagcacttgacaaagcccagggaatggtcgggagagactggtagatccagcactcctattccttgaggctggtcagtgatgtgtattaacctaggatggctaatgtgttggtgaaagggatccagctacaactccacactcctgagtcggggcccagtgttgtgcatttctgtcaaaaatactgcaggggactgccaggctgctctttccacaggccacactttgagaagcatggcgttaactcacctgtgcatgttacatttgttaaagggtaacttttcaaaaacagggaaaactatcattcatatagatataaatgttattttattaatgaagtgagcagtgagatgttacaaccagttcaaaagggaacccaaagggacggacacatctattactcagaatattgaaataaactggaaattgatgcataagtggctttgccacatggagaaggattggctttccaaggcaggttgatttgcatgtttataaacaagaatcatttgcrttatcwgttcttttcaacttcacataccataaaacaggtgaaaggctagactagaaaaccttaaaggggctgggtgcggtggctcacgcctgttatcccagcactttgggaggttgaggtagacatcwcttgaccccaggagttcaagaccagcctgagcaacatagaccctgtctctacaaaaaaagttccaaaaattagctgggcatgatggcatgagcctgtagtcccagctactcaggaggctgaggtgggagaatcccttgagccagggaagtggaggttgctgtgagccaggatcatacccttgcattccagtctgggtgacggagggagatcctatctcaaaagtctgaaggagtgtgatctaaacaatgtgtagtgtttccactgaagcacagatgttttycctgtgatttgtagtgattggcattttyaaactgcaggttsctgtcyatattmacttgacagtttgtaataactgcttgagattagcagtttgtctgtttcttcagtttagttaattgtcatatgtarctcctctgtgtaatatgagaaagtaatgagaattttttttttttcttttcagacggagtcttgctctgtcaccaggctggagtgcagtagtggtgcaatctcagctcactgcaacctccgcctcctgacttcaagtgattctcctgcctcagcctcccaagtagcagggactacaggtgcatgccaccacgcccagctaatttttgcatttttagtagagatgtgttttaccatgttggccaggatggtctcgatctcttgacccgcctgccttggcctcccaaagtgctgggattacaggcatgagccaccacacccagacatgagggctcttaaatagaattctcatctataaaaagtaggtactgtcagtattcccctcacataggtttatgaagaaggcattttaaaaagagaacccctgtaatcgatcagggaccccatctgccttctctgtgggcgtaggataaattcttttgattayytctatttgatataaaaaaatctgtarttaaaatataccatttgcrttatccataatagccaaagggtggaagcaagccaagtgtctatctgcaaatgaataaacaaaatatggtatatatatacactatatgcagtagaatactattcagccttacagagaaaggcaattctgacacatgctacaccatggatgaacctggaagacattatgccaagtgaaataaaccagtcaccaaagaacaagtattttatgtgatcagcttcttgataatctccaaaatagccaccttagcatattgaatgtttgaagctgaaggaawctcagaaatgacaggaagaacactctgaccttcccaccctcttctctgacgcaggtcacaaggcccttgggtgagaggtgccctctctgtccctggaggaaggaacatcyttctctctgaagataacgctgaatcgaatctgaatgatacktcctgctgttcctcccagtttactacgcttagctcctacccctttttgtcctctcrcaattttctgcttctctccacttttcatcaaactgttaaaaattatgggaggccattcttttgggctgagctcctgcactagccctcaacagatcagaccaaaccaaaatggagttacttatgctaaatgctgtgtcatcaaactgaaactttaaggaagcagatagatccccaaacagaccagtttttcctgaaaacatgagattccagtctacttraatcagcggaagaaggaagtcccctctgctttaactattamaaaaaagtaaccgaagtagcttgatgttaaccamtcaggtttttctattctgtttccttgttgctacctcataaaacckgtggttctgctattgcccagtgggagctctcattctgttttgyagagtggaaggtgcccagattcatgaatcatgaataaaagccaattaaatctataaatttgttgtagtcctctsataatataaaacctaatttgtaatttagtcttttgacgaacctaatatamaaagacataggtttaactgtttcttcaggtctttatttccttacaaaggttcctagttagatcaagttacttccagaaaagtcaatttcttctgtgtcatataaaacttatattaagtaaatgtgtatgmttttctcttgttaatctgtcttttggtacaagagccccagccaagaaattagaagggtggaggaaaaatattkttcctcccttacatatgattccacttayatgagatacctagatcagtaaaattcacagaaacaaagtagaatggtagtcaggctcagtggctcattcctgtaatcccaacatcttggaaggataaggcgggaggatcacttcagcccaagagttcaagaccaggctagacaacatagtgagacctcatctctactttaaaaagaaaagtcaggtgtggtggaacatacctgtagtcccaactactggggaggctgaggtgggttggatcactcgaatctgggggttcaagctttcagtgaattatgatcatgccactgtactccaacctgggcgacagagtgagaccctgtcagaaaaaagaaaaaaaaagggtagtttggtkgttgccagaggctggggtagagaggaatgagggcttattgcttactgggtacagagtttcacttcgggatgatgaaaatgttctggagatggatggtggtgatggttgtacaacagcgtgaatgcacttaatgccaataactgtacatttaagactggttaaaatcgggctgggcacagtggctcacgcctgtaatcctagcactttgggaggctgaggcaggcagatcacgaggtcaagagatcaagaccatcctggccaacatggtgaaaccccgtctctactaaaaatacaaaaattmgctaggtgtrgtgrcgggtacctgtaatcccacctacttgggaggctgaggcaggagaatccttgaacccrggaggcggagtttgcagtgagctgagatcgcaccactactgcactccagtctggtgacagagcaagcctctgtctcaaaaaaaaaaaaaaaaaaaaaaaaaaaaaatatatatatatatatatatatagttatatatactttaccatgataaagacattttataagcaccatttaccatttgatcacctattaaatgctaagtgctttacatatatttcactaatccttagaacaactttgttcagtaaatattattcctggttcacagatgaggaaactgaggctcagaaagattatttatttgaagtcttacataggctttataatgttattcatgcactcctttatgccctagatagttgaagaaattgcaggggagaatctcagaaataactaaaataattgaagatgtaatcaagaaacagaagtacgtttgaatagagaccaactaaagatggctgggactggttcagtctacatataattgaaaggtaaatcactaggaaagggaaggagtctctgggtttcaagatgaaatagaagtcaygagaaytctataaatttaaattcaagttcactgaagagagctaggagtcagctactgtttgctacagataatattcagtaaggagctaactgctaatgcattggcctggggaagtgtttaatgtcaaatagaaaccaacactagtaaaatacttccaggaggtaagaattttttttttttttttttttttttttttttttttttgggacagagtcttgctctgtcccgcaggctggagcgcagtggcatgatcttggctcactgcaacctccgcttcccggtttcaagcaattctcctgcctcagcctcgctagtagctgggattacaggcacacaccaccacacccggctgatttttgtatttttagtagagttggggtttcaccatgttggccaggctggtcttgaactctcgacctcaggtgatcctccccccttggcctctcaaagtgctgggattacaggtgtgagccactgcgcctggctgctgctcctttttttgtaatggacctgggagatctttatgaatgagggaaagactcatttctttgaataaggcagaatactaaagactagccagccctsaggctcmtggtggttgctgytattctgttgaacgtsaaccmtagcctttagaaaggagcaagtctttgtggaatacacaggatttgaagtgcawcaaaggggtggaaacgcagctgaccatsatacyytcaagkgagtttttccactgaatttgattattttcycatttggcacttctttctgggytttytaakcagcccaaaaactctagrtgattttacttttgtaattgtattctcttgggaatgctcattcctgattcctcgttwcaccaaacagtaggtgtgkaacytkcttatttgtttctgmytatartaattctggagtctttaaacaaaacgactgtgactttycatgatgagtagaagatagrttttactcatgctacaatcaatattaattccttgcagttcaaagacactgaggccytgtctaataatayagaggttgaacttggacttgggagatgactcctgyctctcrtactctctgtggctctgctttctgttattttactcataagcttgttttgtctccttgctgagaaytgtcaaacatgaaatgtaatttcaggctatagtgaagaaggatgacataggccgaaaaaattggcaatcatttggcctgtacrtgttgcttttkttttttttctggacttargatrtagaccaaaccttgacakttctggcctttgagtctttcacaactgtkattataatrcattagctcttctagaagttagaagtgactttggattaantctttcataaggtggctaaatgaattwatatggctcatcagaattcactwgattggwwaagcaggaaatttacagagakttttttctttgctgtaaatgtttttctaaattgaaaaacttctawtactgtcttctggaatactakaaataagtgcaagtgattgtttttggcaggaggccacataaacatttctgcttctctgtgacttatgggtagcattsatatamattgttaaaaataatgatcgtagatagataatgwdtcagartttgggctcascbrctgtagctgctgttgacccagaggaaccactgggakcctcacatctcagggcagcacatcgtttgcagcaatggttggttctgtacaaccttttatgaaattaggtgaggcccttgattagaatttgttttttaaaaggtttaatatgagtttatatctctaaatatcagtttctaattttttttaaargcctatgtttacaacaaatttgggagatacctatatgcwctactaactagtgttcttttgtggtgctttagaaattctggcttacttgtatttttgctggccttctaatgatttcactcatcaatcagaagatatttgtgtccacctycctgcttcctctcyggtgatcttgtctattcttggccattttagagttgacttagcagccttcacaaaactggttggaatttccactgggwttaaattgataggtcatttttgggaganctttgcaatattgaactttccaatccntgaacttatctgcccatgtattatgtttgtttttggtagattacaaaattatatgatcactccaaaaattaccttgccctttatagtaaaaccttccattgtaaacttctggcaatcactgatctgtgttcctctagcattgcttttttttcagaattttatacaaatggaatcgttcagkmtgtagcctttgagtctggctactttcatgtactkyatcaacagttattcctttttattgccaaatagtaatccattgtataaatactacatggtttgcttattggtttgtcattggaggaatatggactattttcactttttggtaaaytataagtggattggaattcacaaagtgctttttgtctgagcataggttttcatttcacttgtgcaaatgmctaagggtgtaggattgctgagtcacatggtccgtgtacgtttgactttatcagaacctgccaaattgtcttccaaagtgctgtgccacttctgtttctttaataaatacaggggtattcaagctgtctgtttsttcttgagttttggtagtctgtctttcaaggaattgatctatttcacctaatttgtagaatttagaagcatatagttgtttgttttgtttttgtagtatccattctagccttctagtgtctacaggatttgtaataatcctttcatttctggtattggyaatttgtgttttmtcttcttcctttgtcagtctgctagaggcttcctcatttgattgctttccaccttccaccacccctgcaaagaaccaactttggattttgttgaatttttttcctttactgtttttgtttaaatattactgatttagtctgtttttcttatgcctgatttgagtttatttggttctttttttacttaaagtaaatgcttacattattgatttgatgcttcatttctcataatttagtgctataaatgccctgtaagcacatattttgataagatgatgtcatatttattaagttcaaactgttttccaatttttcttaagacactctctttgacctatgggccatttagaagtacgccatttaacttctcatatttggggatgttctagaaatgttctagattcctagtttaattctgtcgtcagagaaaataattcactgaattttaattgtttaacttcagggtttgttttatsacycagaatatgatctctcaccaccgccatccagataattcttcaggttttgacgtttcccaacctgtctgctggttacttttcagagtwcttggatcattrytatttatattttgtcyagagtttcaaattgtgatcagtggaaaygacaggccrtagcatacrtacgccatcctgrccagcatyacaggtggtcagtacatctttctgttgttgttttgagacagggtctcactctgttgcccaggctggagcacagtggcatgatcarggatcactgcattctcaaccggctaggctcaagtgatcctcccacctcagcctcccgaatagctgggtctayaggtgtgctgccatgcccagctaatttttgtattttttataaagacakgattttgccttgttgcccaggctggtctcaaactcctgagctcaggccatcctctcactcgggcctcccaaagtactaggattataggcatgascaccacacctggccagtacatcttaaaaatgatttctgatccacgttgaataatgatggcctataaataytttttcttgcacttgcyttgttgggttttgatatcaagrttatttttattttaaccttataaaatgaactggggagtcttctttytttattctctcagtttgtgttagtggcagagtttttkktgtttggttrgttggtttctctttttcttgtatgtttcayggaactttttggtgaaggcacttgggcctrsaaatttctttatggsaagwtttttcatkactgattcaatatatttaatctatgtaagwtttttttctacttttkgagtcaattttgattttttttttccaaaaattcatatctcaccaagtatggtggcttatgcytgtaatcccagcactttgggaggctcaggtgggaggaccacttgactacagtagttcaagaccagcctgggcaatatagtgagactccatctctgcaaaaaaaaaataaaaattagcttggtgtggtggtgggtgcctgtagtgtgagctacttgggaggctgaggtgggaggatcatttgagccaggaaggtcgagactgcagtgagctgtgattgtgccactgcactccagcctgggcgacagaatgagaccttgtctcaaaaaaaaaaaatttttttcatctatgctttaaagtctgttggcataaaggtattcataattttacattatgaatttgtttatttgagacagggtctcactctgttgcccaggctggagtacagtggtacaatcatggctcactgcagcctccgcctcccaggctcaagccaccctcttgcttcagcctcccaagtaggtgggaccacaggcacgtgccaccatgcccagctaatttttgtatttttggtagagacagggttttgccatgttgcccaggctggtctcaaactcctgaacttaagcattcctcccacttcggtctcccaaagtgctgggattacaggmgygagccatcgttcttggcctgcaagttatgacttcctttcagagtctwtctatctgtagtacagtcctcctgtgcaagattgttttttgactgctttttcttgacaaatcttgctaaaggtctgtgaattttataatgtatttttwaagarccaggttttagcagggcatggtggctcatacctgtaatcccagcactttgagaggcaaaggtgggaggatcgcttgagcctgtaagggggaggctgtagtaagctgtrattgagcgactacactccagcctgggcaacrgaatgagaccctatctgaaaaccaaaaaacccacaagttttagcttggctgattctattgtgtgtttcttttgtatttcatttgtttgttatgtttttcctttttctttctttgaatttaacttgttctttgtctgatttattgactgatgcttagttttttttttttttgagatgtagtctcgctcgctctttcaccaggctggagtgcagtggcacaatctcggctcactgcaacctccagctcctgggttcaagcaattctcctgcctcagcctcccgagtagctgggactacaggtgtgcaccaccacgcccacctaatttttgtatttttagtagagatggggttttaccacgttgggcaggatggtctcgatctcttcacctcgtgatccacctgcctcggcctcccaaagtgctgggattacaggcttgagccactgtgcccagtctgttgatgttttttccaagttccttttctaatgttctcatttaagactataaatttccccagcctggacaacatggtgaaactttatctctaccaaacacacaaaaaattagcctggcgtggtggtgtgagcctgtggtcccagctactcaggaggctgaggtgggaggctcacttgagcacaggaggtggagggtagtaagccaagattttgctactgcactccagcctgggtgacagagtgagaccccatctcaaaaaaaaaaaaaaaaaaaaaagactatcattttccccttatgaatggatttaattatatcctacagtttttaatatgtagaactgatgatgaatttgccttattttatcttcaagctatgggctatttaaaagtatacttttagaaagtttctaaaattgttaccagaaattgtgatctgtccactttcttagaaatttgttacttaacactcgtctatatggttaatttttgaacktgtccacattttcttgaagggaagtctgtttctgtagttaaatctcatgttctatatgtttgcattkagtatttttttcatagttttaaatcttcatcctccctaattatttttatactttatttactgagagatatattaaatatcctactagaagcatggatttgtctgtctcctcatctgtcaacttttgctttttgaggctgtacttgggtgcatatgattcaaaaaatatacatctttttttaatttgaacttttatcaaaatgaaatgttttccttcatttatgtatgctttcaacattacgtatgatatagctatagtaactttggttagactttgcactgtgtatctttcacgtgtatgtgtgtarttttttcccactgtgctgcccaggctatagtgcaggggctgttcacaggtgttcacaggtggctcmctgctgccttgaactcctgggctcaaatgatcctcctacctcagtctttagagtgatgtgtgccaccaccgccaaataattgtttttatttctttagagwtagagtttggctatattgccaaggctggtcttgagytcttggtctcaggtgatcctctcacctctgcttcctgagtcactgggattacagacatgtgccgccaagcctrgctcctctgatacgtattttaataccttttaaaatcattcaatatctttgtattttaaatatgacttaaaaatagcatggaatgagattttaacaatttatccatctttaaytggattacttaktccatttgcatgtatttgtattctgacatacttrgattctgtatagatggtgagtggtgtgtatgtacatgcatatgtgtttgtgtcattttgtcactttctatttatcctacttatrtttctttttttcctttcttgccttcttttcaattggtgggatattttttcttctctagtcattttaagttctagtctttgtttatattcttttagtaactgtcatgctaatttaaatgtgcatatttaagttatgaaagtctaaaatttatcctcctcctgggtgataggataacttargaatactttcatcgcattaaactcctcttgagttatgctactacagtatattttcaactttttattttgacataattgcagattcacaggcggttttaagaaataatagaaatcccatatagtcttcactcagtttctcccaatggtaacatcttgcgtaactaccttkttcatatttcaccagttttatgtgcacttttagktttttttgtgtatttagtkctatgaaattttatcgtgtacatagattagatacctaaycaccatcaccatcgtcaagatayagaasagttccatcagaaggatggatcccttgtgctacccatcttatagtcacaaacacgttcctcactycctgacccctggcaaccactaatckgtttttcatctctgtaactttatttcaagaacacatgtaaatgaaaccatacactgtctgatattttgagattgagtttttttattcagcataattatcttgtgatccgtcaaagttgytttgatatattttatcatttttctttttatatttcatgggacattacttctattgttttatacgtttcacgtttgtttagttttatccatatattcacctgtctttttcctgctcttcatttcttcttatatcccagatcttccacttgagatcattttcttcctgcctgaaatctttttggtatctgtttagtaatggtttccttgggcgagctccctcaatttctgcacattttaagctctattatgttagtctcatacttaattttttttattgtggtataagaggcatacaggtaaggagatcatgaacgtacaactcaaaattttcacctagttaacacctaagaaatggatatgaccagcaacccagaagcctctcttctgtttcnttctagttgctgctcttacctcctctcgaggcagggtcatctgcctgccttagcctcccagagtgctgggattacaggcatgagccaccgagcctggcytaaaatgaccatcttgtcttttgagacagagtcttgctctgtcaccccagctggagtgcagtggcatgatcatggctcactgcagcctcaatctccctggctcaagcgatcctcccaccttagcctcctgagtagctgggacaggaggcacacatgccacacccagctcagtctactgggctcaagcaaaaggtatctcctattctgactttttacactatagattagttttcctattattcgctttataaatgcgatcttttcttttggcttcttttgtcagctttagacttgtgagttctatccatggtgttgcacatggccgtggtttgtttattgttgtgtgcattcagttttactaatattgcacaatatgtttatctgttctgctggtggctgrcattcaggttcttccaagcttgggtccattatgagtaatgccattataaacttttttttttttgagatggagtctcactcttgtcgcccaagctggagtgcaatggcgcaatctcagctcactgcaacctccacctcctgggttcaagcaattctccctgcctcggcctcccaagaagctgggattacaggtgcccaccaccacgcttggctaattttttttagtagagacggggttttgccacgttggccgggctggtctcgaactcctgacctcaggtgatctgcctgcctcagcctcccaaagtgctggaattacaggcatgagccactgtgcccggccctaaactttcttgtacttaccttttggtgcacacgtgtgtactttaatttgatctgtatctgggagtgcaagtgctttatagagtgtacgtacagttttaggagatactgctaaaaattttgcagtggctatatcagtttacactctgccagctgtggatgaatgttccagttgtttcccatccttctgttgtaggaaaggagtcctgatctagactccaagagagggttattggatctggtgcaagaaagaattcagggcgagtccatagagtaaagtgatagcaggtttattaagaaagtagaagaataaaagaatggctactctatagacagagcagcccgagggctgctggttacccattcttatggttatttctagataatatgctaaacaaggggtggattattcgtgccttttttttttttttttttaaagaccatgtagggtaaatttctgatattgccatggcatttgtaaactgtcgtggtgctagtgggagtgtagcagtgggaggaagaccagcggtcactcttgtcaccatcttggttttagtaggttttaggcagcttccttactgcagactgttttatcagcaaggtcattatgacctgtaccttgtgctgacctcctatttcatcctataactaagaatttcatcctataactctctgggaatgcagcccagtaggtctcagccttttttcccagctcctattcaagatggagttgctctttttcaaacccctctgacacttccatgtacttactatcgtgtcagcttttaaaaacttttagtctttctgatagatgtatagtagtatctcatggtgtttgtaatgtgaatttctgtaatgcctaagtagggaagggcatcttctcatgttttaatactggtcatttagttgttctctttgggaaagggcctgctcaggtctcttgcctagctttctattgggttacctgtcttcttgtttaaaattactgatttgtaggaattcttatattatggaccaaagttatttggtcatattctacccagtattctctgaatgattatttgaataaagatgattaattttgctatagtgcartttatcagtattttcctttatggataacgtttttggttgcaggggagttttgaactttctctcttttccctgaaggttcgataatttgagtctctgtaataaacttgacagtagccagattagcaggaacagtggcatacagcctgatgatgtgcgtatgcacaggagtccacgaaatatgagactcacagaagagccaggtggttgaagcttagctagcaatttgagctgcagaaagaaacaggagcttaaaggcccctggatggtagtggcgacaagctatgggagagcgaggggaggaactgcactgggaacaaaggctcttatgcagaaaaaagtccctcaggtagcagccttcagaataggtgaaaagtctgtctggtgtggtatcctgagtgtggagaccttttagtttcctctgtttccataggagtctggttaatgtagatcccaggaaggagggcagggtttatgacagacaacagcattcctcctgggggaacttctcttaatcaaataagtgaaacttcggagaaagcactgcctgtatttgctgcttcccaggtgctctcaggttgaagtctacagctgcatattttggggtatttttttgagcccaacatgatctttatgaaaaattttacctaattctatgttatcttctagaagccttttcacatgtagcctgtctatctggaagggatttttatgtatggtattgttaacagtggagcgtgtgcaggttcttggcatcttgaacagagaattggacaaaacgcacaaagcaaggaaggaatgaagggatttatagaaaatgaaactacacgccacagtgtggaagcagctctgagcataggggctcaaagttcctgttacagagtttttatgagtttaccctctacttgaggtacaccctatgtaaatgaagaggatgaagtaaagttacaaggcaatttacggcatacaccttatggagaggatatttcctgttatagctgaagtgtgaattggcctgatgttgcctgcctccagaccctattttcctgcctcagtatcaagtaggaaactttttcacatggctatccagttgactttggcaccgtttattaaaatgaccatcttttcttttttttgtgacgaggtcttgctctgtcacccaggctggagtgcagtggcatgatcctggctgactgcaacctccgcctcctgggttcaagcgattctcctgcctcagcctcctgaatagctgggattacatgtgcctggctaatttttgtatatttaatagagatggggtttcaccatgttggccttgaactcctgatctcaggtgacccgcctgcctaggcctctcaaagtgctgagattacaggtgtgagtcaccacgcctggcctaaaatgaccatcttttcttttgagcagagtcttgctgtgtcaccccagctggagtgcagtggcatgatcatggctcactgcagcctcaacctccctggctcaagcaatcctcccacctcagcctcctgagcagctgggacagcaggcacaacatgccacactcaactttttttttttttttttattagacatgaagtattgctatgtttcccaggctggtcttgatctactgggctcaggcaatcctccgctttgacctccagaagttctgggattacaagtaggagccaccgcacctggcccatcttcattgttcttcagtgtcacctttattataaatcaagtactatatacatgggcatgcttttggcctctgtaagttccttttttaaaattttccacaagttattaggggacaggtggtatttggttacatgagtaagttctttagtggtgatttgtgagattttggtgcacccaccacccgagcagtataccctgcacctatttgtaatattttattccttgccccctccacacccttacccccaagtccccaaagtccattgtatcattcttatgcctttgcatcttcatagcttagctccacatatcagtgagaacatacaatctttggttttccattcctgagttacttcacttggaataatagtctccaatctcatccaggtcactgcaagtgctgttaatttactcctttttatgaccgagtaatatgccgtagcataaatataccacagtttatttgtctacttgttgattgatgggcatttgggttggttccacgattttggaattgtgaattgtgccgctataaacatgcatgtgcaagtatcttttttgaataatgacttcttttcctctgggtagatacccagtagtggaattgctggatcaaatggtagttctacttttagttctttaaggaatctccacactgttttccatagtggttgtactagtttacatttccatcagcagtgtagaagtgtttcctgttcactgcacccacaccagcatctactgttttttgattttttgattatggcctttcttgcaggagtaaggtggtatcacattgtggttttgatctgcatttccctgatcgttagtgatgttgggcattttttcatatattagttggccatttgtatgtcttcttttgagaattgtctattcatgtccatagcccactttttgatgggattgtttttttcttactgatttgagtttgttgtagattctggatattagtccttcgtcagatgtatagattgtgaagattttctcccactctgtgggttgtctatttactctgctgactgttcttttgccatgcaaaagctcattagtttaattaagtcccaactatttatctttgtttttattgcatttgcttttgggttcttggtcatgaaatccttgctaagccartgtctagaagggttttccaatgttatcttctagaatttttacagtttcagatcttaggtttaagtcctcaatccatcttgagttgatttttgtataaggtaagagataaggatccagcttcattctcccacatgtgcataaccaattagcccagcaccatttgttgaaaagggtgtcytttccccactttgtttggtttgttgaagatcagttggttataagtgtttgggcttatttttgggttctctattctgtttcattgtttctatgtacctgtttttataccagtaccatgctgttttggtgactatggccttatagtatagtttgaaatcaggtagtgtgatgcctccagatttgttctttttgcttagtcttgctttggctctgcgggctcttttttggttccatatgaattttaraatttgttttttctaattctgtgaagaataatggtggtattttgatgggcattgtgttgaatttgtagattgcttttggcagtatcatcattttcacaatattgatcgtacccatccatgagcatgggatgtgtttccatttgtttgtgtcatctatgatttatttcagaggtgttttgtagttttacttgtagaggtattttgcccccttggttaggtatattcctaagtattttagtttttttgcagctgttgtaaaagggggtgagttcttgatttgattctccccttggtcgctgttggtgtatagaagagctactgatttgggtacattgatttgtgtacattaatcttgcatcggaaaaacttgctgaattcttttatcagttgtaggagctttctggaggagcctttagggttttcaaggtaaacagtcatatcatcagcaaacgataacagtttgacttcctctttaccgatttggatgccctttcttttgtctgatttctctgggtaggacttacagtactatgttgaggagtggtgaaattggkcatccttgtcttgttccccttctcagagggagtgctttcaacttttccccatttagtattatgttggctgtgggtttgtcattgatggcttttattacatgaggtatgtcccttgtgtaccatgtttgctgagagttttaatcataaagtgatgctggattttgtcgaatgcattttctgcatctattgagatcatgycatttttttttaaattttgtttgtgtggtgtaccasatttattgacttgcatatgttaaaccatccctgcatccctggtatgaaatccatttgatcatggtggattatctttttgatatgttgttggatttggttagctagtattttgttaaggattttagcatctatgttcatcaaggatatcggtctgtagttttcttttctggttatgtcgtttcctgattttggtattagggtgacttggtaccaattcttctttgaatatctggtagaattctgctgtgaatctgtctggtcctagactttttttttgttggtaatttttaaattaccatttcaatcttgctgctcgttattggtctgttcagggtatctaattcttcctgatttaagctaggagggttgtattttttccagggatttatccgtcttttctaggttttctacttatgtgtgtaaaggtgttcacagtagccttgaatgagcttttgtatttgtgttgtcagttgtaatatctcctgtttcatttcttaatgaggttgtctggattttctctcttctcttcttggttaatcttgctaatggtctatcaattttatttatcttttcaaagaaccagctttttgtttcatttatgtttcgtcttttttgtttgtttcaatttcatttagttctgctcggatcttggtaatttcctttcttctgctgggtttgggtttggtttgttcttggctctctagttccttgaggtgtgaccttagagtgtcagtttgcactttttcaatctttttgatttaggtgttcagggctatgaactttcctcttagcaccacctttgctgtatccaagaggctttgataggttgtgtcattattgtcattcagtttgaagaattttaaaatttccatcttgttttcgtttttgacccagtgctcattcaggaacaggttacttaacttccgtgtatttgcattgttttgaaggttcgttttggagttgattttcgattttattccactgttatctgagagagtgcttgatataatttcaatcttcttaaatttattgaggcttgttttattggcatctgcaagtttcattggttgatttttctatattttgtttggttttggaaataagtataataaaacacagtcctgctcttaaaatgcatacaatcagttaaatagctaatttcaacataatgtgatgtggaagaaaaacatattaaaattgtgctgtatttaaagtttcataatagaaatgttaatttctttactaaagtgacccttctactgcagcaggaagactgtttttataattgaaagatagtttgcgttttattacttggcttttctttatagtttactgtacatgaatatatccctaaacacgtattattataattctgcctgttttggggcagcatctaccttatagcactggctgagggctgagctgagcgtggctccaagggaatccagccttgggcagtaggtggcaatgttgggcaggcagatgaaggctccgggatgtctggctagttatggggactgagctgtgggcagaattccagtcctgcgtgaattaaggctggtccccaaaccaagtcgaagagacagaacagactggaggaggaggtgggagaggtccatgatgagagccgctgccatttatttagcattgtgtactgagctctgtgcagggcacctaacagcctagcatgcagcaactcagttcccaccacctgtacccctaccgttttttttttttttttttttttttttttttgcaaatcacgaagagaaagacagttggaatgtggcagaaccaggattctatcccagtctggctgtcctcacaactctgaatcatcaggtgacaacagtgtcttgctagaattgccagttgctgctgctcgggagcagctggtgcctgccctgcaggatggtgccatgggcctggctgagctgtggctcccagcacgatgctgtttcttccccaggtctgctcagtgctgcagttcagcagggtggaggctatgctgtgcatgccccaatctcttctgcctgggggtgtgggcagagctgctggccttcatctctctgcttgtttctccagacatctcctcctactctgatagagacaccctgtcttgggacatccccccattcattccttcacggaaagtcagcctatttttgtattttactttgtggtcatcttcataatatttcttcgtggcatcgacagcagtttgtaactggggattatctgattgttatctctctgccctgtggaactataagcttcctgaaggcaggggccgcatctgagctcactgttgtatcctcatagctttacatggcacctggcatccagaagccttacatatttacttgatgaatgaatatatgaatgacttccttcaactaattttgtctcttacttcctagttgccaggtggtataagacagcagggttatcatctaatatatatttgatgtgataagaaactaaagtcttgttgggaacttcagtctcaattggggcaaatcaagattttgtgattctgaagcagtttggggagttgtctttaagaaaaagaatgctgattataaacacaaaaaagattataaatctgtcttttagaatgccaaaaagtataattaaaaatataaaaagctgaccaatgtcacaaatgtcataacatttgaaaaataacatttattaactaattgtccaatatatttctataatatcttctcctatatattttggctacatgttattatgttacctttgtataacaattctgtcataataacttcagtggctggaatagaaagataattaagtctttctattaatatagtaattacacttttttctttagtctaaaaatgttagacttgcataaatgtcttgctatattatatgaagactacatttttaagctaataagggccaccagtgagggaaaggtttacatactttctttaccttctctgaattcgtcattaggtagtagcatgtttgatggtagattttcaactacaggaaaagcatggtacatattgctggagcatcagttttacttgttagtatatatgtagaaacatttttatattaggacaaatggaaacatcagagaatactgtgcaaaatgtataatttaaagctcaaacaccagacttcataaggctataattttgacctaatagcttgacacttttgaatctaagacaataatcctgatttccatcatagtctttccatttgtttgtaggtatttagttgaatttagtgatttattttttgtcctttttttcattccttaactgaaatttaaacataactttttatagaaataaaaaggatatacagaaaaatgcacatatcataagtttatggcttgctgaattttcacaaagtgaacccactggagcgagatgctgtctcaaaaaaaaaaaaaaaaaaaaaaattgccacaaccccagaagtacctcctcttcttcctttccggattcaatctccatgcttgccaaggaaaccacagccctgacttctaacaccatgggttagttttgccagcttttgaactctgtgtaaatagaagtatacagtatgtacttatttggatctgacttattttccccaacattatgtttgtaagattaatccatattgttgtagatagttgaagatccttctttctcattgctgttccattaatatagcaccatttatttattccagtattgataaacatttgtatagtttcttgtttttggctattatgaatagtacctctaggctgggcgtggtggctcacgtctgtaatccgagcacttagggaggctgaggtgggtggatcacccgaggttgggagttggagaccagcctgacaaacatggagaaaccccatctccactaaaaatacaaaattagccaggcgtggtggtgcatgcctgtaatcccagctactccggaggctgaggcaggataatcgcttgaacccggatggcggaggttgcagtgagcagaggtcgcaccattgccctccagcctggcaacaacaaaagccaaactccgtctcaaaaaaaaaaataaaataatacctctatgagcattctagtacatgtttgttggtaaacatatgtatgtatttctgttgagtgtatcgctaaaagtggaaatgttaggttatatggtatgtatgtgactgactttggctagatattgccaaacagttgttcaaggtcgtgacttataatctcacccacagtgtaaggaagttcttttaatacattgcatgattgtatgagagatctcactgttccatctctttactgrcacttggtattttctgtccttttaattttagactttgtagtacctgtgaaagctgtttgtcattgtggttttaatttggatcgtagtttattacagacattttcaaaaagattctgcttcacaacttgtttttggtattgagtcaatgtttagaatgtcatatttggaaagacctctatcaacttttttcatgtataagctttaagatttcagggtatttcccatatgaaggagtctgatggaataaactatggtatggacaatggagtaccacgcaactatattaaaaaataaataggatgatctcagtgaactgatggggagtgattttatatgatatataaaatgaaaactgcaaaaggtatagctagaatgatgtatataccttttgtgcatatgtatatttatagtatataggttttgcaaaaaataagcaaaaggataaatgaaacatgaatgaaatgaaatacccacaacaggaggtgagtgggaatgaggtggaagggataggtgagggaacggggcttaaagctgcctataaaagtaactttaacacgcttaacaggtagctgctaaaccacgctaatgttgtaccgattcaaaactaaacatttacaaagacggaaaaaactgaaatatcatacaaacagaagcaagtagacctagtttattgacaagccacacagatattcattgaacttgtaaacacatttttcagactccatatgtttattggtatatatattctaaagacacagaccgtaaaggcctactgaacattactcagtctcttggtagttttgataytattttgtatgtattctgggattgaacaattgagaaactatatcgatgcttttggaaaacaggattctcactgcggaagaaagaatatgtaaatayggaaggaagaaaacaatatagtcatgttggatttgaactggagtgaatagtatgaatttatgattaaaaaaaaaatcctgactgtccactgaaaagtctagaaacaatgattgcccagtaggaatgagcacacagtgtgagacctcagttgctaaatatatttcccattaacagaagtaggagaaatggcttagcaaattggatgatcctggtattggggcatgaaaactacaaggtgagcctagaatattcggtgtgccacgaaagcaaagaggtgctttaaacatctctggggagtggctgacacggtggtttacacctgtaatcccagcactttgggaggccgaggtgggcggatcacttgaggtcaggagttcgagaccagcctggccaacatggtgaaaccttgtccctactaaaaatacaaaaattagccggacatggtggcaggtgcctgtagtcctggctacttgggaggctgaggcaggagaatcgcttgaacctgggaggcggaggttgcagtgagccgagattgcaccactgcactccagtctgggagacagtgacactctgtctcaaaaaacaaacacccccctgccaaaactctagggagtggtaaaagtatacagaaccagcttgaagggtctcccactagccaaatttggaagcatttgagcatcaaaaagaataatgttaataccttcgcagtggagagatctggcaaactccactgtaaccaagtcatcaagcttagaatcactaataatgaaacacaccaacatcacatgccacctgatatgatgtagtggaaaatatacagtatcatctatgtattctttttgctaaaagtgtttaatttgaatataattatgcacatacaatcagacaaattgtagcatattccagaacacaactggcctggactcttaaatgtgaatgtgaaagacaacgaaagatgggcatctgttctagaataaaggagacagacacaccagctaaatgcagtttatgattcttcattgaatctgatggattgcagagaaaaaaagaaacctagctaaaaagaaaaaggacaattgggagaaatttgaatatggactacatattcgataatattaagtcaagcttttcagtgtaatggtattgggttatataggagactgtctcaggatatacatgctaaagtacttagagaagcattatgatatttgtaacttaaatggttctgtgaaaaataaaagtgtacacatatcagaataaagcaaatgtggcaacattttaagaattcattgcaatattcttttatctttctgtaggtatagaatttttgaaataagttagaacagtgatttcagggcattttaaatatttttgtgcagtgactaatccccgtatctctttaaattaaggatactaatttaccattttgtcatctatggttccctaataggaaacctgttaatataactcatggtattaataaatccaaagaatgatgaagaggcattcataagtctaaatcctttctagtttaaaaatacttttaaagtaggaaaatacagatgattgccttacataataaaattatatatatttcattctaaatgctaacatcatgctttaaggtagcagaacctagaagcattcttattaaagacagggtcaataaaataaataatttctactgtcattattattattattattwtttttttttttgagacagagtctcgctctgttgcccaggctggagtgaagtgtcatgatctcggctcactgcaacctccacctcttaatcttaatccatttaaatgtgaaaggcaaaacaaaaacttttggaagatatgtcagtgaaggggtagcctgtcgctccacacctgtgggtatttctcatcaggtgggacaagagactgagaaaataaataagacacagagacaaagtatagagaaagaacagtgggcccaggagaccrgtgctcagcatacggaggacctgtaccagcaccggtctctgagtttcctcagtatttattgattactgttttcactatctcagccagaggaatgtggcaggagaacagggtgatagtggggagaaagcaagaaaacatgtgaccaaaggaactctgtgtcacaaataagttcaagggaagatactatgcctggatgtgcacgtaggccagatttatgcttttcttcacccaaacatctcagtgtagtaaagagtaacagagcagcattgccgccagcatatctcgcctccagccacagggcggttttctcctatctcagaatagaacaaatgtacgatcggattttataccgagacattctgttcccaggggcacgcaggagacagaggccttcctcttgtctcaacctcaagaggccttcctcttttactattcctcctcagcacggatcatttacaggtgtcgggctgggggatggtcaggtctttcccttcgcacgaggccatatctcaggctgtctcagtggggagaaaccttggccagtacccaggctttcttgggcagaggtacctgcggctttccgcagtgcgttgtgccccctgcttaatcaagaacggagaatggcgatgacttttaccaagcatactgcctgtaaacatattgttaacaaggcacatcctgcacagccctagatcccttaaaccttgattccacacaacacatgtttctgtgagcacaaggttggggctaaagttacagattaatagcatctcaaggcaaaacaattgttcagggtacagatcaaaatgcagtttcttatgtgttccttttctacatagacatggtaacagtctgatctctcttttccctagagtcagaaaatacatttctaaacttgggataggaaataacattttcacaaaggtaaactgtaaagaaagtgaaataataagacacaatcctgcagaagttctatatttgcaacatatctaacaggattagatttcagactacataaagaatttctacaagtcaattaaaatacatccagtgaaaaaayaagcaacatatggacaatagacattttgcagaagaagcaatttggcaaataaaatcacgggaaggcattaaagctgtttggaaaacagggaaataagaccatcgtaagatacgattttgcatctacaggactggcaataattaagtctgataatggattatgggtcagtggaaactcatacttctggggaaagtggaaattagtataatcacttcgagaaacaatttgacattatcacataagtttgaatatttgtgtagctattgactaatagatttcactgctatgtctaggccacaaagaaaccttcatgtggataccaagaaaccaagaatgttcatagctgtatggtctgcagtagcaaaaacctagaaatgaccacatgcccattgtgaggagcctgagtacattatggtatattcacatgatgaaatataacacagcaatggaaaagtgtgaaccacggctactcacaacttgatatatcccagtaacatgacatttaataaaacaagtctcaaaatcataccatttgataccattgttatagtggcattagcattgtagcagcaaagccaaacaatacggaagaattcatattacaatgttatttcacttttataaatcatagggataatgtatgcaaaactggtggtggtgtctttgggggttattcagggcaataggatggggccagcacacaagtggggccactggtattagtaatgttctggccttcagatgggggctggttcccagcatgtgccttttacattttattagggatggggtccacacacccttctgatgtgaaatgtcatgataatgatgaaggaaaamtaaataagaaatagcctctgtatataaagagtaatcagagttaatataggaagggaacttcctagataaaatgctaggagtaaatttcatgggcagtgtgcaagagcattgtgaagacattgagagtctgccgagagccacaaaggaaacttgaacaaaaagtcacaatttgttcttagaaaaatttattctcgatggattgataggtgcagcaaaccacatgggacatgtttacctacgtaacaaacctgcacgtcctgcacgtatattccagaatttaaaagaacaatttattcttataaagatgtcaattctccctgacttcataggcttaacattttataacaattttagagttttttccccaatctggacaagctgagaactctcagcaaatcttaaacgatttgaggaggaggacattttttaacgaaaagaatacaaaattaagaaaacgaaattaggtagaaaagctaacattaactaaaaacaagaaaataaattacaaatatttaaaagctgacaaatataaaacattaccaacttaaattcagaaaaatatttttattaatcgactgcttgatacacctgttatatttttcattttactaactgaattatcaaatctacaagcttatttgctacttctatttgaagtttgtgtctttaattactgcttttcattagatctgaaatttttttataatttgcttttttttttttttttttgaaatggagtcttgttctgtcacccaggctagagtgcaatggcatgatctcagctcactgcaacatctgcctcccgggttccagcaattctcctgcctcagcctcctgagtagctgggattacaagcgtgtgccaccacaccgggctaatttttgtatttttaatagagatggggtttcaccatattggccaggctggtctcgaacttctgacctcgtgatctgcccactgcggcttcccaaagtgctaggattacaggcgtgagccactgtgcccagactataatttgctgcttgatgtcagaataatttctattaatttcattgttcatctttaatcaccattgtttcatagtccagtaattttctgtattttctgttaaactcttcatatgtctaaatcaggaatcagacatttttcatttttttttctaaactagcctaaaattgtttttctaaattgcagttaaaatggcatatttgacctttggtaacttttaaaatattgacatataattaatataccacaaaactcaccctttaaaaatatgcatgattcggtggctttttattatattcacaaagttgtacaataatcaccattatctatcttcaacattttcatcacccccaggagaaatctcataaccattagaaaccattctcccttttcctcttcttccagccctttgcaaccactaatctactttgtctgatttgcctattctggacattttgtatacatagaattatacaatatgtgaccgtttgtgcaatgtttattaaattttgaatgaactctctattcatgctcaggtgttccttctgagtcagaaaatatattttagagtctttaagatgttgtgtactttgtgctacaagatctcaatgctttataatgggcaaaccacctcactatccttagacccttgaatactaagttggcatgggtgattaaaatactacatgtaatgtaaaagataaattcaagaagaacgtgtaacttggaaaatctgaagtagtcagcaactttagggactgggaaggcagctttcccagggataactaagtgataaagcgaactgygtccagaatatattttaagtacttactaatgtgaaagcattgtggaatcttcacgtcttctaaaagtcacgtttttacgtgactgattgcaaatgcaacataaggttaaagttgctcagaacttatttcattctgttgaaaagacaaaactgcgtttgaattattcttgtgtatactttaatttcagatgaattttgacagttaaaagttggtttgctgtagaacatgatttttctgttttagagtagcacacgataatggcatacataaagcaatttgctactggagaatttgtagcaatatttgatgtttggtttatttacttatttgagttcccactttattttgtacatattttcccttattttgattaattctccatgagctattttggataaataaaagtcatatttgtccttctacctttatagttttccaggcactcatgtaaaaattgatcaaatctagaaatcaattgggtgattcctagaaatttctgttacttgaagaacacaactttttcattgtgatctctgatgaataaacctttttcacttaacaattcaataccttcctgttgggagcaggccccccaaaatctggcgataaaccagccccaaaactggccataaacaatctctgcagcactgtaacatgttcataatggccctaacgcccaagctggaaggttgtgggtttacaggaatgagggcaaggaacacctggcctgcccagggtggaaaaccgcttaaaggcattcttaagctacaaacaatagcatgagcgatctgtgccttaaggacatgctcctgctgcagttaactagcctaacctattcctttaattcggcccatcccttyctttcccataagggatactttcagttaatttaacatctatagaaacaatgctaatgactggtttgctgtyagtaaatacgtgggtaaatctctgttgggggctgtcagttctgaaggctgcgagacccctgatttcccacttcacacctctgtatttctgtgtgtgtgtctttaattcctctagtgctgctaggttagggtctccccaaccgagcttgtctccacaccttccactgttcttcttagtacttcagcataatactgtatgttccttctttgtcctgcaagacaacggtaaagtgcattataattaatttatgtgtaatccaagtaaacaagcctcattgtgttgtatgtgtcttaygattaagagctcaatacatttaatctagtctgacagtttgcctggtgtaagtcatgtgtgtcttgttaaaaaaaatttaataagaacaaaacaactggggggaggagccaagatggccgaataggaacagctccggtctacagctcccagtgtgagcgacrcagaagacgggtgatttctgcatttccatctgaggtaccgggtttgtctcactagggagtgccagacagtgggcgcaggccagtgggtgcgcgcaccgtgcgcaagccgaagcagggcgaggcattgcctcacttgggaagcgcaaggggtcagggagttccctttccgagtcaaagaaaggggtgacagacgcacctggaaaatcgggtcactcccacccgaatattgtgcttttcagaccggcttaaaaaacggcgaaccacgagattatatcccacacctggctgggagggtcctacgcccacggaatctcgctgactgctagcacagcagtctgagatcaaactgcaaggcggcagcgaggctgggggaggggtgcctgctattgcccaggcttgcttaggtaaacaaagcagccaggaggctcgaactgggtggagcccaccacaactcaaggaggcctgcctgcctctgtaggctccacctctgggggcagggcacagacaaacaaaaagacagcagtaacctctgcaggcttaagtgtccctgtctgacagctttgaagagagcagtggttctcccagcacgcagctggagatctgagaaccggcagactgcctcctcaagtgggtccctgaccactgacccctgacccccgagcagcctaactgggaggcaccccgcagcaggggcacactgacacctcacacggcagggtattccaacagacctgcagctgagggtcctgtctgttagaaggaaaactaacaaacagaaaggacatccacatcgaaaacccatctgtacatcaccatcatcaaagaccaaaagtagataaaaccacaaagatgggaaaaaaacagaacagaaaaactggaaactctaaaacgcagagcacctctcctcctccaaaggaacgcagttcctcaccagcaacggaacaaagctggatggagaatgactttgacgagctgagagaagaaggcttcagacgatcaaattactctgagctacgggaggacattcaaaccaaaggcaaagaagttgaaaactttgaaaaaaatttagaagaatgtataactagaataaccaatacagagaagtgcttaaaggagctgatggagctgaaaaccaaggctcgagaactatgtgaagaatgcagaagcctcaggagctgatgtgatcaactggaagaaagggtatcagcaatggaagatgaaatgaatgaaatgaagtgagaagggaagtttagagaaaaaagaataaaaataaatgagcaaagcctccaagaaatatgggactatgtgaaaagaccaaatctacgtctgattggtgtacctgaaagtgatggggagaatggaaccaagttggaaaacactctgcaggatattatccaggagaacttcccaaatctagcaaggcaggccaacgttcagattcaggaaatacagagaacgccacaaagatactcctcgagaagagcaactccaagacacatatttcctcataattgtcagattcaccaaagttgaaggaaaaaatgttaagggcagccagagagaaaggtcgggttaccctcaaagggaagcccatcagactaacagcggatctctgggcagaaaccctacaagccagaagagagtgggggccaatattcaacattcttaaagaaaagaattttcaacccagaatttcatatccagccaaactaagcttcataagtgaaggagaaataaaatactttacagacaagcaaatgctgagagattttgtcaccaccaggcctgccctaaaagagctcctgaaggaagcgctaaacatggaaaggaacaaccggtaccagctgctgcaaaatcatgccaaaatgtaaagaccatcaagactaggaagaaactgcatcaactaacaagcaaaataaccagctaacatcataatgacaggatcaaattcacacataacaatattaactttaaatgtaaatggactaaattctccaattaaaagacacagactggcaaattggataaagagtcaagacccatcagtgtgctgtattcaggaaacccatctcatgtgcagagacacacataggctcaaaataaaaggatggaggaagatctaccaagcaaatggaaaacaaaaaaaggcaggggttgcaatcctagtctctgataaaacagacttcaaaccaacaaagatcaaaagagacaaagaaggccattacataatggtaaagggatcaattcaacaagaagagctaactatcctaaatatatatgcacccaatacaagagcacccagattcataaagcaagtcctgagtgacctacaaagagacttagacacccacacattaataatgggagactttaacaccccactgtcaacattagacagatcaacgagacagaaagtcaacaaggatacccaggaattgaactcagctctgcaccaagtggacctaatagacatctacagaactctccaccccaaatcaacagaatatacatttttttcagcagcacaccacacctattccaaaattgaccacatacttggaagtaaagctctcctcagcaaatgtaaaagaacagaaattataacaaactatctctcagaccacagtgcaatcaaactagaactcaggattaagaatctcactcaaagccactcaactacctggaaactgaacaacctgctcctgaatgactactgggtacataacgaaatgaaggcagaaataaagatgttctttgaaaccaacgagaacaaagacacaacataccagaatctctgggatgcattcaaagcagtgtgtagagggaaatttatagcactaaatgcccacaagagaaagcaggaaagatccaaaattgacaccctaacatcacaattaaaagaactagaaaagcaagagcaaacacattcaaaagctagcagaaggcaagaaataactaaaatcagagcagaactgaaggaaatagagacacaaaaaccccttcaaaaaaatcaatgaatccaggagctggtttttttgaaaggatcaacaaaattgatagaccactagcaagactaataaagaaaaagagaagaatcaaatagacacaataaaaaataataaaggggatatcaccaccgatcccacagaaatacaaactaccatcagagaatactacaaacacctctacgcaaataaattagaaaatctagaagaaatggataaattcctcaacacatacactctcccaagactaaaccaggaagaagttgaatctctgaatagaccaataacaggatctgaaattgtggcaataatcaatagttttccaaccaaaaagagtccaggaccagatggattcacagctgaattctaccagaggtacaaggaggaactgaactggtaccattccttctgaaactattccaatcaatagaaaaagagggaatcctccctaactcattttatgaggccagcatcattctgataccaaagccaggcagagacacaaccaaaaaagagaattttagaccaatatccttgatgaacattgatgcaaaaatcctcaataaaatactggcaaaacgaatccagcagcacatcaaaaagcttatccaccatgatcaagtgggcttcatccctgggatgcaaggctggttcaatatacgcaaatcaataaatgtaatccagcatataaacagagccaaagacaaaaaccacatgattatctcaatagatacagaaaaagcctttgacaaaattcaacaacccttcatgctaaaaactctcaataaattaggtattgatgggatgtatttcaaaataataagagctatctatggcaaacccacagccaatatcatactgaatgggcaaaaactggaagcattccctttgaaaactggcacaacacagggatgccctctctcaccactcctattcaacatagtgttgkaagttctggccagggcaattaggcaggagaaggaaataaagggtattcaattaggaaaagaggaagtcaaattgtccctgtttgcagacaacatgattgtatatctagaaaaccccattgtctcagcccaaaatctccttaagctgataaacaacttcagcaaagtctcaggatacaaaatcaatgtacaaaaatcacaagtattcttatacaccaacaaaaacagagagccaaatcatgagtgaactcccattcccaattgcttcaaagagaataaaatacctaggaatccaacttacaagggatgtgaaggacctcttcaaggagaactacaaaccactgctcaaggaaataaaagaggatacaaacaaatggaagaacattccaygctcatgggtargaagaatcaatatcgtgaaaatggccatactgcccaaggtaatttacagattcaatgccatccccatcaagctaccaatgactttcttcacagaattggaaaaaaactactttaaagttcatatggaaccaaaaaagagcctgcatcgccaagtcaatcctaagycaaaagaacaaagctggaggcatcacactacctgacttcaaactatactacaaggctacagtaaccaaaacagcatggtactggtaccaaaagagagatatagatcaatggaacagaacagagccctcagaaataacgccgcatatctacaactatctgatctttgacaaacstgagaaaaacaagcaatggggaaaggattccctatttaataaatggtgctgggaaaactggctagccatatgtagaaagctgaaactggatcccttccttacaccttatacaaaaataaattcaagatggattaaagacttaaacgttagacctaaaaccataaaaaccctagaagaaaacctaggcattaccattcaggacataggcatgggcaaggacttcatgtccaaaacaccaaaagcaatggcagcaaaagccaaaattgacaaatgggatctaattaaactaaagagcttctgcacagcaaaagaaactaccatcagagtgaacaggcaacctacaaaatgggagaaaattttcgcaacctactcatctgacaaagggctaatatccagaatctacaatgaactcaaactaatttacaagaaaaaaacaaacaaccccatcaaaaagtgggcgaaggacatgaacagacacttctcagaagaagacatttatgcagccaaaaaacacatgaaaaaatgctcatcatcactggccatcagagaaatgcaaatcaaaaccacaatgagataccatctcacaccagttagagacaacaggtgctggagaggatgtggagaaataggaacacttttacactgttggtgggactgtaaactagttcaaccattatggaagtcagtgtggcgattcctcagggatttagaactagaaataccatttgacccagccatcccattactgggtatatacccaaatgactataaatcatgctgctataaagacacatgcacacrtatgtttattgcggcattattcacaatwgcaaagacttggaaccaacccaaatgtccaacaatgatagactggattaagaaaatgtggcacatatacaccatggaatactatgcagccataaaaaatgatgagttcgcgtcctttgtagggacatggatgaaattggaaatcatcattctcagtaaactatcgcaagaacaaaaaaccaaacaccgcatattctcactcataggtgggaattgaacaatgagatcacatggacacaggaaggggaatatcacactctggggactgtggtggggtggggggaggggggagggatagcaatgggagatatacctaatgctagatgacgagttagtgggtgcagcgcaccagcatggcacatgtatacatatgtaacctgcacaatgtgcacatgtaccctaaaacttaaagtataaaaaaaaaaaaaagaacaaaacaaccaatatgtatatattttggaatagactggccaagatcttataactatttgctcatattttttataatacctgtttaggaaacatttaaacaaatcctttatgttctgcttgattctctgtaaataggaatcatgattttggaggcagaaaaatttgcaacttcacagtgttgctgtgagttgctcattgtgacaggcaaggatgaaagttcaaggtacttagggacggaagtcaacacattcattgaaacaaggctgtgctgactgtagaaattgttttctgtttggaaggttttgttttctgttgggagtattctgattctcagtcttacttctyttctgttattaccaacattttgttggtgatcatgattcttaatgaaacagttctgcataccatttcaaccatcagagtttttagtctccattgttttataggagtgttcttgacattttgaggctcctgccaatcttcattctttcaatttccttttttggtttccactaagataccttccgttgagtttaaattttagaatgatcaataattgtggaaaaaaattcatctgaaattgagacacacacaaaagcaattcaaatgcatttaaaaactgccactgtgttcagttgagccctgtaattgtgtaaccaaattattcttgtactgtaaatattgaattattgatgggatacatgtgggcgtttttcactggaacatttgtttcttcaggccactttgctatattggtggcaattttgcatgctgctttatctggaactgtcagactttgtggggacaagatgtgtcagataagttcaggtgtgcataaatcaggcagcctcatcccaagttgtacttactatttgttgtaatatttggtgtttgtgtcctacaaacccaggaattttcacaaattttatttcatgtgatttgctttaaaaaaaaaagcgtggtgtgtttataattatgtacactattttttgagtatctttcttgacaggtgaaaacttttattttaactaggtatcaataagaaccaaattctctgcttaaaattgtaaaactttggtgtttgggtgtttgcccgaaatgtcaggtcagggtttagatgccaatcctgccggtttcttgccctgaaaaccactgagctgtatgatttaagtcagtkaatttatagtgtgcagatttcatctgaataaagctgtttaaaaaaaagttcagagaagatgttttttactgagctctgacccaaaccaggatcacccttgtgtgtatcaggtgctggggctgggggatctggacaccaaagcacttctctgtgcctggaaaattcctatttgcattttccagcagctcaggtgtcatctggatgaaaatgttcctcgatgtctgagacagagtggcccaccctcctggtttgtatacctctgcttgcctctctcckgtggaatggtaccttgttgttgttctgtgagttgtttgtytccctctgtctcccttaagacctttgctgctgtggtgcccagcaggaaatacayacacacacacacacacacacacacacacacacacacacacacmcacactgttcttacgtgcctgatatggtggactcattaaaggctggggtggcagctctgggggagttaatttgctttatccccatagggagaaagctcagtgtagaaaatgctgtgttctcttcctcacagctgctgacttcaggatactggtcagcctctgtttcttcgtagtggtttttagacttgcatgtgcattggaatgacctgaaagtctgttaacacgtgaaatgcttggccccagcctcagagtttgggtcagtaggactggtgtcagaactgataatttccatttctagccagttcccagtgataagccaggaaccctgctttgaaaaccacttggcccccctgccagggctcacttgtcttgggagagggcttgtgaaggcccctctgtttgtgcagtttggtggtttgcatcaggctctatggctgaagttggaaccttcaagaggcccccctagatccatgtcactagtctagtctgaatgactgtctagggatttccagactttgctttccagacctcctaaatagaatggagtcacctcagggtgactgatcagggaggtggtgtgggtgatgcttcagacctcaccttctcaccagatcagctctgtttttatgtcttaggcacgaggatcctataggtgaacttgtttggagaatgagttcctatgcgggggaagaaccccacatttttatggtaacaacctggattctgggccctacaaagtgagcagcttgtgaaagccctgagatttcctctgagctgcaggtcccagaaagccagagggccagaatgcctcttggttgctaagttgtatttttttcatttcagagagagctacaactccaaattcagcatagctttgtggttcagatgctgaagtcagacagagttgggttcaggtcctggccctgcccctcctagctgggcacgctgctgcttctgggaggcctttgtgtctgtgcctgtaacatgggccatgattctctgccttccccatgggctgctgtgagtcttggatgaaatcttttggaagtaaagctcagagtcgcaaagaaaatgagcacttaaaggatttctcagcaaggcaaaatttacttctgcagaagggtgctgctcgcaagtttggtcaccatgagagcacaccgaacgaaggagggaaggggtttttatccctaacacagtgtgtccctgctgctgtgtcctatctccactgtggagttggaccgtacaatctaagcagaacctgattggctaacttgaatggtgcaggaatgtggttacaatgggggaaggggcagttttggtgggaagagccattgcgacaggaggggtaatttacagagcgggtagcagatgtgggctctgtagataaggaccagtgggaaagttgtttactgaaactgagacagggaggcataaaggataaggaagttagtttggccttggaagtagggaacgaagagcaaggatgctgaacaagctaaacctttgaagaggaacttcttttgtatctaacagattgtagatcccaaacacttggcacagtatctgacccatcatcagtgctcagttaaatattagtattgtcatgatggttttgttattgtagtgaaaattagaacattattcttaaaggatcaataatttttaaatgaaataaatatgaagacctacttgaaatctcagaaaaaatttcaatagttcatggattttttttttcctgtactgggcaaaattgatttttcattttaaaaaaatagagaaaggggtcaggtgcagtggctcacgcctgtaatcccggcactttgggaggccaaggtgggcaggtcacttgaggtcaggagttcgagaccagcctggccaacatagtgaaaccctgcctctactaaaaatataaaaattagccgggcccagtggtgcacgcctgtagtcttcagctacttgggaggctgaggtgggagaatcacttgagcataggaggcagaggttgcagcgagccaagattgtgccactgcaatccagcctgggcaacagagtaagactgtctcaaaaaaataaattaaaaaaaggggaaggaaaatgaattaaaggaggatttacktaactaaaagacagttttaaaagaacaactgccgacactcataacattagcagcaatcgctttagcattttgtgttgattgctttgctccaccaagaatatctgtgaaacactcataatgctcaaagttttttttttttttaatcttcaacttttaagttcaggggtacatgtgcaggatgtgtaggtatgttacataggtgtcatggtggtttgctgcacagatcaacccatcacctaggcattaagtctagcatccattagctattcttcctgatgctctccctccccacccacctccccgacagaccccagtgtgtgttggtcccccccatgtgaccatgtgttctcatcattcagctcataagtaagaacatgtagtgtttggttttctgttcctscattagtttgctgaggataatggcttccagctccatctatgtccctgcaaaggatatgatcttgttcctttttatggctgcatagttgtaacatcaaagttgatgcatcttattattgtgatcttttcagacagggtcttgctgtgtcacccaggctggagtgcagtggtgcgatcatgactcactgcagccttgacctcccaggctcaagagatcctcccacctcaacctcccaagtagctgggactacaggtgtatgccaccacacccagctaacttttgtcgcagcagattttcgccatgtttctcagtctgttctcaaactctgaggctcaagcaattctcatgcctcaccctctcaaagtgctgggattacaggtgtgagccactgtgcctggccccatcttatttttaaatgaagttttaataagatctcagttgtatgcttcatctcaagtgattattcagctccaaaacaaatcaagttccttccaagtacaaaagaatctatgttctaaggcagtggaaggaagcagggttggggaggatatatcatgttcaaggaaaatgaaaagaacttaatgttttgaaagacttctagtcaamggaactatgactcattatcctggatgtgatgggaggtggggggcatttaagcccacattcccacttccattttaaagtcagaatcaggaggaaaatggggattgagataaagaattttgctgtatcacagtttggctgaaaggcgttctgcctagcaaggatgcaggtgatttacacacgatctactcttgaagcttaaaccagtacttctatgatacattttttggggggggggcggtggtgggggtaaagggaggaaacaaccaggatgaggattgaatatatttgaaaggagattcaaagtgatgtttattgagcacttcactttggaaaagcaaaaaatcaaaggctgtcttaaagattgtacagaaaatatgatttattggagatatcccttgcctccaagctctaatrttaagcctccaaatataatgcaagttatattggtatagaaaatgggaaggagcaggcagatttattatgtatgagcatgaataatttttatctttattgctttcccacttcagatcaagttggaatttttaacttttcaccaaagattctttggttttacagaaaatataccacaggtacatgaaatgtaatatatttattgtataggtttttaatagtagaaagtaattttatagttaggcagtttaaaattaaaattatagtttagtggtcataagagttagatcattgtgtggtaacctgtgagtgtgtttatttagcaatgatggtgaccatgaagggactcgctcaggccatttaggagaatatccgacaagccagaaggaagatgattttaataaccaggaaaaacgtaaaactcattatagatttgtataataagggcgagttcggggtagtataggcttctaatgtacagtgacaatctcgctctgtygtccaggcaggagtgcaatggcgcgatctcrgctcactgcaacctccccatcaccctcccgggttcaagcgattctcctgcctcagcctcccgaatagctagccgggactacaggtgtgtgccagcacacccggctgttttctatttttagtagagacggggtttcaccatgttagctaggatggtcacgatctcctgaccttgtgatctgcctgccttggcctcccaaagtgctgggattacaggcgtgagccaccgcacctggcttactgtagacatctttaacatatcacaatcttccttcaaataataccccactgcttgatsttatgcacaagaaccttacgacagtattcttccaggccccagactctgtgctgttgttatcctctatgttgcttttgcatatcctattaacctcacaaaacgttgttatttttgttgtaggcagacaacatattttatatttacccacatacttgcctttgttagggctctttgttactttgtgtagatccagatttgtatcttgtatggtttctcttctgcctgaggaacttcctttaacattttgtatggttcaggtgtattagcgatgagctctctcagcttggtttatgttaagcttttattttgcctttatttttatttttttgagacggagtcttgctctgttgcccaggctggagtgtgctggcatgatctccactcactgcaacctccatctcccaaattcaagcaattctcatgcctcagcctcccgagaagctgggactacaggcacccggcaccacacccggctgatttttgtacttttagtagagatgggattttaccatgttgtccatgctggtcgcaaactcctggcctcaggtaatcccttcgccttggcctcccaaagtgctgaggttataggcgtgagccaccatgccyggccttgcctttattttttaaagataatgtcactaggtaaagagttctagtttgacacactttccttctgagtactttttttttaatatttaaaaaattggtttcttttacatttttaattgacttttttggcccatatttatggggtatatagtgatgttttggtgcataaagtgtacagtgatcgcatcagggtaattagcatatcgtctggaacattattttgggagggtgaacattaaatattctctttctagctatttgaaactatgtattactgttaactatagtcattctacagtactgtagaactctagaactaattcctcctatctagctgtaattttgtatcctttagcaaacctcttcctatctctctgctccctttacccttcccagcctctagtatcctctgttctcttttttacttctgtgtgatcaacattttttttagcttctgtattagtctgttttcacattgctatgaagaackgcccgagactgggtaatttaaaaagaggcttaattgattcatagttctgcatggctgaagaggcctcaggaaacttacaatcagggtgaaagaggaagcaggcatgtcttacrgggtttcgccatgttggccaggctaggtctcgaactcctggtctcaagtgattggccagccttggcctcctaaggtgctgggattacaggcatgagccaccatgccaagccttttgtagttttttgaggaacctccatactgttttccatagcggctatactactttacattcccaccaagagtgtttaagagttcccttttctctacatcctcactagcatttgttattttgtcttttgataatagccatcctccagtgaggtgatacctcactgtgatttagagttgcatttccctttataattaataatgttgagcatttaaaaaatatatttcttggccatttgtttgtcttcttttgagaaatgtctttagatcatttgcctatatttaagttgcatagtttgagaatacaaacaaatggaaagacatcccatgctcatggatcagargaattaatttttttgaattaagcagaaattttatttccaagctctttaaagattattgcaaacacaaagttgtcttctgaaagccccaaatcaaatcaaaggcacggcatcaaaataaataaaacacttgtgacattaagaattattttaggttgtagtattttacattactttgtttttaactatttacaatgttcttcgagtcatatttaaacatttcttaagacatgaaataggccgagcatggtggctcatgcctgtaatcccagcactttgggaggccaaggtgtgtggattgcttgaggtcaggagttcgagaccagcctggccaacatggtaaaaccctgcctctactaaaaatccacacacacacacaaattagctgggcgttgtggcatgtacctgtaatcacatatcacagttacttgggaggctgaggcaggggagttgtttgaacccgggaggctgaggttacaaggaactgagatcatgccactgcattccagcctgagtgacagaatgagactctgtctcaaaaaaaaaaaaaaaaaaaagatacgaaataatgtatttaggtacaaccacaactacaagcagaaaaacttaagaatacaaagactgaatctgcttcatctaatctatatatacgatggggcaacctaatgcccaacataaaattaatctttctggatgagtttgctaagaaacagctcccgtgttaagtgttaaaaaatgaaacaaccttctcatttggaaaaatcaaggcatcagttaattagtaaaacctactcttttccccagcaatttgtactttcttgccttcatttagaaattgtaaattcatgagcagaacacattttgtagaatttggtataaaaatatttgtcaggagcaacagataacaaatattcaattttttaaataaaatgttttccttcctaaatgtaaacatccagtaaataaaacatacatgatattctaggtatagaaacatcagtaattcacttatgaaagaggtacattttgacgtatctggtggtaaggtttttgtcttacatataaagcacttcaccaaaaacaaacaaacaaaaaacccatactgttattatttagagctatatttcttctcccagtttcctcagttgagtagaaactcaccaatttctgtagaattttggttataggacaaggctacaggaaaggtctgaaataactatatgtcacttgactagggaaaagccttctcttgaggcttggaggcagtcatttatcactttgtacttgaaggcattcctctgcagacttctttcctagagtcttcagggtaaagcacaggatcyggactccaggaggggggttacttcctgctggaacactgaccagcagggcatcctttcaggcattctgcatgcagtactgttgcagctctgcagctgcctgagagaccttgatcctctccacgccgacctgcagcttgagctgctccaccaggcgctgcagggcactcttgctggccctggaagacatggtagcagcagtgtgctccaagggtggttgagccaygctaggcgggtcagccctgccaggccctgagcgtgggcactgccaatattgttgaaaggaccatactatccaaagcaatctacagattcaatgcaatcttttgagatggaatctcgctctgttgcccaggctggagtrcagtggtgcgatcttggctcactgcaagctccacctcccgggttcatgtcattcttctgcctcagcctccagagtagctgggactacaggcgcccaccaccatgcccagctaattttttttgtatttttagtagagacaaaaaatacagtttcactgtgttagccaggatggtctcgatctcctgaccttgttatctgcccgcctcggcctcccaaagtgctgggattacaggcgtgagccactgtgccctggcctcaatgcagtctttatcaaaataccaatgacattcttcatagaaataaaaaaaatcttaaaatttatattgaaccacaaaagactcccaatagccaaagcaatcctgagcaaaaagaaagctggaggtatacactgtcagacttcaaaatatactacaaagctgtagtaatgaagacagcatggtactgtcataaaaacagacacatagactaatggaacagaatagaccacacagaaagtaatgtattcrtctacagccaactgctttttaaaaattttttattttttgagacagtgtctcactccatctcccaggctggagtgcaatggcatgatcatggctcactgtaacctttacttcctgggcttaagaaatcctcgtacttcagcctcctgagtagcagggactacaggtacgtgcaaccatgcctagctaacttttaaaaattttctgtggagacagagtctcactatattgtgtaggctggtcttgaaacccctggggtcaaatgattctcctgccttagcctcccaaagtgctgggattacaggcatgagccaccatgcctggctaccaactgatttttgacaaagkcagcaagaatactcactggggaaaggataatctcttcaataagtgatgctgggaaaactagatatccatagrcagaagaatgaaaatagaccctcacctctcaccctatatgaaaataaactcaaaatggatcaaagacctaaatgtaagatctgaaactcaaaatggatcaaagacctaaatgtaagatctgaaaccataaaactactacaagaaaacatagggggaagcccttcaggacattggtctgggaaaatattttatgaataagacctcaaaagcagtcaacaaatcacttgagctcaggagtttaagaccagcctaggcaacataatgagaccctgtcttttcaaaaaataaaagttagccagatgtgatggtatgtacctgtagtcccagctactcagggagctcaggcaggtggatcacttgagtccagcaatccaaggctgcagtgagctactatcaaactactgccccctagcctgggtgatagagcagaagcttgcctctaaaaaacaaaagcacaggcaacaaaagcaaaagtaaacaaatgagattacatcaaacaaaaaagcttctgcacagcaaaggaaacaataaacacagtgaaagggcaacctacagaatgggagaaaatatttgcaagctattcatctgatgggattaatatccagaatatccaaggagctcgaacatctcaacagcaaaaaacaatctgaatactttaaaggcatctctactctgctgtcagcttacatgcttctgaagagaggtctgctgtctttctttgtttttctgtagacccccttgcacccaccatagctgcttctaagattttccactgaatcctagcaattacattagaaygctacttggcataattttcttaagtttattctgcttggggttgttggatttgtgggtttatgcttttcatcaaatttaggaaatttggaccattatttcaaacattttgtttcttgtttctcgtctcttccttggactacaattacacgtatgttagactgcttgatattgtcctttaggtcactggtgctcttaatttattctcagtcattttttctgtctcctttgttttgtcagtttttaaaattgctatttcttttcattgattgatacagttttctgccgagtataacctgctgttaattccatttttcaattttgtattttttatttttaacagttctaagtatttttaaaatattacaatgctcatgtttttatcttctcgaagacagtgtactgacaggataatgtatttgtttactaattgtgtcatagatgtcatttctgggtttatttctcttgatttttttctttctgttactgttatttcgtttccttgcatattggtgatttttgaaaaatttatttttataaaaattttagatttataaagtacaaatatatttctcagaattctcacataatttgcacccattttcccctattattaacattttacatgaatatggtgcatttgttgcaaataatgaaccaatgttgatacattattattattactgtggtttttttttttttttcagatggagtctcgctctgtcgcccaggctggagtgcagtggtgtgtgagctctgctcactgcaacctctgtctcctgggttcaagcgattctgcctcagcctcctgagtagctgggattacaggtgcccaccaccatgcccggctaatttttgtatttttagtagagatgaggtttcaccatgttggccaggctggtctcaaactcctgacctcaggtgatccacctgcctcggtctcccgaagtgttgggattacaggtgtggagaaatatgaacacttttacacagttgctgggactgtaaactagttcaaccattgtgggagacagtgtggtgattcctcaaggatgtagaactagaaataccatttgacccagccatcccattactgggtatctacccaaaggattataaatcatgctgctatacagacacatgcacaggtacgtttattgcggcactattcacaatagcaaagacttggaaccaacctaaatgtccaaccatagactggattaagaaaatgtggcacatatacaccatggaatactatgcagccataagaaaggatgagttcatgtcctttgtagggacatggatgaagctggaaaccatcattctcagcaaactatcgcaaggacaaaaaaccaaacaccacatgttctcactcataggtgggaattgaacagtgagaacacttgaacacaggaaggggaacatcacaccctggggcctgtcatggggtgtgggtaggggggagggatagcattaggagaaatacctaatgtaaatgacgagataatgggtgcagcacaccaacatggcacatgtatatatatgtaacaaacctgcacgttgtacacatgtaccctagaacttaaagtataataataaaaaaaaacattttaagataattttgcagtgcagcttacctggatacctatttagttgggagaagggtaagacaaaaaaaaggagagaaatatatccatgtatgcagtactttgttcttttattaaatagttcagacataaaatatgtaaaatactcacatgccaccacttagcttaagaaacaaatcattgctgacaaaattatttttctttcatcctatttttcctcttcctctgtctgtgatatagttttaatcaaatattatgtagattatatcattctctctctcttttttttttttttttttttttttgagatggagtcatgctccgtcacccgggctggagttcagtggctcaatctctgctcgctgcaacctccacctcctggactcaagtgattctcctgcctcagcctcctgagtagctcagaccacaggtgtgcgccaccgtgcccagctaatttttgtatttttagtgcagatggggtttcactatgttggccaggctggtcttgaactcctgacctcaagtgatccacccgtctaggcctccgaaagtgctggaatcacaggtgtgaaccactgcacctgacctatattgtatcattctctacataacgttttacaactttcttttgtgattcgaccttaccctcgatttattcacatggatatatttagccccaattaattttaactttagtcttaactgctatatggtatgctaatgtttgattattcataatttgtccagtcttctcatgctggccatttcagtagttttccatttctgttaaatgtaaagctgccatgaacattcttacacatgtaagggaccatacctaggagtggaattgcaggatgatagagaatgcacaacctcaacttagccttgccaacttgttttccaaagagatttcccaatttatactctactggcagtttgagagtgttccactcttcctcttcactgctattggcagattttagatttaatgaacttgatgaccagcacttttggaggccaaggctggcggagcacctgaggttgggagttcgagaccagcctgactaacatgcagaaaccctgtctctactaaaaatacagaattagccatgtgtggtggtgcatgcctataatcccagctacttgggaggctgaggcaggagaatcatttgaacccgggaggcagaggttgtggcgagcagagccaagattgcactccagcctgggcaacaaagagcaaaactccgtctctaaataaataaataaacaaataaacaaacttgatgaatgcaaaatgtcatcattgtaattgcatcattttgattttcagtgaggttgagtaggtttcactggcaatcctcctgaattgcttggtcatattcttcagtagcacatttttcttaagagtgaatataagctgatccatttgaacactttgctattgtgaaagtatcctaccatttcttactgtgaatatattttagacttgtgacatactgtgtctaaagaatatatatataacaatttggcttttcttatctgattgtgaaagactttgtcattttacacactcagtgtgcatttccatagaagatctcaggagctccataccaggcacagcctgtgggggaaagagcacagattttggagttagagatctggattgaaatccttgctctccacttatcagttctgtagctttgaacaggctgctgtacttctttgagccttggtctcctcctctctgtcctcatctataaattgagaacaccccatcatcgtgaggttgaatccgttgttgaccaagtgtcctgtatgattttttgcttagagcaagcctgcagtaaattgaagttgttgtaattaagtaaaggaaatatcttgggaagtacatttccttctttgcctactacctgttacccatatagaactccaagcagggtttccttgtagttaaaagtgtgaaataggtgagcattgtgactttcaaaggcattatcactaccttatgttcgtgaagtcctttatacatttcaaatcacttcagtattttgtcacattatttttttgtttgcagtaaatctgagagggaggcaggacaggtatccttacttatcccccacttttcctgatgaggaatatccatggtagagacacaaaaggaagcaatgtttccccattactactctagggagttttgtcttttattgtttttgctatttggtttttgatgtttgaactgatttttgcccttgaagaacttactagcaaagtagaggaaagcaacttttgggcagtttgcacttacgttacttacttttaaaggataaggaatgttttgggataaaaaatataagaaaatttaagtatattgaaatgttttcattagatgatgtattctttgcctgcaggctctgccagacttgcctctttatcccgagacctcacttaaggcacctcattcccagattagaatrtatgtaaactatatgcattttgaacacgtcttcctgtaggctccctctgcacctgcctcccccatgcacctggtttgtatttgtttggtgtccaatgttccctgctcctctctttgcccttccctcttggtcatcttggttacacctgtgccctcaggacacaggagaggtatcccacaagtgtgctgaatgaatgggtgtaagtaaactttttccttggaaataaatgtcaagcaggatatctgcttgacaccaaaatggtcaataaattgagccagagtgtaattgaagtgtctcatgctttgaagcatccacattgacttattcttggtttatttttatcagacttgttgctatcatatatgtataagctcagcaaggaagagtctaggctagtagtttgtcttagctgaatcttttttccataagaataagtaaaagtgctcagttacattttgttttttccccctttattcagtactataccagcttaaaataataccaaaaaatcagccataatgctactattttgtcttttgtttttctaaattctttcagttcttctgtctgcgtgcatctgtacattttatgccattataatcatagcatctgtgtaagttcgtaccctttccttagtatatcatcttccacacttttaatgactaaatattcttgtatataaataatgtaccaaagtgtatctaacaaattccatgttcttggacatttagattagttttcattgctgtcagtggtattaaagtgttcctctctggtttttattttttgttgtgatttatgcatgtgtgtatgtagttaaacatagggcagtagtagatagcacatggaaagttaagggcacgccgctggagttgggctccctgggtttgaatcctggctctgctgcttgttgcatggactccccggcaaattatgggacctctgtgtgcctccagtcttacaggtaaaaggtaggaggaaagttatagcagtttataaggttgttgtgaagattaaatagtatatgtaaagagtttagaacactcatacaaagtcttgtgaaaacttagctattaaataacccaggtttgggcagggatgttggatggactcctrggtaaaatagagttggccctaattgtgctgataattgaagctgggtaacagatacaagaggatttgctatactattcgttctactttttatgttgaaatttttattcatttatttatttttttgagacagggtctcattctgtagcccaggctgggatgcagtggtacaatcatagctcactgcagcctcaacctcctgggctcaactgatcctcccacttcagcttcccaagtagctgggactacaggcatgtgccagcatgcccagacagaaacttttttcataataaaaataaaagcacatacaatgcaaaaacattttagcttttatatttattttttgatttctgaatttatttcttgaatgtgtttctagaagtgagaccacaaagtaggagatcttacaaccatttttgaatacagccaaattgtttttttaaagaattgtgtaatatacagtgtaatgctcaatctaaaacggttttatcacagtcttaaacaacactgaatattattaccattacatgtttttcatataattttataggtaaaatggtaccttacagttattttaatttcttcttttttttttttctttctgagacagggtcttgctctttcgctcaggctggagtgcagtggcatgatgatagggtctctctaggttgcctaggctggtctcttcctggcctcatgtgatcctctcaccttggcctccaaaagtgttgggattacagatgttggttggccactgcacctgacctagaacgtatttttgattaatggttgctgtaaatatctgatcaagccatgataaactgctttgaggtgacagccaccactgttctcatatagcatccccctcagtgtgcagtcatcttyaytgtggaccatatgccaccggaggctagactgcagatgccccttgccagtgaaatttgacttcggtaaattttcagatgagttttggaagagcagggaaactacaattctgctttaaggtgttctgtttttatatagtgaatatatttatatttgttttttttctttatcatttcccacttttcatgatacaaatcacaattgcaaattccaatacagtgtatgatcaccacttctctctgtagcttttgagatatggtcaactatttatcataaagatgctgaataatctgattttttttgttttactaatttgttttttgagtctcctcttggtgcatttcttttacaatccttttaaaaaatgtaggatgctaagcctaatattgtgtagtggtttacataaattttatagttttctacgttcaaacctataatttgtgagtgatacctttttactatggtttctgatgtacttgagccatgttttatgccatcttctgagtaaccatagggactgagtggcgacagtgtatgaagccctttattattctatattcccatttattacttgacaagtggcaccagaggcataaaattgttttatttgtcagatttgcataagaactttcttacaaaaagcttttatggtacgtaacacatccataaattctcataatcgtccttttgaggtacttcttgtagttttactgttgttcttcctttttcattatttgagaaacttttaaaataagaaatatttgtcatgatgaaaagatcctaccaattatttgaaagaaccattgaaaattgaacataaggtctcctttttctttttgctttttttagaaaacaaactctttagaaaattttttagaaaacaaaatctttagaaaagttaaaataaaattaaagcctgactttgtgatgaaattagttggttaaatttggatgctggttatcagacttaaaaaaaaaaaaaagtaccttttgaaagatctgagacttacttatgaccaagaaaaaatagttctaaaacttttgtataaaaagtagcatgtaagttgtgtctatgaatgtgtatctgtgggtgtgttgtatctgttttataaaacttgaatagagcrtctataaaaacagttctcaagagtgtttgtactgataacagataaatacagatagggatataaacatcatggttaaataaatagcaaaaaagatcagcttttgaatttttctttttttttaaattttttttagtatttattgatcattcttgggtgtttctcggagagggggatttggcagggtcataggacaatagtggagagaaggtcagcagataaacatgtgaacaaaggtctctggttttcctaggcagaggaccctgtggccttccccagtgtttgtgtccctgggtacttgagattagggattggtgatgactcttaacgagcatgctgccttcaagcatctgtttaacaaagcacatcttgcactgcccttaatccatttaaccctgagttgacacagcacatgtttcagagagcatggggttgggggtaaggttatatattaacagcatcccaaggcagaagaatttttcttagtacagaacgaaatggagtctcctatgtttacttctttctacacagacacagtaacaatctgatctctctttcttttccccacatttcccccttttctattcgacaaaaccgccatcgtcatcatggcccgttctcaatgagctgttgggtacacctcccagacggggtggcggccgggcagaggggcttctcacttcccagacgtggtggctgggcagaggggccccccaccccccagagggggcggccaggcagaggcgcccctgccttccagatggggcggctgctgggcgggggcgccccctgcctcccagacggggcggcggccgggcggaggcgctcctcacctcccagatggggcggccgggcagaggcgctccccacatcccagacgatgggcggccaggcagagacgctcctcacttcctagacggggtggtggccgggcagaggctgcaatctccgcactttgggaggccaaggcaggcagctgggaggtggaggttcacaccactgtactccagcctgggcagcattgagcactgagtgagcgagactccgtctgcaatcccggcgcctcgggaggccgaggtgggcagatcactcgaggtcaggagctggagaccagccgggccaacacggcgaaaccccttctccaccaaaaaatacaaaaaccagtcaggcgtgacagcgcgcgcctgcaatcccaggcactcggcaggctgaggcaggagaatcaggcagggaggttgcagtgagccgagatcgcggcagtacagtccagcctcggcaacagagggggaccgtggaaagtgagagatggagacgagggagaggggaagaccgtggaaagcaggagacgggagagggagagggagagcttgagcttgaatttttcaaaatgttgatttttgtcaccttaggaaagatgtgttacttgttatacatccagcatggttaagtcctagtgtcaagtgagccaggactatagtcacagatatacttacctctccttgcaactttagctgtattataaaacttgggggtgataacatttacaaatagacttgttcatgtattagtagtaaattcagagtacttttccactgtgatatgtgctttctgccctaagtatatacaatcttttcagatttatctatgagctatcttgctaattgtttcacccacattctatagcctttccctcctgttgatgcaactcttcctcttccagatttcatgctgaacctaatgcagcatttgactggcttcctacccattcccatagtgtctgcaagtaaacatcagtcaaactctctgccttcttggtctccactactggttgctatgggctttctataccatctttcctttcctggactgggctcctgaaggtcagcagcctccctgacctcggtgctataataagttgccttctcttctgcttgcacacaacatctctctactttattcaaacaattacctggtttgcattgtctcactttttctgaccaagttttcttgatcatttaaaaatttccttggggttcaagccagttcacaagctagacctgatttaaaatgaataatttaaggaaatctggagaacgaactaatagtagatttttcaccctggtctacatttttctgagacggagtctcgctccgtcgcccaggctggagtgcggtggcatgatcttggctcactgcaaactccgcctcctgggttcacgccattctcctgcctcagcctcctgagtagctgggactacaggtgcccgctaccacggcyggctaatttttttgtatttttagtagagacrgggtttcaccatgttagccaggatggtctcgatctcgtgactttgtgattcgtccaccttggcctccgaaagtaaagtgctgggattacaggtgtgagccactgcgcccggccgctccggtctacattttatatctctactcttaagaggcagtatggtacaaggttaaaagtaagggacttctgagccagattatcttcattttaatcctggttctaccagttatttctgtgtgaccttgggcaagttatgtaacttctctgtgcctcagattgtttataagggagataataaaaatccttacagcatatagagttggtgaagttaaatgtggtgaaagttaaatgaataaataaagcatccacactagtacatgacccaaattaagtgtcatataagtgttgccgcattgcagttctcctcagtracggcctgtgacctgccatttctgtcggctcttaccaaggctcggtgccgcccygggcctctgctccattgtcatagtaatgtttgcactctgctagtcacctgtaaatatacatatttaggatcctaaaaccaatatcctaaaatatgtatattagcagatgatgacaaaaacaccagaatttttatcaaagagaaagtagaaagtatatgrgttaatattgtaaggattaggatacacctgtcaaattactctaggttggcttagaaacaaagcaaaacaaattgggtcccatccactattttttggcattctgaaaataactagctcttacctgatgaggtcattcattcatgacctgaccatccaggtcctatctggcaataatagctttttgcaaaaagcaactcttgcctaagtggagatttacatcttgatgagttttgtatgaaagtaaagaagatgcaggaacattatcagtggggcgtacactaaccattggcatttctgagcaacgtgttgcgtagttgtgtgatttggcagcagctggtccattgctgacacgtrtgtgtgttcactgaggcttcactcacacctaaggcttccttggagagaccatgctgccattacatttggatcactacctgcccccaacacacacacacacacacacacacacacacacacacacacacacgaaccaactttccaagcaccacacccaccttttccgggctctgtaccagatctggaggggtgatggctagaagtgagggtttttgctccatcatgagtagcagctggaagtgggcctgtgcccagctctggtggcagtgggccacctgtggctggtgccaagctcactgatggagatctctcattatgtacctacatcaatgatcagtaaagaacaagccataagaaacttttgggtctctgggaatgttatctttttactcctcatataacttcatggtgaactgttttgaaatttgacattaatttagaatttcttgcctgttctgatctctagtaggattctaggctggatgtctttggaattgaaatacttgttggcttctggttattttgggggtaatccataacagtctaccattcctkgtgtttggttttagtgggctgtgaaaaaaatcatttgttcaacactgatgtcrtgatacaaggacgtgaagatgtgagtcattgtgacatcaccagccagaattgctgggattcagtgagatgactcacagtaagaggtcagtgtctggttcagtagttccttcttccacatgtatccctcagtatctagaaccctgaaattggtttctctaagaaaaccaagaggcccgtaagggtaatgtatactgttgatttttatggttatttttcaaaaactaatattttaaacatatcaaaattatttcaaatggtaatgtactcaatgtaccatttggtttaagatgttaacattttgccatatatgtcataaagtcttttcatgaagaaatcaaaccttacaaatatactggtaagacccccctcctgcccatcatgcccccatcccttccgttatgttgttgaggtgtggtgtatgttcttcccttcagctttttaacttttactacatatctgtgcattcataaataacatgtagtgttttttgcgtgttatgtagtgtgtccttttgcaacccatgttttccacccatccattttgaattgatctatgttgatgcaggtgtatacaaaactcatacagctaatttcttttagttgttgtataggattttactgtaggaaatatgccatcatttatttagatactttgtaacttaattatcacaaaacactttgtggtatttttaactcagtttcagagaacatattcaaacctaggtttatccaattccatcatgctttctataaacatttggaaaataaagttgggaaagtgagcttgcaggctgcctcctagcatatctctggggtcttcgtgtaagggaaattgttggctgtgtgccccactggcctggggtggcaagaccagggcagccctgtcttcgtcagtgggtctgcactgcaggaagacccctgggtcttcagagggtgctggtcagctacttgggacactggctcaagggaaatacaagatcctttttttttaaatgaacaatgcagtaaatctgtgatatatttgaggctcaagaaggattgagttacagggagaagtttcaaaggaagtgtaagacatggacccagcctgtaagaaacttaaagtgtagcaggggagacaaaactaacatagaacaattgcatgctacacagcttggtatacactctactgcaccccttgttacctttggcaaaaatgagatattctgtgtttttctttgcaccttgatttctcacccaacaatacttagtggaggtcctttcaaagcacctagtatagaacaaattcatttttcaaagggtgtataatgttccactttatggacatagaataacttatttgtccagtctcttataaatgggtcatcttttgttttgttttgttgtaaactgctgaaaactrtagtaatgtcctatgtgtctttgtgtgtatctatttttatttttttaatttttattttaggtttgggggtacgtgtgaaggtttgtcacacagataaatatgagtcacaggagtttgttgtacatagtattacatcacccaggtaatacgctcaatacccaatagttaccttttctgctcctctcaccctcccgcttcaggtagaccccagggtctgttgtttccttctttgtgttcctaagttcttctcatttagcttcctcttataaaagagaacatgcggtatttgattttgtgttcctgcattagattgctaaagatgatagcctccagttccatccatgttcccgcacaagacctgatctctttcttttttatggctgcataatatttcatagtgtatatgtaccacattttctttatccagtctgtcattgatggacatttaggttgattccatgtctttgctattatgaacagtcctgcagtgaacattcacatgcatgtgtgtttatggtagaatggtttatattcctctgggtatatacccagtaatgggattcctgggtcaaatagyagttctggttttagctctttgtggaattgccatactgctttccacaatcgttgaacaaatttatcccaccaacagtgtataaaggttccctttgtgaccttgccagcatctattatttttttggctttttaataatggccattctgactggtgtgagatggcctctctttgtggttttgatatgcttgttggccacatgtatgtcttcttttgagaagtgtctgtttatgtcttttgctcaatttttaatggggttgtttatttttctcttgtaaatgtgtttaagttctttatggatgctggatattagacctttgtcagatacatagtttgcaaatattttctcccattctgtgccttttaagtggggcatttagcctgtttacattcaaggttagtattgatatgtgtggatttgatcctgacattgtgctgtttgatcatatcattgatcctgtcagctggtgctgtcactgatcctgtcattagctggttattatgttggcttgtttgtgtggttgctttacagtgacactagtctgtgtgtttaagtgtatttttgtatcagctggtagcggtctttcctttctatatttactgttccttccaagatctcttataaggcaggtctggtaatgaagttcctcaacatttgcttacctgaaaaggatcttgtttctccttcacttaggaagcttagtttggcaggatatgaaattattggttgaagattttttttttttttttaaagaatgttgaatataggcctctaatctcttctggcttgtagggtttcactgttagcctaaggggatccctttgtaagtgacctgccctttctctctagctgcctttaacattctttcatttcaacgttggaaaacctgacaattatgtgtcttgaagatgatcttcttgtgtagaatcttgcaggagttccctgtatttcctgagtttgactgtaggtccctctagtaaggttagggaagttttcagggatgatatctaggaatatattttccaagttgtttgctttctctctccctttcagggatgccagtgatttgtagatttggcctctttacataatccattcttctctgaggttttattcatttttatttattttttcatttttgtctgactgtcctatttcagagaaccagtcttcaagttctgagattctttcctcagttaggtttattcagctgttaatacttgtgattgcattgtaaattttttttttttccctgagacggaatctcgctctgtcacccaggctggagtgcagtggaacaatctccgctcactgcagtctctgcctcccaggttcaagcgattctcctacctcagcctcctgagtagctgggactacaggtgcctgccactatgcctggctaatttttgtatttttagtagagacggggtttcaccatgttggccaggctgtcctgaaattcctgacctcaggcaatccatctgcctcagcctcccaaagtgctgggattactggagtgagctactgtgcccggtcataaaattatcatattgcattatttagctctgtcagacccgttaggttttttttttatgctggctattctatccttcagcttctatatcattttactgtgattgttcttttccttagatttggtttcaacatcctcctgaatctcagtgatctttgttcctatccatattctgtattccagccagttctgcctggttacaaactcttattggagaactggtgtggccatttggagggcgtatgacactctggccatctgagtgttatcagagttcttgctggttctttctcatctgagtgtgggtgttcctttaatgtagattgagtacggtcaacagacttcttttctggatgttttcactgggctgatgctttatgtagggtctttatttgaagcttacttgttgtctctggtttcagaggggggtatgttaatgaggtrtttttggtattgaagctttggggtgtgatccagtaggtggcgcttaggtgaattggtcagttgctagactcttgtttggttgcgtggctcccctgtttcctcacagtttccgtcatgctccctttcagtgctctgaaactgtgtgttcctctcccacttgagtgctggctctccttggcactcctgggatgcccactgcagctctggggtgatctcagtgtttatgttcctttctcagcttagaggcagcagaggaagagatcttagcaggggttgtggccgggggttatttgcttgctccacctcagagagatgtgggtcagcaatcacttggtgcagtcagcccaagatgtagggtttgtgctgtgtgcccaagccaggggttccctgtctggtgatgagccatgctggggagagtgggtgtgggacctgtaggagacagactggctgcctctccttgggtcgactgtagcttattggaggtgtagataaggtactcttagagtctttgctcctttgttagtttgaaggtggcaagggcagttccactgctgagatagtggcagagaggctttcagttgcccctggaggctctgttcggggagttgctgagttggtactggctccacagctctggcgggggtggctggaggcccaggcctggaggacctgtccagtgaggagatatggacaagtctgcccacttttccatagggctgctgtggtatgcttggggcctgctccagtccctagtcacctcagattttccagaacctggaggtgtcaccagtgaaggctgagaaacagcaaatatggcagcctgtccctccctctgggagcttcgtcccagggaggtatggacctggtgtcggcccaaaggcacctgtaggaagtgactggagaccctggttgggaggtcccggccagtgaggaggaacgggattgggacccacttaaaaaagtggccacattttgggagagcagttgtgctgtgctaggggtccgcttcagcccctgatcgcctcggatactatgaggctcaaaggctggaacagctaaggcacctgaacagtaaagatggtggcctacctctccctctgggagtgccatcccaggggaaattcaatgtccatctgtcagatggacagctcgggcaggggtggctagaggccccagttggaaggtcctgcccagtgagggaacgggataggtacctgcttaaagcagctgtccggccacgtttcggtagagcagctatgctgtactgggggatcccttctgccctgtgttggctcggactctccaaagcctgaaagctagaatggctaaggtgcccaaacagcaaagctggtggcctgcccctccccctgggagctccttcttagggtggtgcaatgccgctactggtagctggctggaattccaagccagtgggtcttatctsgtgaggtgcagtggaagtgggggctgttgctgcttrgctgcctggattcatcctctttcctaagtgtatgtacaggagtctaacctctcactttgccagagctacggctacttttgctggaaagcctgagtagctaaggctccagggtctccacgcgtgcctgagcrgctgctctgccaagactccacgctgctctgtcagaatgaagactgaaggcactggtagagaggggtttacgtggagagctcctgacctgaggtttgcaaagatctgtgggagaagcatggtttctgggtcgctcattcggtcattgcttctctgggcaggggagkatcccctggctccgtgctgacccccggggggccattgtcctgtcttgcttttctttgttctctgtgggtcaggttgtttccttgattagtcccagtgcgagtayctggctgtttcagttgaaggtgttgtattcactcgccccttctgttcctctccgtgagagtcaggtacmccagctgcttctagtcagccatcttggccactcactcttgtgtgtatttatgctctgatttctgcagaagtttccaggggtgggatggtgagacagggatatgtgtatttttaattttaatagatgcttccatattgccctctaaaaaggcgataattcatatttcactacaactggcacatgagaatatcctctccctatcttgtgaactccaatagttatgaaatttctttttcagtttctgactggatataaagttataccccattgttaccaatttctgtgagcactaggggatgatatgagcatctttccagatattaccttggcaatttgtttttgctcttttgtgtgctgctcatcttttgctaggtttgttactaaccttgggcctttattcctggttagtttctgagggctgtttatacagcataggtgtcaaccctttgtcatctatgttccacatacttggatcagatagagcatttgtctcttggctttgttagtcactgaaggattacagaagcaaactgagttccagcaggtcaartacaaccttattagtttgatatgttaagcagccctttggaagggtcagtgggggtrgtatgatattgatgggcatggtacaatatatgcttgttgaagactgtggtagctcacacatcagctgaattttgtatctctttagcttttcaggggttctttaagcaacagggaggtatgctyatatgtgtgccttatgctcagaaaaatagctcgatcaccaagcagctgtaatccactcgactggtctctcttccttatggaaactgggtcctgaagttcggtgtcattcttttttttagaaatcatgccaccctcaaagcytcatccacctgtcgtgggcaaagtgactcatcacagcattgaattatactgggatctggaaaagaaagccaaacgccaaggacctcaagagcagtggttcaggttctcgattgaagaagaagaccccaaaatgcacacttatggtatcatttatacgtaggtgcagtgttgaattgcttgccactttgccttacttcctgattagctggaatgatttctgttgtctctaaaaagccactgcttgtttcaaattaaagaatgagtcagcatcatttgtattcatgctcttttatgaattacaatttttggaaaataggcattagcagtaactttgaaattaaacctctgtacctttgagagcttctttgacttctgaaatattttaatgatatgtatttaaaatccagaatgtagagacagactcaaacaatagcttgatgcaattaggtgagcttcccatcaggctgttgtgttcactgacgtggaatggccccgcatggtctaccctggctagcttctctgatctcatgtcataccattgtccccttgtcaactctcttataccaygctggctgcctctcagcctggacaggccaagctggttcccatcgcaggatcttgctcgttgctgtkgtcttgaatacatttccttctgtttttatacagctggttccttcacaccatgccaatctcagatgaaacatccccccgcccccagaaggccatctgaagtagccatcctttcatgcaggcctcctgtagctcagaaccttgttttgtatgccacatagcatttagctctgytgggcttattttacttgtttacttgtttgcttagtttgtttaccttgttgtttacttgtttacttcttgttcctttcctgcctcctcacccagtattaaactcagtgagagacaaataagacttctgcctgcttaacgctctagccggttccttgacagtgctggctgttatatagcaggccttccaaatgcttctggcatgaacmaataccaccaggagtaatgaagaagtcacttttggccaggcatggtggctcatgcctgtaatctcagcactgtgggaggctgaagtgggcagatcccttgaacctggatgttcaagaccagcctaggcaacatagtgaaatcccatctctacaaaaaatccaaaagttagccaggtgtggtggcttatgcctgtagtcccgggctgaggtgggaggatcacttgagcctgggaggtcgaggctgcagtgagccatgattgtgccactgcactccagcctgggtgacagagtgagaccctgtctcaaaaaaaaaaaaaaaaaaaagttatgtttttcttcttagtcttcatatcatctctgacttatttcttccccttgatagatttaccacttgaaaaatgcaaaatgactattttgtgattcaggaataccaaaaatgagatacaaatatggtttttagtgaaacttttaattttgaaataattatagattcatatccagttgtaagaaagagtgattgtaccttttcccatttctcccctatggtaacatctttgaaaataatagtgcagtgtcacagtcaggatattggcattgatgcagtcaagatgcagaacaggttcatcactttcctggccttttctcaagttygcattgtgataaaartgctgacatgagaagatagatatgtttatgtgtatgtgtgtataaatatctataaatatgtatataatctgtatatgaaagctccaatttcaactgttacttgagtgataatatatctgatatttgagaaatttctctgtaccttaagaaaaatctgaaatgtagttgcaatgtaaaaatagttcttgttctgactactcaaatgttattttaatcatgtcgttttacttattgaaggtatgctttttctatctaaaagcatgaattatgagaaacatttctcttgagaaagaaaaagacatctttctttcccccatcaccttagcaccacaagctgtgttgggcaggtgaatrgggccatcctgcatcgttctttcttccttggctgtgcctttgctgggtggccaggtaggcagcctcagctagagaaaccatagctgcgtgtgctggcttccagcctgaggtgtgtgtctgtgttgtctgcattctccccagagacctggttgctgtcaggctggagaacgcactctcactctgacgacagcctggcattgtggggctggcagtgacatctgtggtccctgctctaaggacagtggggaaatgcctgcrtttctcacagaattacaagtacaaatcttgacrctaggtggcagaattaggctgcattaatcttgacctcttttgcttccttatttctttctctacatagcattaaaactagcaaatgcttttcttgtaaaaagtgattatctagaatacctgatgtttggattgtggatttaagaacttcttcctgatttgtcagtttctgttcccatcagtcatcagtctatctggaaacaatgatattgtctttgacttgggctttcctccatggcttctcatagccagtcagttactgagttctccatttgtagaattgcttctgtgctttccctctttagctgcgttttcccctgcaggatgtaggctttatttctgtctagctcatttgtggatccccagctcctacacctgcccagtgtattttctgatgsaaggagttgactttattccttttttttttttctcatcattctatcttgctgggctaatttccattttaatctttcttttgtcacattgtctttggtgggtcctccattgcttaaaggataaaggccaaattccttagactaacatttaatgtctttcacagtttccctacacctgcctttcttgttgcctcttatttctyagcacaaaccctccagtcagatttcytactgtcctttgaatatgccttgacgttttctgcatgtgtgttcagttgttttccctgtttggacagattttcccctctcaccctattctttcttctrccctggtcagattttacctccactgagaagctctccttactaccctattgtctgtgccctaaattcctgtgatcrttgctgcccatgccacgcattccatttattccatcagcgtgtattattgagtgtctgccgtgtgtcagacactgctccggatgctggggatayggcactgggaaaaaattcctccctcatgatgatgaaggcaaacaataaataagatacataagtaaaaataggtagtcagcmggcaatacatactgaggggcagcagcataggaaaaaytgagggcctggggtagaggtggggaagtcttcaccaagaaggtagcttctgagtagatctgaagcaaggatacctggagccttgcaactatctgggggaagaaccttccagacatagcaaagggcaggtgagaaagcctggcagtacaaatgtacctggctggtcccaggagcattgaggaacagagggaacaaggaggaaaataatgggggcgagggcagctgggtcatgagaggtcactgcctgggccttgagggttattgggagaactctggcttactctgagagaggcggggaaagccactggagattgtgaagctgagaagaggtgtgatccggcttatgttttacgaggatccctctggctgctgagttgggaacaggctgtagggaggccaggcagcaagcagcagggaggactgatgaagaagcttttgaaacagtttaggtgggagacaacacaacagtgtggaaagtgggaggatgcaggatatgctttaaagatggatttaagaacttggtggtggaccgaatatgggatgtgagatacgggatgtgagagagaggatggtcaagggatatgtggtagccagcacaggcccagtgatgctgctggaagcatcagcgtcacagtctcagtggcttatggcagcagtgattccctcctacacaccatgcccacygtgggtcggccagggctccatcctgcattgtcctcctgccacagcccaggccatgcggcagcctctgcgtgaacattgtcagtcactgtagcaggggagagagcatggcatgctgtttcttgaagcttctgcccagaatgacatacttcacttctgtgtatacttcattgctcaaagcaagacatgcagccatgtccgagttcaacagggcggggaggtagatagaatccttgtgggagggcaccttgtgtctctgaacaacaatccagtcttccacaggaggcacccagggtctggcctgagcaactgtaataacagagatggggaagactgtgggtggagtagatgctcagtttgaaactgtctgacgtccaagccgagatgtcagggagggtgttggggatgtcaagggccagggaaagggtctgggttggagagacagactccagagtcatcagcatgaggctggattggaattctgsgggagggagtttagagaagaaagggaagtctggtaactgagtcttggggcttttcaatatttatttagcttcttatgtttcatatttgctcagctcttgcatcaaacatttgcttattgactgataacaaaaacaaggctatgctttaaatttttgtagactttcctctactgtggaagtcactctaagattcatttattttttcagctgtcatgtctaggtaaagttgcgcttctccatgggttcaatgaactgctctcatgagtcctccctgcgcctgtgttgtaatcgctgtagagtaccctggtgggcagttgtgtcctggtccctgctgtggcttttgtcctctttggagccatctctagtgatgcaagaatcttcagcctttgacaagcgtgcttggtaacatctggtttctaacacagttgcgttatttccctttccaggggttatggaggtgctgtttgcttcagggtgaccttatgatatttagcaatactgaattttattgggagcacttctggttttattttggtctaatgctatgctaagtctttgacaccttgcactgaattctggtgaggcttggctattatattctcactgaacttctaaagatcttttcagatgccacacattattgagggctcagtttctatgactcaaatatctaagtattcatggacctattttcatttaacatcaaaatctacctactcataagactactttgtgccaggctgatacattttagttttaaaaaaattattactttttagccctggcggtttttctgaatatttatcttggttttagagcttttacttttatggtaaatgtgtttatatcaatttttaacacttatctacttctcggtttcttgatcgaaaagtttctgtaatgccattggcgttatttcttcattgtctttcctacagtttcttttttgttgatacatactatctcagttatctgctgcatgacaaascagccccagacttagtggttgacagcagaaacaggcatgtgtttgctcatgatctgtaatttggctagggtgttgatggcttgtttctgccccatgtggtcttggccgttgcagctctcttggkgctggaagaaccaaatggcttcacccatgtgtgatgcatcagctgggatggccaggacagcaggagactggctgggctttttcatctcctttgtggtctggatcttccactgactgtcttactaggtggcctctttctctaacagggaagttgarcttctcctccctgcttccaagggaggagaagcagaaacttctgggcatcttaaggcccagacccagagctgtacagattctcttctaccacttcccatcctgttcaaggggagaggaactagactctaactctggcrggggaggaacatgttcctgcggggatggtrgagactgtggaggtcagcttgacttccagctcatttggcttcttttaggtgaagagaaatgtgtttctggcaaagatgatgtcagttaggagactgaatccaccagcacagagcagggaggcagagacacgtacgtggtcagaggtgcctcaatgtgcttagtctttttcttggctctgctggtgctacacccgagaagtcatttagatttggtgtctgaagtaactttgtgatgcaaaaacaggatcaktgaacgttcagtgtttgattttaccttgaaatttcacattttaacaaaggacagaaacatcaagtgaagaaagtctttgtaaatgtttttcagttttcaaaaaaaggttctgttagatgttagaattatgatgttagagttgtctccagatttcacggaggcacctctttcctggacgtgccagactcttctgcgccctgactcrccgcagtgagagtacctagaccatgactttcccaggtgttgtgtgttctttcaaccctactgggaagtccctttctcagactgcctgggagacgtctgcctgtctgtcatggaagtcctttatgccatttctcacttgacatcagagatacctcaaccagaggacactgtcctggcacctcattccctctgccctgtacctgtttctcaggtacctgttcctgccccatgcctgttcctcagtgggggaattacttgtttgatggatgaatttggcggaaggaacttagaccttctggcttctcctttggggatactcctccctctaggacaagtgttgggtctgttctttagccacacactttgtgccatgcctcrtcctttaggagaaagaatccagtgggggctgggagtgagtgggcaaggctgtttgatgattaggtgaggtgttagctcacccacctgatccagatctgamgtcaggttttcaagtgtttattagtgatgctaactccagcactgtcatttcacccttgctcagttgtcccttcttcactgtccttgactgccccttttcttggaccccatcagtaggaagttggggtcaactcagtgttgacaggttcattttggccctgagctggttcaggactacatcccagcctgtcccagcaccttgcaaataatgggcactagatacacttgttgagttgtatggaatggaattgatgtataaatatttagttgcacataaacatcctggaaaaattagttgtgaatcacaaagaatgattctggtatctttggaggatctattgagaataaaagtaaaaactagagacaggaaaaaaaaaaaggaggaaacaatggtaaccttggcatctaaggagctatggagaatggtccaagggaggagaacaagaactggattaagtgttgaagcaggaaagaagaaagagctggaaatgacacacacacacacacacaccctctcaaaaaccaaggctttgagtagaagaaaagaaaaatttagagataagatttgaaaagggatacatggagtttagtyggataagaagaaagaatgttggcagaaaagagaaatgggtaacatggaggttttgggtaatactgggaaatatatacagctctgtcaacttttggagacctgatattgtagaatgcatgccaagtcaaagccaggctcctgggacctgcctcacaagcagaaggtggggtcttatcttagcacttgcgctaggtcccagcatcttctgagcaggcaggcatttcttggtgctgattttgcagactgcaaatgatgagactcagtactacttccctctggaggtgtgtggatttccatcgtgagtctctcatcagatttctatcccagaagtgctcagcatccatttcccacaaacattcctaagatgaacttgaccatggggcatgatgttagcattgtcttctatgtgctgcctgagctcccagctctactggaagttgcttatggactacgagcaatcttgcatgtgacttcttcaggtcctttccctgcagtggtattttgcctgcaatagttatacagccatgtattagccttgcagcccccatcactagatggcccccacttgaaaattacaaatatatgatttgactgcctgtcttatctttcaaatataaaactttgttacttgagggcaaatgtcgtggttaacgtgattatttctccaaagtacaaaacagtatgctggctatgtgtcaggccctggactaggccctatgggacagagtgcacctgctggatagggatggggcgccatgtgggacttgtccttcattctctcggagttcagcaaagcaggatccatcggctgtgtcctggaaatagaaggaaaatcacttccacctgctcttctgctgtcttatcagagagtgcagattaagctacctggtgttatcagcatgtttgtctcctcctgtctaggggatatgcaacgaagcatgttgttgaaggtctggaaccaaggacgctgtacagatttcgcctgaaggtcaccagcccctctggggagtgtgagtacagcccactcgtctcagtgtctacaaccagtgagtattcagaccgtccacactcacctctctctagatcaatggagatgacaagcaatttagaaaaaatattctgcctctcgtttggccttaccagaagcagaaatgatacaatttttaaacactgcartaatatttgctagttgggccttgccataacttgtaatgtcagggaagtctaattatgctttcacaaactgggagagctatttttgtgccagaactgtcctgttagtagccattcagcacaaaagggtggagtcacctttcttaggaaatgggccacaggggtgtgggctgggtaagcctaagcgtccccacacagccaagcaggctgcctgcctgagcgtccttgggcaagcagctccattcagtgtcatatccattttagacaaccccagggtgtgcgtcttaactcgccacacaaacccrattcctggggtcacggtgagtgagggtgaacgaacagtgctgctgcatccacggagaatcctgtgagggagagccccacatggagacctctgagcccttcagccggctgagttttaaggttgtttctgagattggtattttaaagcattttaaagatgctatctatgtccagggccatctctgagcaagagccttgtaaaaattaggatggtcacaagtgttctccacggcccacccactgaaaacacaggcaagtaatttttcagttgcacaaaggaaaccttccttttgtgagtaaagctctttttccgttttattccaggtagcatttggcttggaggtatgtgctttccatggctttcaactgtgtcctttaggcatttcttcattacaagttttgtgtagactaaagttaactcagcttttgagttaactcagcttttgagctgtggtaccttcagttgcagacctggcatgaggggacaggatctgagtttagcaaactgggagtttatctgtgaaaaacacaatttcagaggagacttgtgatatgaaatggtcaactctggggatgcaggtaaaaaaagagggctcgttccttcatccgacagtgttgagaacatttgctgtaacatggaaggtacttacctctggggttcttaagagaaagcaaagacagcagaacatgagctctgtgtgctgaaggaaggcagagggcattgcaggagaaggggcaggaggaagaggtggcaaagggagtcaggcatatgaacagagactccgggcaaccccagccaggatgccgtcccaggctacctttctgctccctcccatcctcttgctgtccccaccgcccacaggcctcctgccactgcacactcccctacctctgcccttcttccctggagcactcacttcattgctgtgctcactgagcctgctccatgggcaagcatggcaggggcgattcctcgtgtggctttcccctcctctgtcacatgccttccctcctccccaggtacagagcagtattcccccacctctatgaacacttcttgcatcttaagtatttgtctaccttttggtctctcacctacattgcgggctccgaaaggatggacgatgggttggccatctgtagcttgtgggagttccttaataaataagtcagtgtgtgtgcctgtggcctgagcaggagtatcgcttcagccaggagttcaaggctacagtgagctatggtggcaccactgcactctccagcctgggcaacagagcaggaccctttctttaaaaaaagaagatycttgatggatggatgggtaatgaattaaagaccagtggcagaattaagagtatgaaaagaaacactgattttctcaggttgcatttatgtttgttggaagatgtattagttttccactggccagtgagagtccacccgaaccttccaggtgagggtgaatatggttggttctgcagccttccatggtgggcttcaggtggcctctagcatcctcttaatagcacaccaaagccagggcaggggcttctggccstcctagcctgagtttacatggggttggagtaccatttggagcaattttaggaagggctgtttattagtgtgttctcacactgctaataaagacatacctgaggctgggtaatttattataaaggaaagaagtttaatggactcacagttccacatggctggggaggcctcrcaaccatggtggaaggcaaagaaggagtaaaggcatgtcttccacggcggcaggcaagagagagcatgtgcaggggaatttccctttataaaaccatcagatcttatgagacttattcactatcatgagaacagcatgggaaagccccacccccatgattcagttacctcccaccaggtcactcccatgacacatgtgaattatgggagctacaattcaagatgagatttgggtggggacacagccaaactatatcaggctgtgcctgtgggccagatgtgccttctccccactgagctggctccagaggcagccatggagagttggtgcagcgcatttgtccttacagcgccatggcttccatgagtaattagatgaggcctcctgcagggatgagtgtgtggtggtgaccaggggtgtgtgtgtgtgtgtgtgtgtgtgtgtgtgtgtgtgtgtgtgttgggggagtgatcctggccatttcactgccagataatagatagcatcactgcctgcagccaggaagccttctcaacctcaggggggctgtactgggtggtgaggatcaggtgtcctcctcctcctagctggggcaggctcttsgctctgtgggctggctgcagctcccttatgctattgtgttatatatttataatatccaaagcagattctcctaaggaggcagatcatgctaaacaaagaactaagaaggtgcacatgatacaaaatgcttctgtgtggtggtaatttgcattcagtttgagagtgttttaatgagtcacagaggcatgcactttgtttgaataaagaatgaacagccttttyttyccccccaggtaaagtacacagattcttgcttaaatgaggcttacaattttaatcagttgggcccttataaagaaagaaaaacagctgctacttgttaattggcaaatatcttctccaatgagctcgtgatttattcactgcttttaataaagacttaaaattccaccaagaaaggtgttagcaccatattataatatctgcaggtacatctgcaactaaatgaccctcttagagaacatgagcgatggcttcctcaagaccactctgccctgctctgcccttctcctcggtgyccctgctcacctggccctgactggtgagtccatcyggctcasgtgagcatgggctaacatcctcaccatgggcagaatcagtttgataattgtaattgcaacactcagggtaaaacactagaaaaacccgcagagcaatggccggccttttaaaaatattcagttgcacttattgatggcattcccttgggccaggcccacaaagtcttgaaggattcaggggtgggaggaatgaaacattctgttcaccctggaatttcctctctgttcctcaggactcctgcctatagtgggagtagaaagaattgctgtgcactgcaaacaagggccttttcatttcttttctgtttctttgtcaaattcaggtaaatggagacgttttcgtacctctgttgcttcacacaggtttcagtgtaatcctcagtccctcctttccctcttggtagtagcgtgaggacgattaaggagttaacactgagaaagagctctcacaccctggaacgatggttactgctcagcaagcaaggactgaggaacaattatgtcattcccctctcttcagtgaggtgtccctttgttctcagagtaagctgtgaagtgctctttacctcccgtggaagctggaattggcattacatttattatatcctaatactaaaagccctggtctttgctacaaacggtccttaagcttataaacatgcagtgaacttgtttcatttcccaacctttgcatgctgcagagcttcctggttaggatgcgctaggaagtgtccccaccgagagagcctttctgttcaggtaagatggaggctgtggagtagaggggtcggtgtagagaggtggttggggctgtgcccttagaactttccttaacatctcaagcagttagcacgttttggaagatttttaggcatcccctttcttttttaacactttgcgggaggatcacatttacttatgatgttcatctgtattcaaaatttggtaagaatggaagcatatagtgaactggtcgatactgcagtgtttactaagtactaaagggaaggagtgggcctcatggaagacttggccttggctctgatgctgccctctcctaactgggcgaccttggacaacttagcttttctgactcccagtcttgtggtttggaggagaattttaaaagcactgggtaaaaagcctacgtacagcttaattcataggatttgatttaggatactacacattgtacaacttagtagaaatagaatgagctttatatgttgttataggtgatttatccaaatgacttgtttttatgtttgagtggcaggtgaagtttcagattaggaaaaagtggggcctgttaatggrataacagagacttttataaacataccasttttcttctcctggttagcaacagaaggggaaacagtctatgggtttagttcatccatctaaagtatagatgagacgcatcatgattttaagtccttattaatctagcccagggttctcaactttggtactactgatatttggggactggatggttccttgtggtgtcctgtgcacttatggattcttagcagsttccttggcctctatcctctagatgccagtgctccatccccttcgttgtggcaatcaaaaatgtcaccagacattgccaaatgtcctctggggtataaaaccctgcctcctttctaagcccttctagtgaaaccactgagcatggcatgaactcccttggaaggccagggacagctgtgagccttggcctttgacaggttatcgtgcgacttttatttgacacttttgatctaaaaaatgtgtagaatgatgaaaaggaagtataatgtagctaaaaaaagtctgtaagagattggctagctctagcagacaaaattgttatttcaaaataatttaaacttggcataaatttatttttatgaaagaaaggaaaaggtatcggctaaagatccttctggtagaaatccttttattctcctgtctcactgttttcccagtttgtacattgcccaattcacttggcaccactgaaaccctccgaggaaacccagagaaaaagtgtctcctatgcccaggaactggcatcccagagagattttctaccataaggagcaggaagagggaggccagctgatctttctgggccggaccataagagggagggtgggtgagccccaggaggyggcgtagggtgcagtgggggaggatggggtaagagggagggtgggtgagccccaggaggcagtgtagggtgcagtgggggaggatggggtaggagtggatattttctttcagggtttagaataacaggctgaaagcaggcactacagtgtaagtgagcatgggaactaatggttagctcttttcatgctaaccccctagagcctagcacaggacttggcatgtacattacttaggtttgttgaatgartaaatgagacctttgaggtttttttagaccagggattataaactcaaactcttgccgtttgcggrtgaggggctgggcgtacagttggagtatgtaagaagtggtggggctgtatccactgaygatggtagctgctgtactgtcacccccaacaacaggttgtgtgctgggtacttacgatgtgtcaggtgctattcgaagtgcttcattggtgttatttcatttaagcttaattgtgatactttttaaaatcagaaggtgtagaataaagaacaaatgaaactagaaacgcctagaaagatgggtggcttctacatagccctttattctccctctgcttgtgctgcccgcctgcctgttggcttcgctgtggagctgatgtcccctgtacaaaggatgccctcctccccggctgtggcccattgttcttttaggcttctggactcctcctgggtcttcgctggttggcaagctctctcccctaattggcttttctcctggtgctccccaccttcctgtgggtcgaagcccttctgcccccagaagctcagagaagacaaggccaatatgtaagtcacattcctgggaagaactgaaaattttaatttcaaatgttaaagcactttgtctttttttttttttccaagtagtttaacatctctttggcaaataaaactagcatattgtgacaattgctgaggttttccttgcttgtaggagacatttattaagtcttatgaaatctgaaaggattatttccaaatatcaaagtaacattcacaaagcaatactgtataacttggaaatgtcccaagctttaggtcagtcaaaatgttctcttaatatgtgaaaacaaggtcattttcggtaaaagaagcaggtgagtaggaaatgtaagatatacttaacaggaatagccaagcgccttcctgaagatgatcccctgaaggccacaggaggacgatggcgggaagcagtctccttttctgatgttctggatgactgccttccatctcatttctccaggagagcccataagtagtgagcacttgcaccgggctgtcagtgtgaatgatgaagatttgctggtccgaatacttcaaggagggtgagagaactctgtcagttgttttttttcccccatgcctataaagtgcatagaaatacatgcagtagtttcattttgttttcctaaaaattcccatggctttgaaactgcctccaaaatggatctcaggtgactggtgtgagttaataaaccacagttaataaagatgctcrtgaagccccatgtaaatgttatattttgtgattgtgtaatagaaattgtaaaaggaattacaaggctgggtgtcatattttcttcccagaaataatttctgtctcttgcttataagccgcagcatttaggcaaatttcacccccaaatgcccacatctaatttctgatgaaacaagggactcgccaaatcaactgctttctaatttagaaggttgatgtaacactagaggggaaatggtgaatatagctgctgcagatgagatgtttgaagttaccttctacatgaaaagtagatgttatctaggttctttttgaatcaatagttttgagtgccctagaagacaagtcatttgtgaattcggctctgtaatttggagctcttaagagaaggttcccacaaaaagccaaagctgctacgctggagtatgtgcgtgaagacctccgaaagggctgctctctacccagtaggtgagatgggaggcaaggataaagcttgagtctccaccaatacagactcatgttcggtagagctgagagtcagyagtgaagacactgtcctcagctatcttaaagagctgtgttcactggagagtgctttatccgatggcctcatggctttgagccgaagcatgtatattttaagtgaaattacatcaattttctcttttatgatacatttgaatctcatagaatattaggtatatagtttagaagattcttagcagtctaagacaagaaaagatttaatggccacaaagaaattggaattttcagtaaaatgagtcattttacccacctaagcccygtgagaaccaccggctttgactctgcagtagctgtactgagcatgyttatctcttttctctgcttttcccaagccgtgttaaggttgatgttcccaataagtttggctttaccgctctgatggttgctgcccagaaaggatacaccaggtatggctcttcttttttttaaatctctcttggggatttaactttttattttattcaaaggctctggtcaggataaggatgggaggaaaaagggccatggaggaaccgtttcttttctatctcccaaacygtaccatatgatggcttagaaattcaactattgtaatcataaagttacacaacatgcaggagagaatgtaaatcatgtgttgaggaagagaggtagccatttaattacatgcaatatattttttatgttcttggaaaactggttattggaattcaattttttttttttaagatgtagagagagggatattctggaaaactttctgctaggttgctaagttataattttcacagatacactctcattrtctgttccacacagagataagtattaataygaatacctcattttcatttatattttaattaaatgccatttgaaaaaaacagaaatgcatcttcattacatgctaccatttaagaatacattaaaaatggccattcaaaggacagcraattattttggtagcccgatttgtttcatgtgctttcatttgattttaatgaataactcgtgtcaaaggtaaaagcccacatttctggaataaagaggtggttttctggtttaatggtgcctggttttaaaaccagctggcttctgaaggtgcagaagmaactgttgaaagatacatcttggatgctgtgttactcatttttactggactattgtgggttctgagtgatcaaggtgacttatctagctacacttaagtttgtttcctttaggcttgtgaaaatcctagtttctaayggcacagacgtgaatctgaagaatggaagtggcaaggacaggtaggaggtggkatatgactgaaattgtgctgatgttctcagaattgtgttgctaggcttgtgcccagaggggttgtgatttcaccaaaacattgtcttgagtttgacagtcctgagaggtgagtgggtcgctgaggaaagatggtgatcacaaaagctggcttgctcacatggtcttgtgcttttgctcaccagggtgcttaggggggcatctgttgtaacgtatggtgacttctctggcatggtccctgtgcccagtggacacgcagtgcacgggaaatggcagctacagagcagctctcgccatccgcgctgggcgtgggtgcaagcgcctgcccctggcaccccgtgcctctctcaggcccccgctgcatttcagcctcattcattgctaagaaatcttygttgtttctaaagaagcagacagaaattaccacaagagagacaccaagagcactttcctgaggtgagaggcacatgtccccttggagggctgagaacgctataggaaaagctcaggggaagaacgtgacacacataaaggacagatgagagtgttcctgaaagacctaaaaacacttgctcatctagtcattcatcaataaattccaactaacccatgtttattgatggattactacttgccaggtgctgtgctttggcacatgggtgaaacactgagcaaaatgccaggccctggcttcaggggctgtggtcacaacacacacagaaccagggcttgrgcactgtagatgacatcgacagacagctgccaaacaccttctgggggaggccttgaagaaaaccccaactaacttctcaaatcagaaggcctatcttctacatttacattctctgaacacaatacagcaatagattttaaataacaatatcttaaatatcacttataaatttaaaaagtatttttccaaataactcataggttgagactaagccatcaaytccaagtttgaaaagaaaaatagcaatctgaaaagggaaaagaaaaaaagtatgaggagagtaggaaaaatgaaagaattaaaagtagacattgattaaaaaatagaaaggttattgagaaatgagagttgcctcttaaacaaaaagctatctaataagatacaccaatcttttgtaaatctaagaagaaaaaaattagaagtttgaaagagaagaataactggttatagagaaaatgtaaacatgaaaagaagtttgtgtctataatagtagataatttcattgaaatggatactttttttctgagaaaatttaaaccgccaagtcaacccaagaagcagaaaattcgaaataaccaatatccatgcaagaaactagaaaattcatttaaaaattacctccaatgtaggctctgtggcttgactattcgaccagtgaacctgttcagattttctaggcactgataataaacttgggcttttccagagcagagaggaagctggaaagctccagaggacaaccttattgctaaaatttgatagaggaaaaaaaagctatttgtatgtttgtttgtgtgtaggtatttataaatctcttccatccctcctatgagggccataccagagggtaaggtattaggaaattttttaacgtaacaytttccatcagtcgattaaaggtgaaaacctttatttgtgtagatgcaaaacaaaaattgggtgtaacttggcatgtatgttaaaaagtatctttttttttttttttttttgagacggaatctcactctgtcctccagattggagtgcagtggcgcgatctcagcccactgcargctctgcctcccgggttcacgccattctcctgcctcagcctcccaagtagctggaactataggcgcccaccaccacacccggctaacttcttgtatttttagtagagatggggtttcaccgtgttagmmaggatggtcttgatagaagtatcttattttttaaagtgaaggwtactttcagcctttgaacagtgtatggcacatgggaggcaggaagtgtctgttgaatgaaggattcctttgattgcagcataccaaggtttcttttattttttaaatcatctcaatcagccagtgtcattcttagtattggcaaattcctttccaaaattagtagtgaagcccaggagagtggtggagagcttgatgtgaaatctgcatccctctgaggatgtggcgtgaccttgggcaggctacctaacctctccgtatctcagtttcatgtctgtaaaattcgaataacagaagtacttatagcttgtaggcatttaatgagttaatatgaaaaatgcgttaaaacagttcctggcatatggtaaatacagatatattttgttatttcatgattagacagtattttgaaggctgatctacttaagaagatgtgaactgagataagaggtatgatttatttcctgtagaacccaacagaatcaacttgaaaaacttagacttaataaggaggctcagtaaagtggacagctacaaggcaaagaaaagactttcttaaatccctgcaattactggttaataaatataatggggaaatagaatgaaaacaagaaaggtaggaaatctgaattaaaaaaaaccctaaaaaccttactgagagatataaaaatttaagaaataaagacatgtcatatgccagaatggcaagattgactattatacaatttttagttcttctcaaatactgcattgaggttcaatggaccctcaactggaattattcttgggaacctgtcaaaatgattgtaatttatctagaagaacaaatagataatatctactaaaactttgtcaaggaagaatgtggaaggacttgccttgacagttattaaaatgcctcataacgttatagtaattaatgtagtatgatactggaacaaataatcagaaaaaaagtagaatggaatggaaatcctcaaatagatccctatctacgtaagaacctggtatatgatgatggaagtaacataaaccattgaggaaggtattggaaaaataggatgtttgaaggaaaaagtcaagttagatcctggtcttatagcgtgtaccaaaataaattccagatgaattaagaattaaatgtaaaaaacaaaaccataaaaaatgaccagaaaacacagaggcataattattttatcttgtaatgtgaaaggaayaaatgcattgaaaggaatcattaagaaaaagattgagtgtattatatatttttaaaaacttaattacaatgttaaggayattccagggaaatatttacaaatgtattagagacaaattaccagcatctttaatgtacagaacacacacatgcccatacatatactccaaaaaagcctccacacacagtagaaaaaagcagtttacacaagaagacaatttatagcagaatcaatataagcaattcatataaagatgtttagcattactagtaataacaatttttctatcaaattggtgattaaaaaatwcatgttggtaaagatgcagtgaaataacctgtactttcaaatatagttgatagaaatgtgaattggtatcatctttctggaaagcaatttggaaatgtgcatccatattaagccacatccatggacacagtgatcccattttaggaaataatcagaaatgcaaatacgattagtaagggtgtttgttgttgccttatttaagattgtggaaaatgtgaaacaactgaaacgtctgacaataatggactgattgaagttatgatacattcatatgatagaatatttagtatgtgttatgatatattcatatgatggaatatttagtatgccaatgctgttttcagtgcttaagtaaacagggaagtatatgaaataataagaaactgaaataatacttttaaaaggcagggagaagagaaaatcatacagaacaagagagaaaagacgggattttgtgtagagctaggaatgtgaccctgagcaggggactcagcagcaggcaagcggagcgggtcctccatttctggtgggcttgtactagggcacagtgggatgccctgcagggctgtgctcaggagtgtgctatgtcctggccactctccccttctcccaccttgtgaaccagagaggggaattcttatagagcagcagataacagaccccatgggtgccaggcagtttgagttcagatggcagttgggctggtggctgactccagctgcttggcccttggaggaccttggtggctttctgccagtgggaggtggtaagttcagggctgtgcctatccctgggaaggaagagcgcctggtctcaatgasctcattgctgggcaatccagagcctccggggctggagtctctggattgttaaaataatccaggattattaaacaatcctcctcaccacctagagcaaattcaacagaatcttaagagtttgttctctgtgaggtgaggctatgggtgactctgatatgggattttttttctaggtaccatgccttactttataatcagaaaagaggcattatttaaaaatcatgcagataggctgggcgtggtggctcacgcctgtaatcccagcactttgggaggctgaggcaggcggatcacgaggtcaggagtttgagaccagcctggccaggctggtgaaaccctgtctctactaaaaatacaaaaaattagccgagcatggtgttgtacgcctgtaatcccagctacttgaggggctgaatcaggagaatcactagaacccaggaggcggaggttgcagtgagccaagattgtgccagtgcaatccagcctgggcgatagagtgagactctgtctcaaaaaaaacaaacaaaaagtcatgcagayaattagagttctrtttgaatataatttaaaaaatgaagttttcttcccttagcaaaggtcattctaaagacctttgagtgcttgggaaagcagtatgaacaccctaaacccagcaggcaggtgctgcaccatgctgactgtcttctgggggtctccaagaaatgagggactgtgtgaggacatgcagctgcagagttctggcgccatctcagctcggctgtgccttgccttgggggctggatattccagttatcactcagaggctttgcacgtttccctattgagaagatcttctgttttattttccaactctctattttgaaatatttacayatttagaaaaaatgaaagaatagtacaacaaacacctgtataccccccacctaggcttggcagttgacatttggccatatttgcctctccttttttttttttttttttttcattcttgctgaactattctgaaattagtagatagcataacccttcacccctcaatacgtcagaaaatgtttcctaaaaacacagtcattaacctgcatagtaatcgtgtcatatcacttctaagacacttcaactaattccttaatatcactgatacacaaccaccctgcaggtctcccaacctgttccccaaaggtcttccacagctctatttgggaggtggtgtggggttttgggggtgttgtggggtgagacgttcccacatttcatctggccattctctctctttatagtctctggttctagaccagtcctctctttaaatttttttttttttttctcatagcagtgactctttgaggagagcagaccagttatcttatagaatgtcctatgttctggatttgcttgtctcccggttgtggggcaggcatttcacttgttcatctatccctttattaacaataaagttaaagacaggcttaagggctctattaggttgggtgctgtggctcctgcctgtaatcccagcactttgggaggccgaggcaggaagatcacttgaggccatgagtttgaaaycagcgtgggcaataagstgaaattttttaagaattaaaaaaaaattaaaggcttaattagactcaggttaacactttagcaagaatgcttcagagctagtgttgtgacttcatgttacatccattgggaggcctgtgatgcaggttgtctcacaggtagtgattctaggtttcattattttttttagaatgatgacagcaaattttcttctctgtaaagatacagttttcccattgcacttagaaaataatttctgggataattcattgccatgtgaatattccattccccattaacttttattttttatttatttttttttattttttgagacagagtcttgctctctctcccaggttggagtgcagtggcatgatctcggctcactgcaacctccgcctcctgggttcaagtgattctcctgcctcagcctcctgagtagctgggattataggctyttgccaccactcccagctaatttttatatttttagtagagatgaagttttgctgtgttgctcaggctggtcttgaactcctgagcttaggcaatccacccacctcggcctccaaaagtactaggattacaggggtgaacctctgtgcctggcctccccattaacttttacccaatcatttcagtgccaataattttattgcctgaatcaattatttaattgggaattgcaaataagggtttttctaactctatggttccttttatatttattagttggcagtcttctgtgaaaaacagcttccccccaccaactggggatggactacattttatccttaaaaaaaaaaaaaaaaagaaaatatttaatttttaaataccaatttttagagtaagaaattggtttgatagttatctctaatagtgtcaaatgagtattttttttcctttttctcttttttgaatatcatggactttggatgttttaaaatccaatattttaccctcagttacagtcactattcattttttattgagatataattcagataccataaaattcaccttttaaaacatacaattcaacatctaaaaatgtattcacaaagttgtggaaccaccactactatctacttccagaatattcatcccctgcccccctgaaagaagccctgccctcttcagcaatcacaccccattactccttcccttcagccgcaggcaaccgctcacctgctagttctgtcttgcagatgtgcctgttctggacatttcgtataaatggaatcagacaatatgtggcctttcatgkctggcatctttcagcacagtgtttcgaggttcatgcatgtttgtagcacttcatttctaatattccattgtatggatataccacattttgtacatcagttgatggatacgtgtacgttttatatgaacagttcccatggcttttccactcaagttaggatttcttggtttaagccaggtagggtaaaaggtggagctgagtttggtgactgtgcttattgtcaaatgcygcttcttccatatgttgcagtctaatgctggcgtgctrtgcgggacacctagatgttgtgaaatatctccgaagacatggcgcttcttggcaggctagagacctgggaggctgtacagctctgcactgggctgcagatggaggccactgcagtgtgattgagtggatgataaaggatggctgtgaggtaygggacctgccttgttaaccacgcacatatcgttaagaatctgaaatgctgctccatggggtctggcagaagcagggcctttgattagctaaccttagaaatgctggagaaarttttctgacttagcaagaaagcccctgaaaccttagaatggacatgagagkgagctttccgattgtcatgggggtttatcttgtgtagggaaaagaaacaggtctgaatccagagctggacctgatgcttctactttctttcttttttttttttttttttgagatggagtctcactctgtcgcccacgctggagtgcagtggcgcgatctcggttcattgaggcctccgcctcccaggttcaagcgattctcctgcctcagcctccctggtagctgggactacaggcacatgccaccatgcccaactaatttttgtatttttagtagagacggggtttcaccatgttggccaggctggtcttgaactcctgaccttaagtgatccacccgcctcagcctcccaaagtgctgggattacaagtgtgagccaccgtgcccagcctgatgtttctactttgttcttttgttcatttgcttctctctccattcagtctgtcaccaaagctttactaagcatgtaccagatattatttcaaatggtggagatacaaagatattaagagagcccttatagccattgtgcttcttgttacttctaaaattaggtaatttttattcttggtttgttttaaagattagtcattacaaaaaatttccaaagaggaaactgaccatatcaagaataaaacatttcagttctttgcatctttacctggaaacaggcaagtggtctacttttgatttcacgttatcagaaactgcaaatttgatttagcaaatagaagcagtgttgttggacgtctatagatatttgaagatgggtaattagaattagatcaattatggaaattgctggtaactttgaaaactttatttcaagactttgaagaaattagctaaaaatttcaaagcatggaactaaagaatgatggacaaagttctgtgctatctgtgactgccagatggtgtgtagagtgctgagaaattaagtcgatgacctggaaaatcaactcaaattgagaaaagtcatgtctcctggaagatgtcagtagatttcttctagtttgtttctgaagggtaattgagggaaagtgagactgcagttatgggatctatctggttcctgctgctgcttttggagaattaagaaaagtgcccccttataggaaaaatctcagtcattaaaaatttattacatttcttattttccttatgttttagagacaggcacagaggcagaaggctgagtcagtgggcttccatagtagagccgggcccacgtgccatgtgtggtagtgacagccacrcactccttgattggtttatgatgaattctgggcaggttttgcacctagtgaaagtctgtggttgaaaaagaaggttgtactttgctgaaagaagtcaagcatckgggccgggcacagtggcttatgcctgtaatcccagcactttgggaggccaaggcgggtggatcacttgaggtcaggagtttgagaccaacctggccaacatggtgaaaccctgtctctactaaaaatacaaaaattagccaggcgtggtggtgggcacctgtaatcccagctattagggaggctgaagcaggagaattgcttgaacccaggaggtggaggttgcagtgagccaagattgtgccactgcactccagcctgggtgacagagtgagactccatctcaaataaataaatcattcacaatagggcaaatctctgctatcaacatttaaatactggagttttggaaatgtaggctctctgggcttcagatatgaatatacttatttgggataaattccatctttctttgaagcactggaactactttgcagaggacagaacaataagcatggatgtgtttactatagatttccacatgactggcctggtggcggatggatgatgtcaacatgagtctttccatattctggcaggtggctcacctgatgcttctgaagcccatgggaaggacttgagagccaatcaccaccttcttcccaaatgtaatgatcatatactaagagtgacttatttacttggcgactgacttattcatttgtgcatttaatgatccatgtgatctcaggaaaggcacttctctgaggtttattttgattgtttgtaaaccaagaataaaaatacctacctctgattaacgtttaggaccaaaagagaaagtgtgtgtaaagagggttgaaagctgtgtaaagcatcatgtaatatgaggtgcttattttattattctttaaatataatggagtgtgttgcccacaggttagttctttgcatgaagaagagctgcaaatccaaatcatgttacagtggataatcttatatgtagaaataccctgaagtgctcccaagatctcctggaaattccttgtttgtttttccattctgatgttttactaaagctatggatcatctttgagtaattcttctgtaacagattgtgtgtgtgygtkcacgtgctcatgtgtgcttatgtgcacatggtatgcgtgtgtgcatacacacgagtgtgtgtgcgtktctgagcacaaacacgtatctgtctttacttcagcaccactcttcatggattggcgatgtcttcattggaattggaagcgacaatatttacattttcttaatctaaaatatttattttaaaacactaaattgagagatttcagtgtagagaagatgatcaggaaacagccatctgattactgggcacactgttttggagaagcctttagtcagacttttcagacagagtttgtgtaatgaatctggttgttctgtattttacctgtaggtctcctgcctaaaattgataagyattagtaagtataagtgtgtatatatattattactgtcttgttccagaaaggatgtaaagctgcttacaacaatacataaaagtaagaaaaatgaatgctargtgaggaaagttaggcaagagaaaataagaactccccaggggccaagtggaaagtagttcagttaacttttctagcccatcttttttccactttaaaggatgtagatgaagaagccggtggggagaccctggggcctctcagcaccaaaatgtgacttaaattagcacagtgcaatgaaccaaatatagaaagacggctatctaagtccgggtgttggggcaagcaaatattccttttataagtttgaatcattttaagaaaaagaaattgggctcaacacagctgtttctctggcccaacaggtagacgtcgtggacactggttcaggatggaccccactcatgagagtctctgcggtgtcgggaaatcagagggtggcctctcttctaattgatgctggggccaatgtgaatgtgaaggacagaaatggaaagacgccccttatggtaggtcctcctcccgaaaataggcagttttctacgtggaattaakgtcagagctttttctgtaattagacaattcttgtgagttcagccctgcaccagcccttgggtttgactgtgtgtgtgtgttccctgtcggcttgttcataagggcatgaggctgtcactagaatactttcgttgtctttttacaactatttaaggactaaagaacccctgtccccaggaccactgtgggatcaaaacagaactggtgaaacaaagaacaagctgctttctgttctggttttagtgtggakagagggagtccattttccattttcyctggagttgctaccatayagctgcagaggaagcgctgtgcctgcaggccatgcaaagccacagtggtcttttggggttgcagggggrytgytgggaccctgcatgtgcyaggctcatgcccyctgctgtgtgtgccctggagggagaagytcatgcacaccaccctgggttttgttttctaggtggctgtgttaaataatcatgaagagttagttcagttacttcttgacaaaggggcagatgcaagtgtaaaaaatgaggtaaatgagtccatctttatgtaaagattttcctyggagggggagaaaacatttataagcatgtaaaatttttgttgtttcctgtttcagttcggcaaaggtgtcctagaaatggccagagtttttgacagacaggttgggatgctctttctgcctatcaaggctaatttttagtccttctagactcagaaaaaccaccaaaaccctggattacattcgcctgtctgttttgtttatctagagtgtagtctccktattagaagaaaggaaaaaaaagcagaggccaaagaagtcttktgtctgctgatgagagcaccactcatctgcgaaacgcacgtaaaacaaagtgaaccgtgactgttaaactagggatgggaaattctgcatcttggggggctgtacatttatttatttagttgaagattcactgatcccactttgaaatacatctttttacctaagcatgtgcgtatgtggtaccatcattgggtgtctgtagaatggggatgttttcttgcacttgcgccttttggagttagacatgaaacaaaatatttatgcaccggagctacacaaacacacatggggtctcccactcccggctcctgccccgcaagctgtccttctaccatgctaggccttgttggaattctttccctcatgtgttttcaattaaatcctcccctcccaacttagggcttccaggctggttgtcaggccgctgctccctcctggagtggcgctcctccgaaaagcccaggagttttctcttcagctgttggcctcacatcaaagctcagaatacatatttcaggactctgattctgttctattggaggtgtctgattgagggtcagcctttttggccacagacaggtctaatgtgtttgcatatactcatgccctgacaatggaagactcagcctgctgatgggtggacgatgtagccaaagggtagtatattaaattttgtcttcagagcagaaggttttctgatgctgatcatgcagttcctagacaagtaggaattaactgcaaccatgtctgctggttgggagcttaaagacacaaatgtggtagagcttcaactcagcaaacacacttcaaaatcagcaaaaaagtgagcacacagaccacatgagtttatgtctccagagagacactggttaacttgaccccatgggaaaaccagctacataggtctgtagaggagtggattttttttttcctgtagggaaagcctaataaaaggtaattaaagctccaaagcttttgctgaggggcatagagaaaaagcacacaattttattgacgttagcaatcagctttattccaaagagcccacagaatattcgttttaggaattggatttgtggaccatatatagtccattccttagatatttcatgagtgttttaccttttgtacaaatgcaaattcctttagatttgccagattaggtttttaaaacctctttaaaaattggagcacatttacaactctccagaggtccctcctttggttggtggtcaatgttgatgttcaccttagtttcattttttggtctgttgtagactgtattcactagcctgctcttatggtaggagtgtgcatcccttctggttgacatcaagcttggcaaaactgcccaccctcccgatcgatattgaaccatccttatattcttgagatcatctccctgggttatggtggactgcaggattcttcatgctcatatgctatgtatgtttgctctttttcttctttttacttaatgagattagaaagtggcgtatacactgttagaattttcctaaagagcaactcatagttttattagctctactgtattctaatgaacttatccttaggtctacaaattcatttcttctattttttcccctgggtttattttattgttccttttataactttatagtagatattaagttccctttttcatcctttacaaattaatttatagatttagggctatgaattttcccccagcagtgctttagttacattatcatagaagttttctaaacttttctaatgaaaaattcaactgggagaacttgctaagtacacatttcgtagccccatctctgctctctgaattggaatcttcagggaaagggcatgagcaatggattttaatgggtttgaacaagcatcacaagtgaggtcttctaattctaagatcttgagaatccctaccatcacatgtgctattagaaatgttttcacttgctgttttctaatctgcaattcatctttgaaaactaatgaatcaattcatttctagggtatggaattattttttgagaatttttattcctccaaggcacttggaaagatgatatattctgtatgtttggagtatcctgtttgatatatatcaattatgtctgaagttctgtatgtactaatttttgccagcttgtgtgatcataggtggagagtggtaagaataaagacttcttcggctgggtgccgtggctcacacctgtaatcccagcattttgagaggccaaggtgggcggatcatgaggtcaggagtttgagaccagcctggccaacacagtgaaacctcatctctactataaatacaaaaattagccaggcgtggtggcacgtgcctgtaatcccagctactcaggaggctgaggcaggagaatcgcttcaagccaggaggcggaggttgcagtgagctgagatagcaccattgcactccagcccgggtgacagagtgagactccgtcttaaaaaacaaaaaaaaaaagactcctttattcttgttagcattttgtatttgtatttttgtattttctgtagttttattaagttggatgctgtgttttttaaataggtatctatttacacttagatttttcataccaaataactccgatattgtctctaccactgcttgcttgctttttggatttcttatgtaaatagatgagttttaaaaaattaggttatacattcacattgttcaaaaaccatatcatgccccaccccccgtgttgtgtgtgagcatcttccttcctgtgccgtggtctcacacgttcatgaggttggtagcacacaccccttatgcacccccaccctgccaaccattcttcttagtttcttatgtactgctccaaagttttctcaagcatctataaatgaatgagaatacatttttctacatgaaggccttccgccaatttttgtaacattctcagtaacaaatgagagacacattgatatttacctttatacaatttattgggtttaatattcataacaataactttttctactgaaatagcagtttgtgtttacctgtcgaaccccaatatgagaaatgtgtacaaaagcaacagactgtgatagaaaaaggtatgtgaaaaaattagcaaaccaaagcatgataaatggatgaagcactataaaattactttgctgtttacgtaactgtatctttaatctgtactgtgctaaacagcctatagccaagttttaaagagttacaggaacaactgctacacattcaaagaacaggcattcactgcagcctcctgatttgacctgatgggagggacaggagaatgagtcactctgccaccacttttcctgccttggatttgtagaggatttgttttgctctaatttgtttttcctatatctgccctactaaggtacctgcttataggccatgaaaataaaacgccattcaactttttttttgtaaagctaaaataatcacatgatacttattctttggaggatttaaaatgtgctaaatggaggactaaagagttaccttataggagaatcatggggaacagagaaactgctttttgaagatgatgtggaaggtcagggtgggttacagggcattcaacctggaagagctgaatagctttacattgagaattactttgtatgttaaatcttctggccatcattatccattattggatattttaacaattttatagttattcttaatttttctcatatgaaactgtaatggctgtactagaagctgccattactgttccaaaaagtaaaggggattttctctacaaaaggaaagaaaatggcacattcacatgtaggtaagtagcttctggaaacatcctcactgcacagaaatggttctcagcatggggctcccaaactttcttagagtgtcatttgttttagtatcagagttttcaaataggtttaaaagcagtagatgtcaataggaactttaaggtgagtcaagagaattttgtaattatagataagttgattttctgtggctaacttccccttctaattagaacaagacattgggtgggaggtcctctgctggacttaggctggtggggttgctctgggctgcagccctggagaaggttgggctttgggcatcccttgggtgggccttgtagggatagccacacactgcagcagtcaccactttggctgatctaaagtagcaatggaagtagtgatttgactgtcaaactggagatgcatcggcctgtggtttgacctgggaaaggggcttgtgtctgggtgatagggaaaggtaaacagatgtattagccactggctttgtgtgggcagctgtgttgaatcagcctgctgctgagtcacagggagtaactgcagctgcctagggctggcttctagcatggagaggagaggaaaaggggtcctgcaatgtcccccagcagcctgtcattgtgtgtgaaactcctagcctgagagccccacctctggtcagcactagtgttgggagacttctgggagggattgtgactttcagctgggtaactggtgtctggctgaggccatcttgagcgcagtgaggaaggatctccagcctgagtgtgccgtgggccccccgaatacataggggagccctgcaaagcagttttgaaatgagtagtacatctcacgaagaaagtctgcaagaggtcgaggtgcatgagaaagatctggccctgctgccctggcgccaccttgtgccctttctgctgctgggggtctcattggctcagagtgcttagtaaacatcagtggcgagggggcaggaggatgctcagccctgccagtcggcccagcaccaggctctttttagcaccgtggagaccataggctccttaagaacattttgacacagttttagccggttttttttttttttttttttttttgaggatgcattgatgtattgatttgcctgggaacaatggcctatagttcagcctgagaattctcataaagttaagaaggcataaaaatgcccccccccgagactcgtcaggagtattgactctcctacagtttaatttgctgcttttgtggtttctgtgatgtcatcccacatgtgtaagctggaaaaatccacgctgtgaaatgtaacctcctgtgtgtatttccacaatggagaatgttaggcttcgtttccctcggttgctacacatctgattacatgtgtcaggaaaacaaacttaaaaaatttcaggagacaaacctttcagcggaattgcctggaacccatgaagtgaggtcatagaacctacaactataataagctgtaggaagaaaagtagcctctgggctactttgtgtctagtcacattgactttccaggtgatggccctacaaaactcaaaccacctctattattcatgcctatacagtcttttaaaaaaatactagattgccattgaaatataagtattgattttttttgttttgaggatataaaaaagaatactccaccccgtgcctcccccaaccacaaaacaccctggttattggttcctaagttatgttaaaatggaatttgctgctaaatatgcttcacttgataaatactgcatcttggaaggattaatactgtccatattgtaagggaatattagtttaaatatgttcttattcagaaataaaatgcatggctctataataacacattagtactgtagagataagaatgtgtcatcagccatggcccctaagtggccattgatgacatggcataagatcacagttttaacctcctttaatatcaaactctcctggctctctgaaatagaagcataggaattacagctaagaacaaacaacaaaagaaaaactcagttcatatcctcttataattggaggaagggctaacatgccagatctaaggatttgggcatctaaaaagacaatgcccacgtaatgcaccataaaattctgtaaacctttttaatagtatatatatgtttggctttagtacaattaccaagtgtaatcagttacagtaattctgtatgtatctcagcagtattattttccagcatggctttacattttaaagaacttaataactatagaataaacagatgcatgctatacgagttggaatgtattagagctgggttcccttttgtgtgtgtttgtgtcacgtgtttagttt

SEQ ID NO: 98189 - DNA, 13758 bp, Homo sapiens
tatgtgcattaaacttttggaaaataatttaacttcagatgatatttcaggatcagaatgtctgaataatgttaacacatttttgtcatgatgtcttaacattaagacagtaagacattctgtaagattgcatgatgagaagacatagataaagtgagaagttattgagacaatggggctaaagtatttattaatgttgactagtaaaatacaatgaggatctagaagattttatgtctccatagatcaccacatcctattattctttttctaccatatatggtaaaatcattcacaaaaagtaaaacagggaactgttttgtaaaattatgtatttatgataaattatagaatcatatcttgtaaattcacagcataagcgtctgaatctataaaatacatgtatgtataaatatacaaacttctatttacaaataattagcttccaggattgtgtctgataacttttaatgataataaatgtccatgtcagatcatattttgtaatcataatcaacctatcactgaaataatttttgaggcgtttctcatatttgagtatttcatagtcagcatttcagtattgtcatccatcgctatattctcctcattaccaggagatggcgctgtgggttttaaatcgcaaagctaaaaattcccaaagccgcgctgaaattttcagtttctttctttccttaatttgtgcacgccaggcaatccctaacagtgtttaccattttttcctcgaacaagtttaatctttaaaattttttcaaatgtttaatattctgtgatgataagattccaggggaaagaagggtctgacacaaataagcataacagccccctagggaggacaactgaatgaaggagttgtcccaagtaggcgaggcggtatgaattcctcataaactcttttcactagttttgctctacctgcacccgcatgtcctacattgttctctgaggtttcagcagtgataatgcaggcgctaagttattcgctcactgtacggtccccctggccttcaaagtcgccaaagtggggaaagaccacgcaggagccaggtgagaccctcgcggtgggctcggggacttgtgtgtgcacctcgcgctgagaaggctgcctcccggggctcagggtttgtcttcaaggtctgttcaaatttaggctaactcgtccccaaacagtagtgaggaccagtatgttttctgtaaaatagatacagacaaggaaaatcttttcgaaagaacgctatacgaacaagtttcaactttcccacagtcgaaatttttggaattgccaagcaacttggaaagactagcaagacggggggcccttggctcactgccaggaatgcgccagctcgcgctagtcccccagcgtcgtcaccctcgctgtcctcctcctcatgagcccacacatgtggacccagtctctctgaagtgagctttgtaggactcggcggcgaaggggacgagaaaatacagatgacaaaacgacgccgaaaggcttgacctctggggctaatctctctgcctccgagtagatcccgcgctcccaaatccggcgggggcgcagtatggtgaaccccacacctagctccctcagctgcgtgggtttcaagctgacccaggcgccaccaggcagccccgagtgggcgagtcaagtgcaacttcaaggtcaatgtgcctctgactggggcctggagagctgccaagaatgctgggcttggagcgctggggtcgcgccccgctactgcgccttggaccccgcagtggagggcgctgagaccgcacccccctccccgggcagttttcaggagagggtccagctggggtctccgcggtggggtccagaaacgatattccgggttggattcttcctcggttggggaagcacagctggcggagaattcccacggctctcagtggattcgcttttccagagctgttctcaagcaaagttgtcatttttgccaaactttgtttttactttttagactgttctgaaagagataaattgaaaaacacagagagacaattttccttctcagaagatacacatagctacccaaattcagacttgtaacttttcaaactagtgaagtaataaactatttatcagtactataaaaataacaaagacgaacttctggctttactctttagagtagattatgttccattctgattttacttgggttcctatctcaaatttcaagcaaatatcaagatgatcattaagaaatttaaatagtacctagaaattagtttggtctgcagctcaatgcactaatttcaatgcggtgctgtctgctgaatattttaaactcctttcaaagcagtaggtgtattccctcccgcagtaacaaaacgatattcatctttacacaaggtgctctggcgtttataatttggtatccaacacccggccgagaatgttccctttcctgatgctttggccaaccggcctcgataagccaaccagcccagaaccaggggcgctgggctgggtgttcctcggggacggcgcccactgcccgcttggtccctggagtgtcccgagctgcctcccatacccctgctgcggacagagtgggggcagtcctctgcctctgtttcccaactgctttggtaactcagtgactctctgtgaaactgcagagtcagaggacttcccttccgtagttttcattctaagcggtcatctgtgagtcagaagatttcgccgtggcctgatttcccaccctttctgcccgcgcaagccgaaagcgctcatgttggcttttcctttgccacttttccaacttgccagttccatcaggagcccggatccttgcccagcttcttggcggagccaagttcgagcgcacagatttcccgagctccagcggccagggggcactgtgtgagcggctgacgtcacccctccgcccggccgaaaccaggcggcgggatcccacacagttgaggagagggagccgaggccgtgacttagggctggcgacgattaaaccaagtaacgagacaccgggcagatgtgttttcattgccctgtaagataaatgcagtgttaagtgcctgacaacttcccagaagcaatcagcaaaagtttacgagtgcataaacctcaaagaccattccctatcggttgttataaggccggtatttagagcttccataaattcttcggccttttcccaaagcaaagttttcagcgactattaagcagccacctcctccgggaagactagggggattttcttgaattacaaaaggaagaggcttttggctcctaccgagtaaaatgaagttgtgcaaaagtttgttccagaagcttggatggccagggagaggagggaggtggcaggaggtcgtggagatggggtcgggaagggccacgagatgcgctcaagtgtttgttgcctaagggcgaaagacaaaggtcctgcgaagatcctgggtctagctgagctggcagggcctttgccgccctcagtgtcgcccctgctctgccatcccggctctgccgctcacagccccgcatggcaccccccaccagtccctgacatgatcgatccttcgcccttcaaatgtccacttcgggccggcaagaatcctggcgccccgcagaaggtggcagcccacaaaaagggcaagctggctggagaactaagtcagacattgtgagatgtgtccccatcctgcccagagccacgaccgggccagcctccgccctcccgaaagtgacccaaggactttgataagttagtgtcatgcatacacgacccacctatgtttagagagaacctttgtttatgatcccagtgaaaacaaagctgctaattgaaaaacaataacactagcgtgtctttagctttctaaagggagaggttaacagctgcgaacgccgggggagggacggtgggaggggtgcggtgagcgaggggctgccctgcatgtaaacagcctcggggtcccagacgagacaagtgggaccgctcaagcctgcagaacccccggtctcggtcccaggcacaagagcctcccgtagccccgcctgatctttctcagtctttaggttccaggacatccaaaggagcgtaggtaaccgacgtctacgtagtatttctgtccccggaagactggatctcagggaattattatggaagatactgctgagcccctttcatcctttccaggtgaaaatacagacatttttgtgtcgccctcacccttcctttatgaaataaggtgcccaactgttctgatattaccattcaaaaacaggttctgtggcgaacctcatttgtgaatctattacagagattaatagattatttctcctttttcaactaattctcagtggggaaatttaaccatatggtaaggagagaattagaatttcatcacattagagcaaaatgtaatgaaaagagtccaacacctggggccaactccgaaagccacaattaaaaggtttttaatgaaaccagagaaaccaaaaattgcatagtcttcagtacttctgccatataagaaagagttattggaaggtgttgggaaatattgtttttacttatgtcataaggatgaaaaccagctgctaaataccatgtgtacccagagaccgaactcaggagtgagatgaccgcgtgtaccagtgcccatccggagaggagcacttgtttttacattctcccttcccgaaccctccaagaacaaccgaggctgatccagatgtccttaaatggcttccgggtaaataaatatgcataaatgcctcacttcgtgtgggagcggatttgactcctggtgaagttgactcttttgaagcaatcagattttcatcttaaggaaagtttgagaaaccggtttgtttgtttgtttgttttcttcctgtttaggaaattgtgtacttcacaattaccatcactgtaacagttatttggagaccactgcaaaatcactgccaccccaccttaaaaaaaaatgggctgcatgatcacttgctcttcattttgcttttttctttctttttttccaatctgggtaggaaatgggcagtggcgggtgtggaaacgaggcagagtgttcggggggacgactgctttgctctctgaccagctgaaaacctagagtgaattttgggcaagccagctgggacaccaccttctctcggaaagtcccatccccaaatccagaccagtcatcctacgaacaggggtggagtataattctcgcccggaagggtaatttagcacaagctgagacagcagtggcgagggaagggcagtggggggtggggtgcggtgggtgggggcgtctgctttccacaggactcccaggcttcgccgccgatctacaatttgctgaaggagcaaagaacatcctcggctctaagtagggcttttagtgtgctcattgatgagtgaaagtcgccacacatgtcaagctaaaggcagttgttgggttactaacaggacccagcgccttgcaaacatatgcgctaagctgtgtatacagatggcaggcagaataatggagcaggcgccttttataaagctctagctgctgcctgtcttcagacctgggaaatgaaactattcagacttgcggccagatagcgcctgcgattgtttgttaccgttttaatcctattaattaaaacgttaacctgattgggtagaaagcgctgtcccaacaggcgagtcttcttcataataacctactcagagataatgatgtaaaagactcccccgtctgtggcggcggctgtttgatgggtccggaaatctcttgaaggtgaatccaagcaagataaacggtgcggagaggaggcgcggggctgggctcatatcggcggcggcggcggctccactccctccgcgcccaccctcccaccatgcggggccgcggcccatggtgagccccagcagccagcaccatcggctggagacgaagaagaagaagaagaggaggcggcgagcgcgggggaaggcgaaaaagaaaaagaaagaaggggagagggctcccggcagcaccaggaccgacgcgcgcaccagctccggagcccagctcgcgcgcgtctgtggggccgcctgactccggggccaaagcggcggcggcggcagcgggcgcggcggcccgggctgcgcaccggcgcgggaccaaggagcgcgggatgcacctcggtgcagcggccgccggcgaggacgacctcttcctgcacaagagcctgagcgcctccacctccaagcgcttggaagcggctttccgctccacgcccccgggcatggacctgtccctggcgccgccgcctcgggaacgcccggcgtcctcctcctcgtcgcccctgggctgcttcgagccggctgaccccgagggggcagggctgctgttgccgccgcctggaggaggcggcggcggcagcgcgggaagtggcggcggcggcggcggcggggtgggtgtccccgggctgctagtagkttcagccggcgttgggggcgaccctagcctaagcagcctgccggccggggccgccctttgcctcaagtacggcgaaagcgcgagccggggctcggtggccgagagcagcggcggcgagcagagccccgacgacgacagcgacggtcgctgcgagctcgtgctgcgggccggagtagccgacccgcgggcctccccgggagcgggaggtggtggcgcgaaggcagccgagggctgctccaatgcccacctccacggcggcgccagcgtccccccggggggcctgggcggcggcggcggcgggggtagcagcagcggtagcagtggcggcggtggcggtagcggtagcggcagcggcggcagcagcagcagcagcagcagcagcagcaagaaatccaaagagcaaaaggcgctgcggcttaacatcaatgcccgagagcgccggcggatgcacgacctgaacgacgcgctggacgagctgcgcgcggtgatcccctacgcgcacagcccctcggtgcgaaagctctccaagatcgccacgctgctgctcgccaagaactacatcctcatgcaggcgcaggccctggaggagatgcggcgcctagtcgcctacctcaaccagggccaggccatctcggctgcctccctgcccagctcggcggctgcagcggcagcagctgctgccctgcacccggcgctcggcgcctacgagcaggcagccggctacccgttcagcgccggactgcccccggctgcctcctgcccggagaagtgcgccctgtttaacagcgtctcctccagcctctgcaaacagtgcacggagaagccttaaacacacccccgaaaaacacaagaccgacccaaaatctagaggaaagcgaaaagctgctccccaccccctttattttggtcctctcgtagttgtgaaacacttgcagagcaaacaaagcagaggcaagaactgaggagaagtatcagagacaaacgggacttttagccttgacatccccagaatctcggtctttggggtggggagggagggaggagggaggtggagttgggatggagtatggatgtcttttttttctcagaaaagtggcaactttggtggcagcctagaccgcgaggaagtggaatcttccttaaaggtgaaacataagttgagaagtagtgcttggttattaagcctggagagtgtttgaatggcaaaatactaatcctactaataattgtggatttggctagtgctgagggggagaggaggggttaggggttgggtagcatgagagatggaatattcattcagacaaatcagaaagggcacttgaaaataaattttgattctgagccaggagaaaaacttgaaatgttgacttaagtgagggggaaataaaacccagagagagagagagagcgagagagagagacatgttactatgaaagacttgtattttttattgtctctgaactttaatcctgtgaaaatgctcaaagttttggcgagagtgatataaaaaaactgactgtggctgaaagaattgcatttaaaaatatttatgtgcaccttgttactttctactctgcaatgatgtattaacaattcatggtatttatttgttattcttcaatgacccttccacatcaacagtatttatcatgtgttaaagtcatgggtcttatgtgcagatttttttaatgcctctaaaattgttttatagattacttatgctgtgtgccaagtgtttaaaggtttatttgccaacaagtatgaagagaaatattgatgtatctgagctgcttaggtttatgaaaggtcacctggatattttcagttgcatcatccctgtatttaaattgagctttaataaattgcttcagtccaaaaattacaggaaaggtgtattcttaattgatgaatgaattgatctcttttttgaaaggggactcctttacattccaaaagggaaaaacatcacagcaatagttgctatacgtaagaacatgctaagcaaatatttttccaggctgtgctgtgcatttttaaaaggtctaatttaattgcttttaatatatatgtacatatatgttattttaactgtggagaattatttaagttaaaagactggtttgatttgcctatggtgtgaaatcctttgttatttttctaaaaaaataaaatttaaaaagaaagaaaactaaggaagaacaagaagctatttacccaaagtgagctttcagttttagttttgcatggctgtttgactgcctttccgccctatgaaaatcaagaaaatcttttttaaaaatggagtcctgctattttccactccttgcagataatacaaattcagtttgtcaggttggatggtgagttgggagctgtgatggatctgttggcgggttttggatgtgtaaagaatgatatatatattaaataggtcaatcagactatgacagctatgtacgaccatttgtatgtgtatctatgtcagaaagaatctttattaaaatattttgatcaaacattttattatgctgtgctttgtggaagaagcaatcacctctcttctgtgttactctttgcttgaaaggtaacaaaaaagaaaggagtttcagagaaggtggaactaaagtttttgcagggatgcacaattagaagtagccctaatttacttgtttacttgttacaaggaggagagatgaatggggtcagtggtgaaacccagaagagattccaagtttctggctactggcatgaactttgaaggccacattctccctggaaatctttttccacttgtatggcactgttaaccatgccagggcccgtcaaagagggtaaagtttcttaagagtttgtcatcaaaatttctacctccaaatgcgtgaagggcaaggaaaaaaaatggacttggattctctgagcactgatttcactgtgactttctacttttttgtgataaaaagaattaacttgaatcatataagcatacacaatgcccatagagatgatcagaattttactagtgttgcttgatgatgagatttttaggttccgtgtttggatttaggctttgattctgttaaagaatgactgtcgagacttgtattttgacctttatattgccctcaaatatagaaggtgtgattttttactgtggcacaggttgcagagatagtagtggtggtggtgcagaagttagatgtttcctctgtacccagtatgctaaatgcatttttttctatacagcctctgctcataaagatatccctaaatgccatcaaacttagtggggggtgaggaaggatattttctactccacttgccatcaaaaaagattaatcagaacttgtaacttttcagaaaacataactgcaaagggccttgaagctggagccctcccagactgggagtgagggcagaaggagggaggagaccagggcagcccccaggcaggagccgacctgtctctcagcatttaccagacaaagcctgggtgcgtctaattatgattattaaaacaatttccatgacgatgtctaatattatgttaatttgaaaacaactgtgtatgaaaactgtcgactataatacctaaattcatttaatgaaacacatcgttaaggcaattaaacctcctggatgtgattaagaaacataattacgacactgttctgcgccataattgggtgtctttaatcaaggggtaaagtgatcagcaacacagccattagtttgtattgttctggccctgctgtccatcattctgattaggaattagccacagccaccaccagtcagatttttttttttccttttgcatattaacattgtaggggacacatttgctgcaagatttaatgcttaatatttctcattattagaaggccttcttgaaatacttcctttgcaacctttgtactgttcaactattattaaaaattgtacagaagaacacatcttgaactttagggaaaaaataaagaaatgagaatcctcctctctttaaccactcagctttcaatcttagtcctgaaggagacttggatgggggtggggataggaagatattgagaataaattcaaatgtcacatgaataggcataattatttagtgtattaggcttattaacatttattttcattttgataattttagacaaatcaaccctctttccaaacctaggaattggccagcctgtggttttagcaattaacatgggacatctgaaagaaacaggagaggagttttctgtggtttagttaggtgatcctccctgccctaactccaacctttctaaagggttttcagcagcagctttaagaaaaggaagccagtgattggagggacaacactttccactcctgataaagccctagagctactttctttctggggtctgagccctgagttttggcctagtctgaagagttagcccacacaccattgaccccagctgtctgtccagcatggagcgcacaggtcggaaatgggggactgagcaccaggggaatcagtgtggtcttgcaaaagtctccttgggttagagcagacagcctggttcctaagactgcagcatgtgccagagtgcaagggtatcttggccacccctgagcttgctctggcatccaccacgccttggggtgcttctctcaggcacacccatcccgccagtccgatctctctgctggtgttccttacagagctgagagtggacagatgaggccaagcaaaaactgagtcccactggctttttattctcacttagggtcccgtcgccagcttgacactggggaccaacagaagggttagctttgcgtgtacgactgcaggaccagcaaatgatcatcttcgatagagctctctagttacccgtgcttctccctccctatggtatgtgtttgtgtgtgtgtgtgtgcgtgtgtgtgcgtgtgtgtgcgcgcgcgcgcgcacccgcacgcagtctgcaatgccctcaccagtccccgcagctgggcaacccctccaagaccctgtgttacgcttaaattcctctccctcctatcgtacccaccatccatccttacagcagggaggccgagactcacagaattcccttctccaccaactcgcactcttggtctagcacgcggaaaccgaacctttctacgcggcccgaccttgcgattgctccagcatgagtggcattgacttttccaatgtaatgacttatgaaagatataatcatgtgttaaattgaatcctccgtttaactgttaatggtgtgctctgggcacatttacgtatttgatgctatggtaactaattaccactagaaaaaaggataatacacttcccagactttgaaaaataatcatgagttcacttcccggctcgcagcacatcgtggcggccctgccgggaggagcgaggaaacgagtggaaacccgaaagtgtgctcatggaatgcaggaggtaatgaatcctggtcaggtgagactacttagtcaaacctttaatgaaaacgtgattcacatggaaagcaggagtgggagggaacaactacacaaaggtgcctttaaacaaaattaaatggcaaaacctgactatcagaaacatgaataggtttctttcaattaaaatgcaggtaagactaaattatccacgtgccaagcaactttacatcaattaacatttttttgttgtgtgggcaaagtaaatgagcccggctcctgtgctctctgtattggcatatacaacttgaaagtctctggatttgccaagccaatgagctgcaggtttatttaaattcggccttttaaatcaaactttagacacagtaggtggaaggagggaaagagaaggaaaaacaaggagtcagtaacttcagtttaacagtagaaacaactcttacggtgagagtcttttttgcccggcaaatctctggctcttctgatcgactggtgtttagaaccaaggttccagtaaacagggctgggtaggataacgaggagagtgtttgtgctgggacctggcaggactggaggaggaaaggagccgccttccagcaggtccagcatccctaggttgcaaacacaccaaatgacgtccacgcagcactcgcgcccaccgcgctgtttttgcttgcgcagtgctcccgaagggattcgggatccgcatccggagggattcgggatccgcatccgaagagcaccccttctctcaggacttcccctgggaccgacgtttccagtcacccctgcgggcgcaattgtccttcaaccgccaagctccttgggacaaaaagagaacttcaggggctctgcctcaaactgtccttcgagggtggctcgaggatcgggttgtcccctgtatggcagcaggcatgtgggttcacacgcagctgccaggcttgtaagaggcaccccgcagccgcaccaaacccgaagcatccgcgaaagcgccccggttttaaaccccaaagagctgctcgcttcctcacgcagcagggaaactctgctcgctttccctgaggttagatttgtgttaaattctactaatttttctaaattactcgtcttaacaaatccaggagactgtttcttaactattgcaaaattatcaagtatactagaatgtgtgtgtgaattttccttctttctcttctccacttttctctactgtaggcagtacagaagtacagatttgagagctctgaaagagaaatgaatgggttgggaaggttagactgcagaggaaaagaggatttgtcagttatcaatcctcaccatccccaaccccactacatatatgatggacaaggctcacaagtcaccaccatgcttggatggggagttggctttaattatgcacaatgtgttattctccttctcagcttgggaaagagttaattctttcccaaagaccacagttgcccttgtctcctcaacctgattcagagatgcaataaaatatgaagcaaatttatggtctgtttcaagcattttattgctgtatttttaaattcatatatgcacatataagaactatgatctgtgaataatttgaaatgctatagaagaatgatacattttagataaaacataaccatatctttatataaattgtctgagattaaaataaaaaagaaaaatagatttctaatgtggaccaaaccgaaaaactaatggcagccataaactgctaaccacccataaattaacatcttcatcaaatgctaaaatggtatcactggttatataaagcaattactatttctccgtataag

SEQ ID NO: 98190 - DNA, 31575 bp, Homo sapiens
gtttatggcagctctccggattcatgtctctcagagcactgcaagcaccctggtggcattgggagggtacgatttgctaaagagaggcaccattccagtcaaggtaagaccaggccaaccatgccctgcctgccctgtttgggtctctgatagagacatcgaggaacttagcgggatggatgcatctccatggagtgatgcagggagacctctaaggttcccctggaggcactcatgactgccagatcttcttccttcagaggagaagaagttccctcaaatgatcaaacgtggaatcttcaacagagaacaccttaactcccagctaaaccaaccccttagggaatgctttctttttttcttttctctctctcgtttttttttttttggctacaaatggtcccctagcttcctcttgaacaccccagtccagaaaaagaagtagaagggaaggcagtggcatcaactccccagttttgcttagcctggccttagcattctgtattcaatcaactgacttcagtaagaggaagacttttctagaaggcggcatttagccatagcttggaacccattcctgctactgaccagctgtctgagtttgagggcttgtttttgtcatctgcaaaatgggggtggtgataataccgtccttgaagggtggatgtgaggagtaaatgtggacatggatgtgaggcgcttcactgggtgtcccactcatactaagagtgcagtagattttattattatttttaaaagattttctttgcaacaagctttagtctccgtggactgtcaccccctaggacattgctgcctggccatgcaggcttatcagcaaagcccaagaaaatcagtaagattttatctgtaaggaggccttttgcttgtggagggagggagctcccactgtcccagcaagtaagacagacctcagacatctgcccagaggccatgcattacaggcagcccgccagccccaccccaaccctgccagcgattccccagggccttcctttgcctcccacagggcaaaggagagcaaacaactttctggttgaaagataaagaaggcttcactcttccactcccgaatttactgaggaaaaagccaaagtcccagagatattgtgaggtgagtattttctttcaagatgtttgtggagtcacatgaaagtctttggggacccttcttcaagatgcagtcgatatcccatttaagaggtgtggttctggggcattgatccagtctcccactagggggagccgtctagctggccccctcttccacctccaggtgtttgctcccagcctgtgcctccagcaaatgcagatttggaggagctgaagatggtgaactcatttcctggggtgccagggctgacttgtggctctcagccctgtgcaactgccctagctgccagatatttacagcccattaacttgagaatttgtgttgaacccagtttcattctgcaggaggggaaagtggagaggatgaagcctgtctttcttgtgcaagatgcctgctctctaacctttggtgctgattttccttatcagctaatcagcttgcaaggagataggagctcatatctgacagcatcttgagaatgtgttcaggaaaaaaagctctaaggcatgagcagccactgaaatccaacagggccgaggctatttcaagcagtcaggccctctgcagttattggaaagcctggttctgagccctgagttactgtgagccgagcagctcccaaatgcataatgccctcttcctgatgtattgcctaatttctctcctattcaccgagcaaaaactcctgcagtcaaggcttgaatgttaagtagaatttctcagtcatttatgaagagtttaatttaaaaaaggttccagtagacaaagacgaacccatccattcctgctacgatggttttctcttctacataatgaataggattccatgttgttttattgagtggatgttttaatagatttactgaaccactaatgcatttatagtacttctttcttcatctcttgcaactcctcacatccagatatctttcatgtggttgctcctgaatctggcagagcaatttgaatgaaatattgtgtttgagaccttttcctgttgaacttcccatgacagaaggagcgaaaatcaatgagaccagaaatagtttctttcttgctgggtctctgagctgcctttgctgagatacttttgagacctgtatgggaaataaactactttttggcttattgaaggcttttaacaccaaattatataaaagatttggtggaattcttgcctttctttaggaagagggacacaaaagcactttcacttcccaaataatccagtcttcattgggatcctaagcatttccattaccagtattttgcttctgcccagagagggaagactgaattctacatccatcacacactctgttttctatatgaaaattctgttttcattgtggtaggcttcgctcctccccagaggccttaagcattggggactgaaggctttagactgatacttaaaaggagagaaggcagaaggcatttatgtgaagaggagaggagggctttctcctgctactttagcatggagacagtaagccaaatttatcttctcattccccataactccttttcttgagataatggctctggatcccaaacaccttgctcaaccatgaaaggaaacaaggccacctctgctatgagtcctcctagagagctaggatagtccccatccatccatccatccatccatctatccatccatccatccatccatctatccatccatccatccatccatccacccacccgtccacctattcatgtgaacatttctttaatccaaggagcatttgttaagcacttactctgtgccattctggggtacacaagagaatatgaactttcccttgatctttggcttgcagtctagttagggagaagaaagcataatttcattgcataaagcaatattaaggactaatagagctatatacaaaagcgtagcagtaactaagcagtccatcactgtgacattaaaagaacattagaaaataatacacagatgaaggaatggggccaggtagggcaattgcctattattatcctgtctttgtattgtgtgtgtgtgtctgtttttcttccagccctagcccatgtgcttatgtaagttatgttcatgtaatatagatttagttctgcctttcttattgaacatcataagcatttggcatctagacacacatacacacaaaaacacacgtgtgcatatgcagacatccacgtgtgcacacatgcacatatatatgtatgcacaccctcatatatatacacacacacgtgcatacatacacacacatatgcacatggagaaagagagagcgagactgtctttatggatcacaactaagaattttgataagaacacttttctaaatctatattcagtatttgttctatgtcagctaaggatacctgggggagaattagttttcttctttttcttaatgtttctaattgtgtttagaactactgagaatttacaagagattgttttgagagtaccttgtcttattttctcaaagaagaagttatgagacaagaagggtaatcaaacatcatgaggttgttagttaatgtcaagtcaaaacacatccagtcactggtgagagacattcgggctctataggcagggatgacccaaaagaccttttccccaaaatgttaatcatacagattggctttacctccttgcatcagaaacccaatactgggagttttttaaatgtaaaggtaggatagaataattagaagtctgtggcaagccgggtgcagtggctcatgcctgtaattccagcactttgggaggctgaggcaggtagatcacgagatcaggagattgagaccatcctggctaacatggtgaaaccccatctctactaaaaatacaaaaaattagctgggtgtggtggcgggcacctgtagtcccagctacttgggaggctgagacaggagaatggtgtgaacctgggaggcagagcttgcagtgagctgagatcacgccactgcactccagcctgggtggtgacagagcgagactccatctcaaaaaaaaaaaaaaaaaaaaaaagtctgtggcatatatgcgagtctacgaagctctagttgtagaaacccctgggagaattggggaattagctgtcaacatgatatattaacactgtaaactgtagtcataggttatttattttaaggcattttatttattccatagcgccaggtagagatacaagatcataaaacacaatgatgaaatacagcaaaactaatacaacattggtttattctgacagcaaaggatttgaacatggctatgagtatgctatttaagagttttctactagaaccaataaaatatgtcttctgtttttcctgactataaaaactctgaatttacagaaagaagagatcctaaactcgttggaactccagcttagagaccaagtctagaccaaattgagtcattttactttagcctattactaaacaaacatacacttcatgtatccggagatttcataactagtttaatctctgagttcactaacacaagttgtaaaagaatcatcaaactgcaaattgcaaaacttctcaaataccttaaatacagagagacaaacccatgtgttgttttcaaattataagcctactaattaagtctttacataactaaggacttagaactctgccttttcctatcacaatccagccaattctctaccagaattggttcattcagtttgtattttgttgacaatgtaaatcatttatatgggcatattctggatcactggggtggccagttaccaagatgtgctactgcatgctttcattggctgcatttgcatttgtgtttctgattttgtgttagcttcattctaatgattgtaagtgaatgagacaaaaacagatgtaagcttcgatgtttaagtaaaagctaaatgagatcagaccatttcttataaatgaaaacttcttagtagagcaaatagagaaaaaatagcattgagtgtcacaaggcatttatctgtaggattgggtcaccaaactcacagcacttgtgtcattggagtcactttatagtcatgtttccagcagcagtttcactggggcaatgccgtgttattaggttaaattaatgtgagttgtattcttcttgtgattattctttttgtaaatattcctatttaatttgtaattttcttttgactttagaagtatacatctgctataaaaacaaggagtttctacctatatcatgtttatatatttaacaaatggtataataaaaacaaattaggtcagtactaggggctttcaagaatctatttcctttatatcattaggtttgagcaaaactattgtattccactctgaatcccacatcatctcccatgtcatcagttgaaagattggaactccctgcgtgggggctcagctctggtccttaagtagaatgacactgcctcaatgacaaagctcctttttggcaaagtcagctattaatgtgcgttgtgcatttagtgttgactttgtagttgcaccctacattctcttcaaaatgctcagcagtacttggttgggtctgctaaccttttaaagttaaaatagctttcaaaggaatttactgcagccctgacttgagtatggagaaaggaggctcctcccccagctgtagaaggactgtgagatctaagggccacgggaagtagcctaagtttttcttagaaagaaaaaggcatcaccaaattcacagaaattattggagtgcatatttggcaaagtgctattctctgccccccaacaatgtggtcttctgtttgttctttttggcagcacaataaatgtgtttgtcattcgctgaggactattgtgggtggaggagcggcagctgcctggctaactcctataacacggcacaaatccccaacatcatgatgaggtggtggagaacatctgtggaccagaaggggagggagatggcactcagagacagttctacaagggtaaagccaactcaacagaagagttaactcaggggtcttcataaaattccacacattttagacaaagtcgattttgttcatcccttggggattctgtagctcacatttatcagtacaaagaacctgacagataaacctaggttgtggacctctgacaaatagaaatcagtgatggtgcatggtactctakggctttcagtgtagaacttaaaaacgatgagaatctaggattggaattttaaaagttgatttacatgattctcctgtaatgatgagagcaaaatctgtctgtgagattattaataagtgaactgtcttaccccatctcctcatgtagttgcttccttcttatcattcaggtgagatcttgggtcttagctgaaatgtttcttcctctaaggggcttccctggctgctctctaaatcacgtcccccattgaaccccaaatactctacacatattggcaagggaaggggccttgtctgtcttgttcacggcagtagccacaagaccagttcccagtacagtcatcataatcatggctgaccctgactgggtgtttgctgtttgctgggcattgttcagtgcccttagctgtaattaaatatctataccacagccatgtagataggggcaattattagcccaatttcacagaggaaactagggtatggaggaggggtgaggtcattgcccaaggtcactcagttaataaaagacagagccataacaagaattcaaatatttgttgaatgaacagatcactgaaaatcttgttctgtaaatgttggaatccaagggaagccatctggggatggctttactaagacttggggaagtgaggtccagttctgcttcatccgatttaccttcggttcctccctctcttcagagttcaggggctggtcagagggagacctcttgatctcgccccctctgcgccactcaggtgtgctttaaagtataattttcaatccttaaaagttttgcyggggccaaagttaagcttctcttaaaacactctctgccttttaacagcatagccccacgaaatcccagaagtgtctcttttccttacctgagaagctatagagactggaaaatcccctgcctgtagtgagtaaagagagaatgcagaaagtttaagaaaagatcatggaaaggagaagtctcagagtgatgtttctacaacacaaaacctggctgggggctgcggctcacacttgtaatcccagcactttgggaggcccaggtgggcgggtcacttgaggttgggagctcgaaaccagcttgggcaacatgatgaaaccctgtctctaccaaaaatacaaaaatgaaccagatgtggtggcacgtgcctgtaatcccagctactcaggaggctgagtcaggagaattgcttgaagctgagatcacgtcattgcactccaacctgggcgacacgktctcaaaaaaataaatataaataaataaataaaacacaaaacctgaccacartcctcccctgattaaaccatcaggtgctccattgcctttcagacagtttatactgggggtttacaaagtttcatctcacaacgctttctctccaaagcaggggttggtaagctttctgaaaagaaaaaagtaaatagtacattttgtcagctttgcaggccatcccatctctgctaccacaaatccacctgtagttgcagtgcactgctgtagacaatatctacatgaacgagtgttgctgtgttctaataaaactttctttaaaggcactgaaatttgaatttcatataattttttttttttttttgagacagagtttcactcttgttgcccaggctagagtgtagtagcgtgatctctgctcactgcaacctctgcctcccaggttcaagtgattctctggcctcagcctcccaagtactgggactacaagtgtgcaccaccactcccggataatttttgtattctagtagggacagggccaggctggtctcgaactcctgacctcaggtgatctgcccgccttggcctcccaaagtgctggaattagaggcatgagccaccatgcctggccctgaatttcacgtaatttctacatgtcacgaaatattgttgttttgattctttttttgaaccacataaaaacgtgaaaactgttcttaattcscaggccacaaaaccaggtggcacctgggccttggcccttggccatagcttggtgactgtcctctaagatagagccgctacagcttcccgccttcccacaggttttgcccacccttcatgtcacactatccttcaggtctcacttggagattgtcagcagagctcttctgcaagccctgtactaggttgaatccctttgctccattcaggatgaatatcccttatccaaaatgcttgggaccagaagtgtttcagatttcagatttttttttggattttggaatctttgcattatactagttgagcatccctaactggaaaacctggaatctgaaatctaaaatgctacaatgagcatttcctgtgagcatgacctttgagcatcatgtgggtgctcaaaaagtttcagatttgggagcattcggattttggattttcacattagtgatgatcaactgtgcaaccatggcaccagcccactgtcaccctccttaacagtaatttctctttcccttagtgtctaacatctctctccttgctagacagtaaatcccttgaggacagggcctgcttgggtcacatttatttctgaaatcctagtgccctgccaggccaggcagtgctggatactcagtaaaggttttttgacttgcacatgacattctcatgacatctcatttttccttccttccttccttccttctttcttttcttttcttttttctttcttctttctttctttctttctttctttctttctttcttttctttctttctttctttctttctttctttctttctttctttctttctttatttctttctgtctgtctgtctgtctctctttctttcttctttttctttctttcttttttttttttttgagacggagtttcgctcttgttgcccaggctggagtacaatggcgcgatctcagctcactgcaacctctgcctcccagattcaagtgattctcctgccttagcctcccgagtagttgggattacaggcgtgccccaccaagcccaggtaattttgtatttttagtagaggtggggtttcaccatgttggtcaggctggtctcaaactcctgacctcaagtgatctgcccacctcggcctcccaaagtgctgggattacaggcgtgagccaccgagcccggccccatgacatctcattttctattattattgttcactgcatgctctgtttggaagctcagcacttcctgattctttgggggtatttgaatttagggtgcagttagaactttcagagtagataacaaacctcaactccttcgtttggcttgagctgttccccacccctggctggaagactccaggagcaggtgaaggttgtgcccacaggcacgactggtttggcaattcagtaaaaatgctcaaaccggctgtgcctgtggacgcagcccagcgtgaactcaaccgtttggaaaacagaggaaaacagagacgcttactccgcagggagagctccacgaccaggactcccccggtctggtctcgcaggaggcgcttccgtttatcgcaggtctgaagacccagagaggcagacaggagagaagcggggaaggtgggatgatgcgtgagcaaaggggagaaaagagaaagaaaagatattttaaaaaggtcacaaatggggtggagtcacaattccccagtcaacagagatgagttacctttttaaaaaataacccagaagacacactgttcatcccttctccaacttgaatacaaagagaaagctttactttgttaactcttcaagccagagggaatccttctggaagaggtcattgagtgtggaagggattgatcccatttcctttgataaggcttctacttaccactctcaccacaataattagagaagtggacacttgcaattgtattctggttcattttcttttctttctttttaaaaatatggcattgatacttatcctttgatcaactgtacagtgtctctcccctcctctccctggctctgcactctctggtttctttcccttttgctgtttgtgctcataaagaaccattttctggccaaatgaaacaacagcaatagagattatgaccttatttttgttggttactataggctatgtggatagcagcctctttggaaacaccgaggtctccagttgaaagagaccagaaaggagaacagtttgagatttggcatgtctaagtgtctaagtggtggttctcaggcttgagtgagcaccggcatgactgctggcttgttaaagcacagcctgcccaggccttcctctcacgtggtcaaatcagccatgatccagtgtcgggaatttctgcagcatctctctgaagtcacagaggtgaaccctcgggctgttcagtcaagactaaaaacacccaccttttgagttatttccacggcctgtccctgccacctagaccttgaatttcccttgcccttttcacttcttccaagtatttccaagtctgttatcactttcatttacctacactgccctctgatgagggaagggccatcattacttaacacactttgcttaaggatgagaaagcaggtcccagcaggttaggcgacacatgccagaccatgtgggttgttggaggcagggcagatagggccctgagcatctgccctcacgagcatctgcccttatactcagtgccatttcctccagatgtcctcagcacacagctgccctggcctggttatgatctccccactcaaactccagctcctccaatactggcaccctttaggtaacattgtccttctggagagaggcagctcaccactgggcaggagagtttctcactgtcgcagatgaacgtctcacagtgtaaccacaccttggagagtttggggatgttctggaaccggaaagcattgaattggaagrttgccctgtgatctctcccattctcatgcacgaggacggtttcatccgtggggcagctgaggcagatggggaaagaagagtgaactgtcatctccttgaactccagcaagagctgctgagcgatttacacacaaggytcccgaggtggttatatgacctctaaccttcccaggcattttgattagcagcacctcacttgatcttcacaactgtgaggtcaagttgatgagctaggagatgggtattactgtcctcattctatagacaaggtacgatgggaggggagtgacttataagagtcacacttttagtaagttacacctgtgtcccaaagaaagaaaatccctaggagataaggccctccgaggactggaatatgtccagcccttgagggacatacaaagtaaggacaatggcaccaggtgcagcattgcccctgctgccacagctgcctaagctcaagtcacacccaacacatttctgtgtgtgaactgtgaggttttgcattgaaaatttgtatttatggtatattatttaaaytatatatatctacatagttacttttgtaaaaatgtggtcacatttttaatataagcacagaaataatgactgaaggataccgtctaaatgttaacrcaggctgatacaaagggataaaattatgggcatttttggttttcttctttgtatttttatgtattcttccaaattctctataatgagaatacaatatttgtatgatattccaacgtctcaaaggtaataattcagtttaaaaaatgacacagatgggcatttatttaagctagtggttctcgcttggtccactttgtgccccaggggacatttggcactgtgattgtccaggctgggggaagtgctgctggtatctagtgagtgggcggagaccagggctgctgctgaacgtcctacagygcacagcacagcccccacagtggagaatggtcccaccccaaatgtcaaggtgccaacattgagaaaccctagtttcagcaaacatactttttcatttaacaaagactgatgacctaagtgccrttcctttaactaggtgttggaaacagacgcaaccattcttgggactgtacagagaagcccacactattgtgggggtttgttatctgcaggtagcacggggtagcagggtctgtcgctctgcaggaaaaggtctatgtttcgaaagcgtcagaccactgaatagcaccatagcaggccccagattaatgcaactctgaagcatctttcttcttgtatggtaaactcggcacacacgccagagagcggtccagttaccccagggaaccttcatgatgttctctaccccaccccttttccctcagaaacagacaacggggggccaagctaaaggcaggcactaaggaagtcaagtgtgagagtgagggagtgaagtgagggaatgctgtacctttgtatctggaccaggggtcagagccgggtctgtgtgtggtgggctctgaacagtgatgaaactgtggcattttccaagttgtgaaacaagacttctgtaggatcattttgtcaataaacacgagatcctcgtatgaactcaagatgggagttcttaaaatagctctttgcagccagagtgccccaggcatggtcagccagtggaaaataatgtaagcagagctttgtcagggggtggggaggaggcaaaaaataggcagatctagatgccttggcactgctgcttcttggcaccagctgcagcacccacacttcagtggcagctgcctctagatggtggaagcccacaggaggcttttatgccctctctgcatgagcctcctttcccatgtcagattgctctttgagataagtatgctgcttttggggcatccatgtgtacagggaaattccttatgatatatctcctgccatctctccaggaacttttgcaaactgggttttttttttccaaaggggcccagtgttgtgagcaaaaatcatctggagattgtgggagtggacttttccattctcccctttggcactgaactttgtgcatgtatctccaactttgaggtgccatgtcaactaggaagaatgtagaaatgggtcgggatgtcttacatctggctgtgttgaaatgcagattccgtgggtttccccagagtccttctgatctggtaggtttacagtacacctgcatacgtaataggcaccctacacagtttgtgtgtacactagagcttgaggacaattgtgcagaccacccaaagccacaggcatccctttttcagccatgttgcacatctgccagatgggaacaacggcactagaactccctgcagagagatgattccaggggtagcagaagcctttgcctagtgtgaccattgcctgagagaggttcccagtgcctgatagcaatttctggtccctgcaggtcaatacgttatttcagaattcctggagtcatttgattgcaccattgctaacagaggctgaatgaattgaatcattcaatggcagatgtgaggtaaacacccagattaagctgccatctctacaggaggctttgctgggctgcacaggtgtgcctcggccagcctgtcctgtccaggccactcaggaggtaacactgactgagtctgaatcccaggccttctccttactagctccatatcttgggcacatttctggacctgtgcctcagttttctcctctataaaataatgattattatactgtctactttagagagggtttaatgacatttagataaattaatatttgtaaaacacctatctagaacaatgtttgrtatattgtaagagctgtrtaagtgtttgctaaataaaaatagaggtccaaaatagctccacttttgttatccaattatgtttatccttgacattaatttttccttggcctgatgggttctgagaataacacaggcacattggtctgttacatgctttgtttagagaatgatctcttctttgtttactgctaattatgtgtatgatgtccacatctcttgtctagccctgtctctcctctaatttccaatagtacaattctaagtacttctggacaatcatcatttgaagcttaacatgtctgttagtgaactcagcgagaatccatatttccttatccaaaaacctccttctccaacagccaaatccagacactcttcctcagctttgtagtccacagatttaagaacacaaagccatctttttccattactccccagatttcttgcgctgtcctttcctccacctcctatctgattagttcctacattttctcattcctgyagaagcatctccctactttttattaccttgttccattcacttggctacaatagcagttcatgtcttatcacccttgcacaatagctgccagggcctctaatctggtttttctcccttccatgcacgtttctaaaccatcctgtgtatgacttccagcattgcctttctagggcgcacttctagtactactttagtgctttactccaaattgtaaaagctcccggttatctacttaattagtaataaaaacaatgatcttatttaaaatggttggactatctagcaagtaccatctgctaagcttttgatatcgattatttaatttagtcatcatcaccgtggttctgttgtcagactaattggatttgaattcagcctgcacacttcctcttgcacacatacacacatgcacacacacgcatgcgcacacacacatttaatatgagaccttaccctctcttgtgcctcagtattcacatctgtaaaatggggatgatagtaaaactaactttcttgttgtacggcttaaaggagttaatataaggtaaagctctcagaacagtatctggcccctagaatgcactatgtcctgtttcttagtatttgttctttgcctggaaccacagatggtgtcactgctgtaactccagcaggcttcacctcttcctcccaagctttcccaagccagagcaaagtagcccrataaatgcctggttccactgttcagccctgtctctagatagtgtacctaccccttgttgatcagctgccactgcaagggatacatgaagtcagccgagggggtggcccaacagctgttcaagaccactttaaacctggaaataaaacaaaatggcatcactttgaaacagagaatcttatgyctacaaacatctgatgattaaaaagtatgtcagctagtcttttttttctttgcatttaaacatataaacttggaggaaatgtacttacctaatgcttaaccctttggcttccactcctgcaaacagatctgaaccgatttcsgatgcctccaggacaaagggagcttctttcttgatggagaacttggcattctttggaaggaaattgacactgggcattatgaactctcagattgagcagctaggtctaccaggagcagatgaattgggatggggtggggatgagaatcaacccaaagacataagcaggtgagaccatagagtgatcctccaagaccagagaaattctaagtcttaagacactatgccatcttagaagggatgaggacatcatataatcacgtattctagatttgctcattatagtgagacacacactgtatgtctcatttatgccaatgagatttcactaatggaaaacaagtgaaattcagggatattaaggcactgtgttatactgaatcgcccaaggacacagggactgagcacatacaacacccgcctctgccctcrctcgttgctactttttgcctgagcagatttcagcgtggkttgggaagtgtaggatcagattcccagattcccagtacaatcatcaacaacaataacaaccactaccacaatgtattgatcaactactatgtgttgggcactgacgatggactctgtcaggattttgttagcgaacaaagcaaagatatctgccttcartgatctggcatattctagcaggggagacaaacagtaagtaagtaaatgatrtaatatgtaactatagaccataggacattatctagaaaagctataaaacatgcagagtgggataaggaagatcaggagtgtgaggaagggcaggttgcagttttaaatacagtggttggggaggcctcactgaggatgtgacatttgagcaagatttggaggaagtgaggaggggggccatgtagctatccagggaagaatgcttgagtcaggataaaggccctggggcaggactgtggctggcagcacagcaaggaggccagtgtggctggagcaagtaagtgaggcaggagggtggagagtggggagcggggtgggggtgaggttagataagttgtgggggctgatcaagaagactggggctggctgggcgctgtggctcacacttgtagtctcagcgctttgggaggctgaggcaggcagatcacttgaggccacaagttcgagactagcctggccaacatgacgaaaccctgtccctgttaaaaatacaaaaattagctgggtgtggtggcaggcatctgtagtccctgtaatcccagctactctggaggctgaggcaggaagatctcttgaacctgggaggtggaggttgccatgagccaagattacaccattgcactccagcctgggtgacagagtgagactctgtcaaaaacaaaaaacaaaaaacctcaaaaactaaacactgggtcttactctctgagtgcagtggggcagcaaggagtcaacaccacgatgtgagcacagtaacagcaggttctgatcactggcctggcatgtgggatatttccctgccattctcatcaggacatgctgggtgagctgttaggaataacagcagtgtttctgtttgacttactcaaaggaggctgatttctccattctctgagtcttgagttcattcaaccctagtaacaatcttgaactgctctgtggattagctttctttctttctttttttttttttttgagatggagtcttgctctgtcacccaggctggagtgcagtggcgcgatctcggctcattgtgaactctgcctcccgggttcacgccattcttctgcctcagcatcccgagtagctgcgactacaggtgcctgccaccacgcccggctaattttttgtatttttagtagagacagggtttcaccgtgttagccaggatggtctcgatctcctgacctcgtgatctgcccgcctcggcctcccaaagtgctgggattacaggcgtgagccactgcgcccagcctgtggattagatttcagagacaaaagcattaccatggaagggcaaggatcctgggctaacccgagcttccaccgctaacttgggacacactataggcaagtcagcctttcaggcctcagcttcttcctatgcaaaatggacataacctttgtgactttatgtaataggagaataaagcttagaccaggttactgtttgaaagattgagtttcatagacctggagatttgcagaactgcaataggtagacagtggcaggaggaacggatttcagcaaggatgtctagttaaaatggactttatagtattccatggtgtatatgtaccacattttctttatccagtctgtcactgatgggcatttgggttgattccatggctttgctattgtgaatagtgttgcaatgaacatatgcatgcatgtgtctttgtaatagaatgatttatattcctttgggttgcatgtatctttgtaatagaatgatatacattcttttgggtatatacccagtaatgggattgctgggtcaaatggtctttctggtcgtttgcaaagatggatggagttggaagccattatcctcagcacactaacagaggaacagtgcatggtctcacttataagtgggagctgaacaatgagaacatatggacacagggaggggaacaacacacactggggcctgttggtgggtggggtgggggagggagagcatttggaaaaatagctaatgcatgctgggctcaatacctgggtgatgggttgctaggtgtagcaaaccaccatgacatatgtttaccagtgtaacaaacttgcacatcctgcacatgtaccccagaacttaaaataaaaataacaaataaagataaaataaagtggactttacccctcacatgtcaaacacacagggactttgttgagacgactcagaatctcttttgtttcctagtacctctgacattattttactgatggcaagtccagcaagggctgcctgattcagtcacctagaagtcagttgcttcctcccatttgtcagcccctgcaccatttaaatgactgcaataattggataataatgttcttaatcataagggatctactggcttaaaatgcaggttgaagtggcagatttacagtgatttttaatgttccttgttatgttctgagatttgtcatattttgagaggccattttcaaatataggaacttacctggggaccccgatgtagtccccaaacctgtcagaggtatcgctcccaactctttctgccagggaccagccagcagaatgttagaatattggaataatacctctcctcatggaagaacctgcctgattctgttacaaagtgaagaacagagctgacaccgttaattcagtttctgaaatagaacactaatgattgagttctctatattctcacccaacagctcagggaaggcttggaataatttttcccctactttctctataatgtgaaaattagaaacctattccagatccagtaatcttcctttatccacaggagatatgtttcaagacccccagtggatgcctgaaactgcagatagtaccaaaccctatatatattacttttattttgatccgataacatggatggctactgagtgactgacagacaggtagtgtctacagtgtggatattctggacaaggggatgatttatatcccaggaagtacagagtgagcggtgcaagatttcatcatgctactcagaacaggtgtgcaatttaaaacttaagaattgtttatttctagaattttccatttaatatttttggaccacagtttaccaagggtaactgaaaccatggaaagcaaaactgtgggtaagaggggacccacagttgtgaacggttgagtcacaactagccagtgtcacaagttaaggatgagtacacctggcttaacaatagttcatgtggaaacatctcggagttgctccatgtgaagtagcggtgaaaaaaactgccctaaagttattttcctaggacacattcctagagtcttccagaacctagaaggtcacctctgacccgtgatggcctgcacgggtctgataaagtctagaatataacacttcaactttgggcttcattttttaatagggatactgagcaactggatcatattcagagaagagtgactaggatggtgaatgaaccaccaacagagacaagatgtttagcttggagaaggtggacatatttgaagtactgtcagccagataattatatgatattatttcagaagacagaactgggacacatgtgcgagagttcagggtgtcagatatcagagctgatctaaaatgggaaggcccaaatatcattgtctttggaagaggcagggaggccaccccacagcaatattgcagaagggttttgggctttgggtggaaagtcaaggtttaccacctcggaggcttgttttgactcctggagtctatgattttggcctctattgcttgcattttttccgtcttaagctttttcatttctatctgtctaaaaggaatgatcagtactgttttgattgaataaaagtcaatataatccaacactgacatcgatgttcagccttataaagttaacaatgctagaagccctcagagtttccactttaaatagagtcaaagtctacaatgatgagaatggctactttcttgggtacttaacttgtaccaggcactgtgctaagtgcttcctaaagattatttcatttaattctataacaaacctatggggtaagtgctattattatccctgctaacaaatgcagagatagaagcccagrgaggttggttaactaacttgcccaaagtcacacaactagtaaatgatggaacaaggcttcaaactagtggtctgttgagaaggcccattttcttaaccacagcactagggtatttccgtaagccaactaccttccttattttgtattgagggtcaaaataacttttcactaggaataccaaccatgggatattgtcaagagtgagtgggagggggatggagagaaaagaaaagaggaagcctgctgagtagaactggtgcttttagagcccagcatttgaagctctcaggatcctaagcaattagcagtgcattgattccattgtgttatctagggcagagctctctttctggtaatttgatggaaatatatgcagggagcagttgttgcttcagaaacacataagaatgctctgaaagtggaagaagggaggagaaaaaaataccaaccacatgggtcaggcatagggaactgagcccatggcgggaatattaatcagtacgaaagtgtcaggatggcagagtcccttctttgctgaggcccgtttgtcctggaaaggtcttggtgggcctcaggggacgcttgacccttaattctatacttgttgaagggagtgtcccgttatctgtctgtccagcccagaggatggcctgggggatgctgaggacatgtctcttattattattatttttttttaagaaaataagctcattccagttctaagacttgatgttttgtttatgcctgaagctcagctctacrcagctgatggtgggcaatgatttttgacaatcctggtgtctccgtgttgccaactattgtaaaaccttcatgggatcatatctataattttatctggttaaaataacaattattcacttccagacagggattcaatagcaaaggcagcctgtcatcagggagtcccctgagactgttgtcagtgcgcagaagccaattttcctctccggacggctttcatcactgactgtagtggtttcaccaccttatcatcaccctggtggcccatgctgtatttagcccccgattataggtcaagggctacgtggattccctttctcggtacttaacgactagtggtgtgtggctaggggcagatctagattttgtgggatcttgaaacttttacaatgtggagagccctctttaatgaaaagaatcacatttttcaatacagaattagacacaaggccttgaaagggccttgaaatgagtttcattcccttcgcagtaagtaaagtgaccatatctaggagatctgtgttccagactggccaccgctctgaactacctgtgggctctcaggctaatccttcctccctctgggcttctggtcctcatctgtacaacagactaggttattctaggatcccttrcagctctcgccttctgagttcagcagggctgatagcttccaggcagcaggttaagcaagcttaaagagttcaaagttaatggagttagaggtagtacgatgtttctcctttgagaagtgaatgggttggacrtgatgcctttccaacaggtcctctggctctaatgttctatgcaaaggtttgtatttctgcccacatcttcctttagcctgctgggacagtctctgtgtgtatgggtcctcaatgcaagctgcaggtttgaagaaacaaagcaccccttctaaagaggagagcagctgggcaaatggccattgcatatttagtttctctggagcactttattttgagagagaccaaagtgtgcctttaacttctatgtcaacatgggcagcctgcccaaattaagcaaggaggaaatgctacttgaaaggctttagagaccaaagaattaggcagtggaggccgaccccaatccttctctttagccctgtcccagtcaggaacctcaatacattgggccaaatattttaagagctagatcttaaatataaatctctggagggggttgtagtgaaaactaatcttgwctaagagtcagacattggctgtcttattgtctgttgaccttgcctcagttttctcatctgtaaaatgggaaggttggtcttatatctttgcggaagattggtttttttgtttttatttttgttttttgagatggagtttcactcttgtttctcaggctggagtgcagtggtgtgatcttggctcactgcaacctccgcctcccagattcaagcaattcttctgctgcagcctcccaagtagctgggactacaggcatgtgccaccacatctggctaatttttgtatttttttagtggagacgagatttcaccatgttagctaggctggtctcaaactcctgacctcagatgatctgcctgcctcggtctcccaaagtgctgggattacaggtgtgaactaccacgcctggccagaaggttggtattatagcttatatcttatacctttcagctcttctatccagtctatgaatctgactttctgtgacacttagtttttaaagaggtttaaagctaaaccaaagttcatgtttcaacttgaatttaagaatggggctctgcacagagcttggggaagactgaatcccgaggaagcatcccaccatctcctagaaaggaaaggccacagggaagtaatgggaacctggagaccacttacagtgtagaagttgagagacagttggctctcaaatgtgcccatgctcccgttcttcacgtgaacagtggccactctgaaaaggggagagaattttgcataaggactgaaacacgctgattgataggacctgcagtacacacatgaggcagccagccctccatgccgcacagcaacttacctctggtcaaaggcagcctggttcaccaagtaggtggagtggtaggtgcaggagaaggagtagttgacaggctggttttttacaatcactgtggtgtcattggaaacgatgtgactgtagaagtgatagataggtggcttgtactggacaaagaaaggagacagtcaggatgaatctgtttccccgcgatgggaatgagggttctgggaaaagtgcaagaagatggctcaaaaacaagtccagtggggagacagaaatgtctgccactgacggtggcatccactcttcttgtctgcgggtgagctgataattttgtaaagggttccttagtttattcaactaagagtgtttaaaaatgatctaggttgatgtcgtatgcttaaaaatctccatgtacccattgggcttctgaccaaaaagaactggctcaagaatctctgtttcccaaagtcaactcttcatccatttctcctgtccaaatattctaaatgaatgcttcacccatctccaatttctagagtgttcccttctggttctttgctctttccttcttctgactataagcacgatttctgagactctttcgcctgacttgttgggctctaaaatcacagaatattagagctggaggggatcttraacatccacttgaaaagtgactgacctgagaccacacagctgatttctagttcaccaggatatactcaaagacatgatgtcttgttaatcatgctcatgactcttcccattaaatcactgaatccttgtgaggcytttagaaagaggagctggccctggaagctctttgctctcatgctctgagatggatagatgcacagccttctggcaggtagggcagtaggaatgctagatcttggtggggaggttgggagacctagcctcccttcctgattccatccctacaggctctgtggccctgaatgagtgactttattgggaagtctcagacttctcgtctgtcatatgatacttggtaagagggcgtctgtttcctaataattatcttatgatatcccatcctgggcacttcacaagactgcgttagaagttgtattatacattggtcactccctaaactgctcttccaaatgctctttgtcaccactttgaagtctcaggcagagaatggctcatccatccacccatccaatctaggaaggatggcggcttgtgagcacaggctcagaacttgaaggtgggaaatgtactttgttctactagaaggtagcttcactggctttggcaacaaattaggaggataagagtcaagccaaaagagttatctaaactaggcagaagagaatattttaaataacaccaacattccaggatatttgggaatcaggactgacctttaaaaggaaatgggtaaattctgaatcctttcaaggacagatggcagacatctcattcttgggtccagttgccttaccttaaacaactctgcactgtgtggcctggtcttacctcagactgggttccacaataggacttgtttttaggtgataaatctgggatcacaaattggtagtaacctccttcgtggaccccattgtaacacagccctccgagggccagctgatgaacttcccatccatagggacactcggggattttggtgatgatggttttgggatagcaaaacacaagaatgacatctggaaagagcacacatatagtttaaaatcagttagggtaatcatgctaacctacgtaacgaacagtggattccagctacacctgagcatgcaaaagcagttggttaaaaacaccttccctgctattcctcaccagctgtgacaaaagttttccccaaacttcagtcattgaagagtcactctyacagtttttgctgcatttatttaatgactgcaccacgtttaacatggaattaaaattagtccatttggaacaaggaatgtatctgtgaaaccacaggtaggatgtattagacatacataaatatatattaaaatctccataacaatgagcacataatttaaacattttaaatgtcaatttcatgcataatattgtgaaatactgatttagggcacaagatagaaattcagtagttgaatggaaaaaaaagtggagatgttttatatatatatataatgggatgtggggagagagtgtgtaagtaagagagtgaaatagagcaagcattctctaattaaaaaaaaagtccgagtttatccaatacatctttgctccatttgggaaaagtctgattggtattggagggggtgcttaagtactttcctgcttggctacatcattacatttttataacaagttaagcacagaagygctgagcattgtaaaaggaaacttcaggaaacttttcgtccyaggaaaatggacttggcgaggacatacctgctttatttggagcacacgattttgcagaggcttctgcaaagatggccaacaagacaaaggccttcgtcaccattgcttctcagaacctggtctctgccaggtatccaaaccaagctggccaaatgtttacggtccttccagggcctgagcctcgatcattctaagtcagaaacatgaatgaaaagttaaaatcaagggaagaacaaagccgcacatacagtcttggggaaattttcaagggagataaacgatgttgtgtcgtttctaattgtttcctgttagcgctgagaggcaaaaagtggggctcataccgttggaagcgtcaatgacacatggagttgttcatgttcccgactgtttcatcctctccggactgtagaggctggctgctggatgctccccaaatctgctgccccagtcctagtttgactttatatagcccgaggatgtaaaagaaaccagctccagataagtcacaatgagcatgcattatccactgtgtggggaataaaaaggggggctagcacagtaatccgatgggaagctcagttacttgaatctaatttcttttgctttacagagttggaaaaacttttttttaactgcttcaaccaagattgggaggaaaagttgattttttccccttttgtacagaaaataactctgaatggaggcaaactatttctgtacaattccaggtgacagttttaattcttttgtcttgctttctttgctttatttcctgctttcttatttttgtatgtaggtaaactaaactttgataagaaaactcaggtttaacattgttgcacctgataactataaatatatgtgtgtgtgtgtgtgtgaacgtaaacattttaaaggattttccctctaattaaaaaacaataaataaactctagtgtcttgaacttcatcctgaagaacaacttttaattgtacacccttgagatttctaaagctttattagtctcccagagcaatgacattggaagaagaaacttagaaagtctctcttataattcaattcttagtcacccgacaagatcccactgaaaacaacagataacatgctactcccatgaaggttccagatatattattgataatgcacatcatttaatgtttcaaaacattgggaggtatcttataagcaacatgcataagtaatacagtacagtttccttatttcctcaaaacctattgttaaattgatgggatgttttataatgatggtatcaaagaatgaaggaaatagccatgtggcaagccattaaaaagttctgtaactcagtttccttctgtgtaaaatggtggctgtgattctgggctgaacttacagagtaggagagcaatgatgtaaaggctcttgtaaactgtaagtagtacataaataagtagattacatgaaaagacaactgacaatttccagtagcatgtatgtgtcccatgagttgcttttcctttctttacatgcaacacaaagtgactcattgtagatttatgattcacgtaacaggaggcatatctgtattgtatgacacgtatgcaaaatattttatggatgatgaacaaatgagctgagagggagaagagaaagaatatattaaaaaaattttttaaacagtaggatcaagtttattgtggcctggaaacattgccgtatttcttttttattattattatactttaagttgtggggtacatgtgcagaacgtgcaggtttgttacataggtatacacgtgccatggtggtttgctgcacccatcaacccatcatctacattaggtgtttctcctaatgctatccctcccctagccccccaccccccaacaggccctggtgtgtgatgttcccctccctgtgtccatgtgttctcattgttcaactcccacttatgagtgaaaacatgcagtgtttggttttctgttcttgtgttagtttgctgagaatgatggtttccagcgtcatccatgtccctgcaaaggacatgaactcatccttttttatggctgcatagtattccatggtgtatatgtgtcacattttctttatctgctctatcattgatgggcatttggattggttccaagtctttgctattgtgaacagtgacattggcatatttctactgttctccatagttcattcctgagcagaaaaaagacacttgaatctcgaaaatatgtgtgaattctctgagttcctctttcctggggcttagcactaactctctgtgtatcttttcccctcttttttagtaagcatttattgagcccctgtggtatactggaccaggccctgggaagatgcatgcacttcatgtggcttctttccctgaggaactaggggaggagaggacacagagataggactatgggatggagaggaggaaaaagggaccatcagaatgcttggcaggtaagtcaagccacagaagagtacaacagcccaactgcataaggaaaggcttctgatgtgacataaacgattattcatcactggcaattcagtattgttttttgtttttgttttttgtttttaattgagactgagtctcactctgtcacccaggctggagtgcagtggtgtgatctcagttcacagcaacctctgcttcctgggttcaagcgattctcctggctcagtctcccgagtagctgggattacaggcacacaccaccacacttggctaatgttttgtattttttttaggagagatggggtttcaccatgttggccaggctggtctcgaactcctgagctcaagggatccacctgcctcggcctcccaaagtgctgggattataggtgtgagccaccatatccggcctcagtattgtttttttacatggtttggagtacttgttcacatttcaagaggattctacagatatgtatctcttttcaaccaactttggcccaggcaagtcaacagtgtcatcttacctctgacttagcagggcaggggtcactcatggacagggctgcagtggatatagacacctttcctctttcccagcagaaatgtctgatgggtgcttgcaagatgctgcgagatgtgataggagaagcctgggcagttggactctgctgtttgcctgaaatccaaagtccacctcagtcattactaactgtgtgttcttgggcagattacttggcttctgggaattttaatttcctcctctcctgaaaggatatgctaatatctatgacacagtgttactcagactattaaatgagatatatgtctgctagcacagacatggcttatttttcccgatcagggcaaggcaccaggaaagccttttgtgtctgtgcttagctctgcttgggaaattcaaagagggaagcctagtaggagtgggtcacccctagataacacacattattgtcatcagccctggattacatcatatgtaactaagatcacaggttctgaaattagaggtcatggcactgtcacatttccaatggtgttatcttgggttcataacttgacctttctaagcctacagtgttcaaatctgtaaaatggggcttctcattgcctatggcttttgcaaagatagaatgaaataaggcatataaattgcttagcacagtgcctggacacagtaagcactctatgaagactcgctgccctgaagtgtgttcatctgaggttggtatcctcaggctggaaggacctgtcagtggcgttctcatgtgaactctgggtgtttgctaatggtaatatttctctctttagaagtccaccttaacaaaagagcaggtgcttttgatttctagagaagtctgatagcgataagatcctgggacagagaaagagatgtcgcctacaatttcttagggtgggaatccagctaaccatcaggtacatgatactcctttcaaggacgagctgaatgaaattgggaagtagatttaacttttgtggcaggctggtctctagatgtttaatttgcatacgaaagagaatgggacaaaatgtacttgggccaaacagtatttgatacttgctctgataaaagtcaggaggcttctatttttcctggtaagtacccccgcccccataccaatgccccagcccatcccctctctgctttgcaacactctctctccctcacatgaaggtggagggggagggggtgccactgggagatggaatgcaaaagcaaagtctctcactgagaagcacactgaattttgctgtttcttcaaaaacacacaaactgaatggaagatcttaacattcacaggacctcgagtgagcccaagaaagggaattttatggcagacttatctaaaagatgagcttgtctgacctgtacctttcttttgtgaattgcctagcaatagaaggtacctattctatttgaaggccctgaatgatttgggaaagctgcggccagaaacaaaagcatttccatttgcaaaattccaatcaatattttcattcacagcccagaaatcatacaggcaatgaatcatttgataaacaacaccagtaaacccatactgaggtaacagataatacttcagacataatgctagcaagcgtgcattaaagattaaaaaactgctttattgacttattttttagagtactctattttgagttcattaaatgttaaatgaactccattgtttccttatagctctgaatcaagccttcttctactttgtgggcggctctgtttgccaatttgcaaatgagtgggtgtttccctgcaggcttcaatggctcaaacctcacactactccccaggaattaacaattccccagagaaagtgatggaaaaggagaactgagaagtgagaaaagatccactggtaatagtgcatcaggaattaagagtaagacaccctgcctcccccatctctcagctgaccctgaagctatcagcttcagaaacccacattgctccaggcagataaactggcccctccaggagatcttggaatcttttctggctaatttctaagcaatgccttgacctttccctcagaagagggggacccacagtcacatctcttatggtcccatcagcccctcccttatctgtcttcccctctccctcctcacccccactggcaatcatcaggctgaagaactaaaaattgctcctcctcagatcaagtttagggatctcattactggtctaaaacatccaaggcaaataacttattctgttcctgaaacctcccagagaatcattcgtgtattcttttatttatttacccagtcattcatctaccaaatatgtaatgagtgtgtgttactgccgggcagtaatcaactatctatctgtatctgtgtctacatcttctgcttggggtaaatgtaaggatatggaggaagggcacaagtgggcttcagagataaagaataatggagcagagaggagtcattgactttagatggcctggtcaagaaaatctctttgaagagagactaagatgaggcctgaggccaggcgcggtggctcaggcctgtaatcccagcactttgggaggccaaggcaagtggatcaccagaggtcaggagttcgagaccagctggccaacatggtgaaaccctgtctctactgaaaatacaaaaatgagctgagtgtggtggtggatgcctgtaatcccagctacttgggaggctgaggcaggagaatcgcttgaacctgggaggcggaggttgcagtgagctgagattgtgccattgcactccagcctgggcaacaagagcaaaactccatctccaaaaaaaaaaaggtgggggcggtttctatataactgtaatgcacatacttgccaatgttttctttgctctaagaaccaaattttgcatcttgggatcaggggtgaaagtactctcaaaatcctacagctccatcagtactttctctacaaaacgcaaacttgacactgtgattaaatgaattttaaatgatttcttataccgaattctgagtagtttcatttttctgttcttcttgaccctaagtatgtggtctcatttgtttaataagcagggataattacgctaattaaagctattgagcatttctgacct

SEQ ID NO: 98191 - DNA, 28808 bp, Homo sapiens
ttctaaactgtaaagtcatcagaaacaaggacagtttgagaaactgtcatagccatgaggggcctaaaaatccatgagtactaaatgttttacagtgtcccagattggatcctggaatagttaaaggacattaggtaaaaagcaacaaacagaacaaaacgaaatctgaataaagtatgacctttagttaataataatgtatcaatatgggctcactagctgtaacaaatgtaccatattaacatgatgttaatcacagagaaaactgggcatggggtatatgggattctccgtactatctttgtgatttttctgtaaatttcagactgttctaaaataaaaagtttatttaaaaaaaaaaaacaaaaacaaaagactgaagccattacttaggttgactaaattgaccaatatatagacaacatacagatatatagatctatagatgcatacacacacacaattgtttatatgaatgtatattattcaaagatgaatacaaccccataaaagcttaattttttttttttttttttgagacagagtctcactgtgtcactaggctggagtgcagtggcgcaatcttggctcactgcaacctctgactccctggttcaagtaattctcctgcctcagcctcctgagtagctaggattagaggcatgtgccactacacccagctaatttttgtatttctagtagagacggggtttctccatgttggccaggatggtctcgatttcctgagctcgtgatctgcccgccttggcctcccaaagtgctgagattacagtgtgagccaccgcgcccggccctaaatgcttaaattttttatgagacataactgggccatcagtaactgctaaagactatcttccctgtatgctcaattgaaaaagctggaccttgcccagcagctcatgaagcagattttgaggtagcctgaatcctaacaaggaacaaactattgtagcagtgagttcctgaatcaggactggaaccatcccttcaactgtaaccctctagagcaacagaaatataatgcaagtcacacatgcaattttaaattttcttgtagcagtattttttaaagttttcaaaaataaaaaacttttaagagaaacaagtgaaattagttttaataatgtttttaatttcaataatacgtaattgcatatatctaaaatattatcatttcacaatgtagcaacagccacatttcaggtgctcaatagctacacgtagatattacagctctaaagccaaatatattttaagcaaaccacaatattcatgaacaaaagccaacttttctgaattatctcactgcaaccaccttgcaaaggcaagagagaatcacagaagtatgtttatgccttcatctacacgtggctaagtctagatggtctagacaatcctccagggcttggcataactaatccactagactcaggcatttccttccagaaaggacacctgccttgtccgacaccactttcacttctctcctccgactgccccccttgggatcctgagttcaaagcccagttccaaattcatatccaaaaggccctaatcacttacctcctttcaaatgtgttcatcaagagaaatttacctaattctagtctaggaacagaaaggaagcaataattgaagtgtaagatttaagagttcaattaacatgacaaagtctgaagagcggggtcctagctaatcttaccaactgttgtcttcagcagcagcagtaatatcattaatggctagtatatcacgtgttttctctgtgtaagaagggtgctagtgtgttacatgttttatttcactgatttttacattataaggttgaaattattactctctcacccccattctaccgatggaggagacaggcctagaaaggccaagcaattgtccatgactgcacatctagtaagtagcagaactagggttctaaacagatctgatgtcatgtctgaatctgaatcattttgctgtaatactttcttggtacaattctgaggacagccataaagtgacaggattcacaacagatcattccctctctgtgaatggtaaagtaagcaactaattgcaaaaagactactttaaaattcttcaggaagcctatttcgtgtaacagaatctttgcaccagaggaaaacattccccacttaagaattcactcccatcactagaggaaaaggaacttcacaataaagtactaactgtatagtttctgctcatcccttttccttactttcccacagaaccataataattaaaaaaacaatgttcaaatatagtgccatagggtattaagaaagaactcacccatctcagttcaattactaaaattagttaagattcaaacactttaagagcaaaatctctttattgtttaaaaaatatcacagagtaatcagatttctttcttaaaataaaatttttaaatgttcactcttctgttctctttggaagcaatactttaatacattgtaacatgcacagcagagtaaagttcatttcaatagatctacccactctacttgaatttaagtaagttactatgttgggggaattaactgctttggctggaaagtttgctccaatttttatccttcttaactcaagtaaattatagttcacctcctctgggtcacttttagctcaacactgcactcgccaatgatggccagagagagagattataattacttgtcatcaaactatttttgccatggttatatatattaatgtctgttcatctacagacatacatctgaaattcataactacatggatatatttttcatctttttctatacatcaattggaaatagatttaaaaaggggcaagcacaagtcattattaagagggcaactactgcgtttttaagaattatgatcaggccaggtgcggtggctcacgcctgtaatcccagcactttgggaggcccaagtgggtggattgcgtgagcccaggagtttgagacaagcctgggcaacatggcaaaaccccatctctacaaaaaaaaaaaatcagccgggcacagtggcttgagtagtcccagctactcgggaggctgaggtgggagtagacttgagccgtgagggagaggttgcaatgagctgagattgcgccattacactccaaagtgggcgatacagcaagaccccatctcataaagaaaaaagaattatgattattcaataatacaagtcagtaagcattcttccagagccagcaatgcagtctcctttcaattgtaatgaagctcctgtgtttgggccttatataatactacagctaaggaaagacatagtttttttttaatttatttatttattgagacagtttcgctcttgtcgcccaggctggagtgcaatggcgcaatctcagctcatcgcaacctccacctcccaggttcaagcgattctcctgcctcagcctcctgagcagctggagttacaggcatgtgccaccacgcccagctagttttgtatttttagtagagacagggtttctccatgttggccaggctggtctcaaactcccgacctcaggtgatccgtctgcctcggcctcccaaagttttgggattataggcatgagccaccgggctctgcccagttttatttttaaggtactgaattcaaaaagtttccttctatgtgttaagaattgtcacattaaaatataaaggcaagaaaaaaattgtaacacgatctgttttcttggaaatttacaactttgcatccaaggatgattttgttaccttgtaaaacagcttcccaatacaaaaactaataacccaaagaaatgtttctactgctaaaacaattacaattaaaaatgagtaaaactctaactggaaccacaagtcctgatactctgaggctctgggactcaattcaaaggaagtagtctccaacaataacaaaaatcaagacgatctccggcagtggagaaaagcagaactgaagagaagaggcgaggtgatgtatcatgaagagatgaggccatcagccactttcgacacaaaaatctctgaggcagcagagcttggtggtatatactaccttggttctctcctcttgttcccttacttggactcataaacctctttaagacatcatccatctcctccagaactaactggggacttcaggagatgagtggggtataagttcagagatcctggcttcaagcaaatatccctattaacagaaaataggtgaggggaagaaaaacaaagaaataagggaagaaaattacttataaacacataagttttgggggaagtagggaaagggaaagaggaatgacaacttaggtccgggagaaattattgctagtaccaggacaagtgggcaagtgaagtgcccaccaatccgcagattaatgagcacatccacctttctacactttatatcctggagctagggtagggacaagtctagcagccagatgatggttcaatttccctaacaaaactaaacaaaaatgtaaaacccttttctgtaactaactactctaatctgtagagaaagatagtccccgaatcaacattgtacaaaccatagttacaaaagatcatatttatattcacctgctcattcacttattttcctgagcccctaataagtaaacgccaaggaaatcagacacagctcccaccttcacatagttgacagtctagcatagaaaataagatgtgctaaaacacaaaaggaaacacaaaaacaaaaacatttccagatgggagatgtgaaatttttaagtgtgaaaaattatcttgtaccaagttttacatgaaactgggttatacaataaatccccaagaaggatgagaaacaagaaatgggggtggggggtatgaaaaatactaatgctaatacagcaactaacaacaccaaaagtgactttaaatatgttatataaatttaatctacctaacaaccccatgagagaagtacaattttcccccatttactaagaaggaaagttgaaagagactaagaagtctgtttaagaggcacaacttttattttatttatttatttgagacggagtttcactcttgttgcctaggctggagtgcaatggcgagatcttggctcactgcaacctccgcctcccgggttaagaggcacaacttctaagtgacagaggtaggatttgaatctaggcaccctgattcttacctctattttgccgcatataattataacaatattattactaacacaacaacgccgctgtagattgtagatccataggctacatactttcattcattttctttgaatactcacatgtctataatttacaaatgaaaacattaagactcttaagacgttaagaaacgtttccaggttatgcaagttacaagaaggtagagccgggattcgaactcagatggctcagattccgaaggctcttttcacggcaccccacacccgaacttgactccttaccctcaaccaagccaagccgtatccctcctgggaacagccggcaccacccactccagcctcgcgcctcatagacacacttactcgggcggcgttccaccgcccgcaccctcccagctctccccagcaccctcgtccagccgggcaaggctctcaccaggcgggagtcgtgggaccctcgcaatcttgctggtgatctctgcagtgagcaccgcgaagtcctgctcgtaaccttcgaagtcggacgacatggcggctccggaacgagtagcccaggccaaagcctaggtcagggaaagggcctcgaggggcagcgaggggccccgcggcttaggaaccccggaaggtgcccccgagagcagaacggagaaccggggacagctctcaacccagccgcttcctggttgttcgtcgcaatctcggttctccggaaattgggttgcgtgcgtgctttattttccgctccgactttaagataagtaagttcgcaaaggaaaagcgccccaattagtgcctccccccagaaaagcgtatgaaaatatgcargttctgagggatcattagaagcgttttttccccccttcgtgttctgggaatcggctccggatccacacgctacaaggcacagsagcttgcttccggagggaggtttgaggcggcgaacctccggaagtgacagtaacagagactgcgcaggggrcctgagcgggagagtcctggcgagggcgctggccgagaggtgctcggcttgtagcaggtcccgcactccagcctctcgctgccagggtttgctctctgcttgtcctgggctgaggtgtccatgacggagtcatccaaggaggaaaaaatctgttccgggtgagcccaggccgccccggatatgcgatggctgaggagcagacaccagggaccacactgaggtgggagtcaaggcagggaatataagcacgattttggtggtctttgtcccaccagagtgggagcaggctctcctgaatgttgagaccaacctggcttaccaggatatttcttccttgggtgaggatttatttctaagccctctgctccatgactcgggcgggaaactgaggcacaagtcaacagcgtctgctgcgtggtagtctgtattatccatgtagctcagatcctcttccagatcttcagatccagtccaggcagagatgcccttccacaaatctctccggagctcgccgccctgccttccrtttccctcgctcctggaggcacttcctcttctttcytccctcgaatcttctaattcaggttcttctcatatactcttctggtcataatttcacacacaccacacacactctcgctctatctcctcccttcctttccttgcatgctctctttgctttcactgtcgctcctttacttttgggccaaattgactgttctcttgatgtttgggtggcggggtggaggagactgcaggcaaatggcatagaccatgtctgactcatacttggcttaattcaagacttcataagaggcagcttagaatttcataaagggaggtcgttgacttgccttctattctggttcacctgttacttgtgaccttggtctaatcactcagcctctctaagacaatttctgttctatgaagaaggaaactgaattagatcaactctaaggtcctaaaattctttgtcttctcaaactattcactaagcgttggatggtgacagtcccctgacaagcggagaaggaataaaaacaactattttggaatcgtgtatccagtttgcatgccattcaaacttgtaccatattttggataagtcaaaagtagttctttttgacatttgacaagatatgcatcccaaagtgtagtgcacttgtgagatgctgttgtgtaggtgtttattgtagttaacaagtatggtatgcaataaaggttttgttttgttttgttttaactgaactttcccattttgttttctttaggttgggtttcagaccaagayactggattctcctagttaagataaagagctttgggtgcctgacagtgaaaatggtgtaatctgcgttaacagttcacagcttgaaggcatgacaattaaagaacacacatggacttgtggcacatggaaatgtgcgcacagaaaaaggaaatctataattcttttaaagtaggaaggcattcttccttgccaaaatgggtacattctgttcggttatcaagtttgaaaatctacaagaattaaagagactgtgtcactggggtcccatcatagcccttggtgttatagcaatatgttctaccatggccatgattractctgtgttgtggtattggcccttacatacaactggaggaagtgtgaatttcatcatgttgataaattggactgtcatgattctttataattacttcaatgccatgtttgtcggtccgggctttgtccctctggggtggaaaccggtaagaaagattctgtaagacaatgaactttaatgataatcgtatatttggtttttgccttatctactaaccaataataccaaacacagcctactgtttgtcctcacagagactaagtatattactctaatcactgatcatttaggctcggagactttatttcatatctgtttgaacacattgatccaaaatagcattttccaaagcaattttattgaatatttgctctgcattaaaaaaaagatggaggtggggtggaggtgggataggttcatggtcaaaagtttaggaaacatcacatgtcatacacagtgaggtttggctgtagtaccttttttcatgtaatacattaacatcccttagaactgagaaaaacgctttagaaactgctggtttaaatcataaagttttaaaatcattgcactgaaaatataacattgggaagtatagtccaaatccatttatagcttaaaaactactgggaaatttatgcttatgaatgtccatgtttcctgctaagggaccacacctgatggcttgtcagaaaggcagaatcttgggctccacttcagacatactgaagcagaatctttattttaataaagtgcccaggtgatgcttaggtatattaaagttcgggaagcactggtgtatatcatgtgctatgtactattcaaaatgcgtacagaggagggtaagatgtaatttgaactctgaaagagcttataacctaagcaagaaacaaacgcacttgtgcaaatcactaaactataaagtagaacgtgatgggtgctgttaaagttagaagaattgagcattgttagttggggacctgagggaggagtgggaatttccaaaggagatggggaagagggcatttcaggttgaaagaatggtgggaccacgtattcagaaacagtagacagccctgtgtgactggggaaaagatcatgtagggcagagacagctgaaacaaaggcagattgtgacagtcttaaatacatgagaaattgtagaccatagaaagttgtaggggttttcaggcagagtctgacacagtcagaggtgtattataggaatattattttgacaatacacggtttgtgctgaagaaaaactacagtaaaggaaactagttaggaagtgattaaaatggcccaagaaaggggtggtgacgggtaatgtcaaggagggagcagatttcagtaggactatcaactcacgattaactcctcactctaaaatacctgctaagttgtcagctacctttttctgaactcctgaatccactaagatttggggtaagtagaaccaactagtgacactgaatttaggtggagcacaaggaagaaaaatttaaaaggacttctgggtaattgggaaagygatgctgctcttaccagaaaacttatttaaaaatattttagctcaaataagaggactggaaatgcaagttaagattctctccttcccctatcgcccataaaagaaaatcataccgtaggaatcatacttatattcaagtatccgatgatgcatttttgtttctgttttgctgccaaggaaatttctcaggataccatgtatctccagtattgtaaagtctgccaagcatacaaggcaccacgttcacatcactgcagaaagtgtaacaggtacctgtctttcttgctgttcagcgaggactgatcaactaattactgatgttttcattgttgcttatactacattagtgctacttctattcactgcaaggttaccatattataaacaatattgtcagaatacttgtgtccataatcgccattttatacttaaattatctagataataaatagatttaattcttccttgttacaagtgaaaagattttccagaaaaatacagatttactttgcctcttgtcctacaagaacaagggaaaaaggtataaaccttaagtttgtttccatatatcaagattaattgtgttagtcagctgccatctggactaactttagaattgttctgagtctaaattataagggagatctgcttttcccattacttattgacaaacatttacactttatacacatctaataatccaggtgcctattatcacaaatgttttaatatcaaaaacttagaagaaaactgactattaaaaatatgaaataacctgtgaccttttttaatgaacagctataatcactgattagtaagaaatttagagaaccgttgaaagcaaataaagttttgtttcaggccaaaacattgtcttctatcaacagtacacggcaagactttgtttattataccatatcttatattctggagttagcttgcttagctcagagatccattaactaaaggatactatgagaacaggaaggaagttacatgtgtctatttgagcccattaaccccactggaggtctataagggatttgttgagtctctattgtaggtcacttgggtcactgcacttacaaactagaagaaaaccaggaaccatgctcatttctttataatgagcattataaagagaccctctttcagtgggtctcctgacttctttaaacaaatacttgtagctgacatcttttcctcagaagctgttagaaagcctgccctttcctgtgctgtttagaatttaaaaggagtcacttaattgtttaaaagctcataaagatttttctttctgttccatgaagtataattctctcrtagctcatggacatgctggattcctatttgcttgatcttttgaagaccaaagttatttaaagtagacaggattttctgcctcatgttttatgtaaatttttcttgttagatgtgtgatgaagatggaccatcactgtccttggatcaacaactgttgtggttaccaaaatcatgcttcgttcacactgtttctccttttagcaccactgggttgtatccatgctgctttcatttttgtgatgactatgtacacacagctttatcatcgggtaagtgaaaatgaaaatgttttgttataaaatcatccatgcaagattaaatggtagttatcaacatttaagaggttccttttggaaatatgctttctgtgatttagttggggaaatagaactttgttttactggtatatgrgttcctttttagaaagcattaaaacttaaattttaagatgaggaaagagtatttgttctgaaaacttacatgctgtagttgaaggtgataaatattttagtactgtatatgtaatttgttagacttcaaacttaatagttatggaaagaatagaagaaaaaaagacaacactagtgcttcctactttcatcccattcatgtggcaagttgtagttctttgttcatttctgattctagtgccctggaaggtggctcatggagcagatgcataccataaaatataaacagattaaaccagcaagagatcaagttgatttatgggcaagtagtcatgagataaagttcaagggacacaaacctccctaaacaggccttgaaagtaaacgagagacacacctgatgggactgccaaactggagagtctgtcctttggggaggggacagcccatatttgatctgctagcttgtggtgtttggaaattctagcccagaaaaatctgaaaatctggatttttatgtgaaatctcttgatttttaaatgttggcacctaattctgaatgttgaaacattatgcaggccaggcagcacacatctgtggccatatttggcctgcattttatcagttcttcatcaccatttgtaaaacatgagggaagaaacaactgaatcctaggcagcacttgtcactgtggaagaatactgcgatgtagaatagcaagagaagagaaaagacatagttctggtttagattagtgtctagtgttgtttatgtatgttaatgttggtaaggtctccttgacactttctgaggaaacaacaacaacaaaaagtaacatttgagaaaactaagaatgatatcctgcacatcggtccgagctcattactatattaattaaaaatagctggcccagctcagtggctcacgcctgtaatcctagcactttgggaggctgaggcggtgtgggtcacaaggtcaggagttcaagaccagcctggccaatctggtgacacctgtctctactaaaaatataaaaaataagccgggtgtgatggcacatgcctgtagtcccagctactcgggaggctgaggcaggagaattgcttgaacctgggaggtggaggttgcagtgagtcgagatcgtgccactgcactccagcctgggcgacagagtgagactccgtctcaaataaataaataataaataaataaaataaaataaaaatagctgtgtttgcgttggccacagggccacgttgttatctctttgatcaagttgttttacgtgtcacagtagagtctgaccagttaccataaccaaacattttgtgcgtgtgctattgttgctgcgatagctctcctttgggtggaacacagtgaagatcgacatgagtgcagcccggagagatcctcttccaattgttccatttggattagctgcrtttgctaccacyttgtttgccttgggattagctttaggaacaaccatagctgttgggatgttgttttttatccaggtaagcatctcaattacctcaagtcaaaagtgtcaagttgttgggactgattgcacaagaaagagacaaagcctgtatttaagtgtccagtatgaaatggaaattatttttgcttatttcatttaggtaactaatctcctttgtattcgtcagataattttgatttaattttgccagaatttctaggtattgatttagtttttaaaatgctaacttcaagttaggtaagttctggagcacttcagaattgagagagctcttctcacctgtacagtctctcttgctcttcacatccaccccaatagaggagtcttactgttttcccttcccaacacgtgattaattcattgattctcaaaaaggttaagtgacttacccaatgtcacccattcatgtacttggtaaacattttcccttcccgacagatgattaattcattgattctcaaaaaggttaagtgacttacccaatgtcacccattcatgtacttggtaaacactaatgttattttataatagtatatatttaataatagtaatcataatatagctaacatttattgagcacttattatgtgtaaggcactgttttaggcactttacatgtattagctcatttaatctccataacagccctatgataaagatgctatttaaagcctactctgatgaatcactttgctaatttctaaggctgcataaatgataatgaagaggtagctgcccttaggaactgacagttaatattaaacagttaactaatacagggccatatgtacatcatagatttatgtgcacagtgctatgagaacacagaggaggaggacctggctctgaagggaccaaaaaccattctttttcattctttttttttttttttttttttttttttttttttttttttttagacggagtctcactctgtcacccaggctagagaacaatggcgtgaactcagctcactgcaacctccgccttccgggtttaagcagttctctgcctcagyctgccaagtagctgggattacaggtacctgccaccacacccggttaatttttgtgtttttagtggagacggggtttcaccatcttggccaggctggtcttgaactcctgaccttatgatccacccacctcagcctcccaaagtgctgggattacaggtgtgagccactgtgcccggcccaaaaaccattcttatgacttattgcattcacgtaattcattcattcattcattgaaggcctactgtgggccaggtattatgctaggcccttggaatatgatgaggactcctgggccaaggctgtttatttttttattgttgtttgtttgtttgtttgtttgtgacagagcctggctctgttggcccaggctggagtgcaatggcacgatctcggcttattgcagcctccaccaaggctgtttctaacatactacactgtctctctgaaggcacagccagactttaagggaactcttggttttaaaataatctggttttgtttatactttattatcgtctactagcctgggaccaaattctttgaaaaattttccccaatgcctctaatttagaatcatattagaaataaactaagatcctataatataaaagcctatatatgtggaatcagtcatatctaggaaaatcaaataatagaataaagactgaatacattcattatttttaaggcaagtgaaatattgaggttgactgaaatgagtcactgttacttctcataaatagattaatcgtaaatttaaagttagttaaaaatagtgataaaagattttaatagcaaattataagtaagcactgattaaatggattatatcaatgttttattaaaccttgctctgaaaatagtacttatgacataaagtttgattaacatactagattcagatttgattatggatgggtgtaatcattgttacggagaggtaccgtggtgcagtagttaagaacaaggactttggagtcagacggatgacatggtaattgtggtacttaacctctgttatccttggtatctttgtctatggaatggagtaataaaagctatctcagagaattatgaatatgataatcttaaaggaaccaaggtcgcattattaaattttactatcatttaatttccagatgaaaataattctcagaaacaaaacttctattgagtcatggatygaagagaaggtaaattttaataattgtttcttcaatattaaaaaartatattaataaaggactggtaaagtcctgaatattaataaagtctgttattagaccggattaacgaaaagtgccwaaaagtgaaaacatggctgccaaatggctaccgtaagtcatttgcatgccacataaaaggtgaatataggaaacatttttgttcattctgtaactcccacagaaaggtgcttctcatayaccctgagtggtcgcagaggcctaagccacacgtcaaaccatctgtttgttgtctcttagactagaggagaaagcagcccatttggaaaggagcttccaccctaccaaactgccatcaggtttttctcagtgttttagacattcaatgaagctcctaacattttgcttgtcacagacctcacaatgtccaatacttcatactgtccattgtgattctagcatgaaacacaaatctgactaccctgctctgtgtttaaaacttctcagagcctcaccattcctgtggcagggtttgaaacccaaatacctgcagggtctgggcagataacgtccatgaaggggagcaagcctgtataccaaagaattgcctggcagaccaagctgattgttgccacaggggaatattcacaatttccaaattacaaaatagggagaagaatagcwtcgttttatatctttacaaatctctttagtatctttgacttaagagaagatggttggattctcacttctgcattcagtctgttgagatatgttgcttcgattgaagtatgtgaagatctagcctcacacagataagtaggtagaaaaggatagaatattttaataggccttttacatgataatagtggatgttcttccgtattacattgaaaacttgacaagtgatatttcttatcaataagatttttatacctttttattttaaaactcatcagtctatcttgctctttgaattaatcttttaccagtatgtggttttatgtaacatcaggcatcggtcatttggcaaatactagtttactgtgttatgtagattttgcaaacgttaaacacctttcattatacaatatcccaaaattgcattcacgtatatcaatatatcatttttatgagaaaaaatccttaagtattggaaagctgtcaggctcacagtggtagatacaaggtttttttttttgtaattctagtatacatttgaaagccttaattttttactattaacccatactgtcagtcatttcccttgaagtgactgcctgactgttcgtttttgagaaaatgttcaccaagtcctgaagtctgaataaccttagtttgctatattactcattctttcaaataagaatagtgttacattaaaaaagctggctctacagcttttgttagcttacagcttaacaactattttccttgagatgatcattctacttgggcacgctttatgtatacttctcattttgtcacacrgactgttaaaaataaaggacatctccttgagagttgagatttaatatttaaaaacaatttttactgcttcatcaaggacattcttacatggaattgctcataatgactaccaacacagtttggtgccactgccttggtttttgctaagatgccaacagttttattcaccattgcaaatgtcaatgcaacaaaaagacaaataacatttcagtattattatgaaaatagcttggccttgctgaccagcaagaaaaagtcctgaatactcaaagtgatctataaagcatgctttgagaaccactgatgtacaggttgaagtctgagcttcttagcttctacataagtaagaccttttatgacttctttttttgttttctggcgacggagtctcgctctgttgcccaggctggagtgcagtggcacaatcttggctcgctgcaacctccacttcctgggttcaagtgattctcctgccttagcctcccaagtagctgggattacaaggtgtatgccaccatgcccagctaagttttgtatttttagtagagacaggctttcaccatgttggccaggctggtctcaaactcctcacctcaagtaatccacccgccttggcctcccaaagtgctgggattacaggcgtgagccactgcacctggcggacttctttttatctacttctccagcctaatttcctacccttctctaccctgtctcacacttgatactaaattactcatagtttgtacatcttatgcttctgtatccttgcacatgttgttccctctgcctagaatgctcttccctctctttttgcctgatttcttgcttctcaagacttagttaaggtattgtttctcccaaggacccttcctggatactccctagacttggctaagtactttttgtttcctttgttcccttttcccatagcatctaccacaccccttcatcaccttttaacacacaatattgatagaatcctaacttcattgagtgtttctgttaggcaaagacatgtcttagtcattttataaattctcttatatttaccagtttttctttgtaaatagcctagaactcttttctttgaaattcagtccattttgaagactctgaagctgtgtttataaaaaagaaaatgaaattattctttactttctggggaggatggatttatataacttaatagattcatatgcattatagcttaataattattttagtaaatagttaactttaatatcactcaacaaataattgcaacattttccataaaacattgtcccctgataatcaaatatttcaaagtatcatttctaataagcataataaatatattgacattagattaacatttttttgtttgtttttgtggatgaccaaggctgcttataaaccgccatgctacatttagaaattacctcagatgagattgagtatgctgaatggtatggccatagactagaaattatttcagaacgggcactttattgctgagtaaaaaattcaaacaaatgaccatattaaatttataggaaatgtatagaaattaccagacactatatacaacaaatttgaagggatttgtatacttattgttaaaataaataatgtatctttgtaccactaggtgtcagtggaacttaagaaatccaaagccaatttatttcctcaagttaaagctaacagtttaaatgcctggaatatatgcaagctgaatagttatgtacatgcataacatgtacatataaatgcatatataaatgagttatgtgtacatgtgtgatagtataaaaaaagaaagaagatctcctgtatatatctgctagctttaaaaaatgtttttcataaaacagctctcctgttacacctttcctggtcattcccatgggcatcactgccacccaggatataactgttaccctctgatacaactgttacattctggtgcaccccacaaaacagttctatcttgaataaaacggttccatcctgaataaacctttacctttctcctgaatctgtttatctgcatcccttctatatacctgaattgttttgtattgctgaacaactaggagcattgaggactttttatgtatgagataaagttagctaacttttaataagcctttatgagtgcttattcctaaagaaaccctgtcagatatttcctaggtaatcacatacaaggctggtgttctatatcaagttcttcctatattgtgatgaagttgtctattgcttccatgtacactaatattacagcaaggaggaagtatttttatgaatgttagaaacttgagaaataagtgttctcaataacatattactgcaggccacttagacagaggcacctgccatcttatatctttgttacccacaggctaaagatcgaattcagtattatcaactagatgaagtctttgtttttccatatgatatgggaagtagatggaggaactttaaacaggtatttacgtggtcaggggtccctgaaggagatggacttgagtggccagtaagagaaggctgtcaccaatacagcttaacagtgagtatttttgttcaaatagcccttcctttttgcctcgccttctttcccttaactccccctcaactcaagtgacattttgtagtaaaataagtaatatgaatgttttcactatgtcaaaatgaatctaataattctaaagcactccttgtatcatgtatctccctttatttcaatatctccttaattctctatacctgtgagataaagtcctgatcccttaacatagttttatgaaatctggccaaaaattaccttccaacttacagtagcatatgaattccttatacattcctgtcacccaactttgcccacaattttttccatcttatatgacctccactctatctaaaattattaagactcgttccagtcttacctcttccataaagtctaacctacccccatagactcatctgaatgtgacatttaatcacatactactctatggtagctcatgaagtctcatatttttatttaattctgctatcttatatctgtaactycataagattctaggacagagatcatgagttatctttatttctcctattatatctaatatagtgctatttaatagtagctatgtcaaattaagttatgatgacttttattcattcaacttcattattaaatgttcttcattattcatttgtagtttgtctgccatgtctctacagaatcagtgaatctcagtgttttcacctgagaagcttcatgagggcggagaatatactccctgatccctgggccacagtaagcactctaggaatatacacagatgaggacattagagagtgaatagcgagaagaaaacctcactctcagcctctggttcttagcatagggcctttttttccatgctaaaacaacctgtggcctttaaattatcagcaacttgaaatgctggaaaattggggttttgccatatcactctgacagttgatgaggaaaggcgatttttcaacattgagacaagagacttcatttttttctttttatttcttccaaacagatagaacagttgaaacaaaaagcagataagagagtcagaagtgtaagtacttcttttgcagtggtaatttttttttcttttgttaggctctgtacttccatacagtttttttaattgactgactagaaaccaattgttggcctttattaaatagtattccttaatacatttgttgaaatttgatgcagttaacttttgtttttatttaaataattgggactagaggttgggaggaatttagtccatttatattgccaacataggaaaataattatcctcaatacagctccttaatgtgaaacctatccttacaactatgttgttggatatgatggccaccagccacatgtggctgttttatttaaatttgttaaaattaaatcaatttaaaaattcagtttcttgtttgcattcactacattgtaagtgctcactcagtagctacatgtgtcaagtgctgctgcattggatactacacatacagaacatttccatcatggcagaatgttcttagccctgctctaactctaattcttagctatgggcttgaaaagaggagtaagaaaagccttgagaactagaaacattagttgcctcccagggaactaggtggatggggaactgggaggttcccctagaaggggaactagaaggcttgtcactggatattttggatcttgctttaaaatttgaaattcagacttaaaactcagatatcatgggtgaatatttaaaggtttcttctgatcactgaygacaggttcgctataaagtaatagaagattatagtggtgcctgctgccctctgaataaaggaatcaaaaccttcttcacaagtccctgcaccgaagagcctcgaatacagctgcaaaaaggggaattcattttagccacaagaggtttacggtaagtaataggaagtactgcatttcttcttcaaggacaaaattaatatctagcctaaaaaattaattttcatcttttaaatatttcagatactggttatatggagacaaaattcttgatgattcctttatagaaggtatggaaatggaagggcatgtttaaaggacaagactattagcaataattccaaattttacaagaataacttttataaaccaatcatgcctaatgcattaggggaactgcatagaagggtatatcactaagcaacaaaaggaacttccttatatatttctctatagctcttgtatttttcaggtctttttaatgatagctaacatttgagctcataactatgcgaaaagtacttgtataagtgctacccttaaggtgtagaagtccccaaaatacttcggaggtaggcactattatttatatttgattgagggaactgaagcacagagaggcaacttgcccatagctatgcactgaaaacagatggagctagggcttaaccccaagcagtctgactccagattctatgcaccaaacccctgtactatttgctgcccccactttgagcrtttctcttaagttgttataaaaaccagtagattgaaactttgtgtttttttttttcttaagttttataattgtttctttttaaagtaaagattagctcgggatgttctttaaaaaatagttggggttaatcataaattaacctcttatgacggccgtgatatagaaatgtatatgttaggccaggtgtggtgactcatgcctgtaatcccaggactttgggagaccaaggcagatggatcacctgaggtcaggagttcaagatcagcctggccaacatggtgaaaccctatctctactaaaaatacaaaaattagccgggcatggtggtgtgtgcctgtaatcccagctgctccagaggctgaggcaggagaattgcttgaacccgggaggcagaggttgcagtaatctgagatcgtgccactgcactacagcctaggtgacagagcaagactccatctcaaaaaaaaaaaagaaagaaatatatatgttagaaaaagtctaaaaaggaaatttacaaagactacaagaagatagttccctggaaaagacagtgtgatggtgtgccaaaaacacctttcctgatcatacacatataagtaaacacccataccgagttccccctgactctagttaggagctgtctttaaccacattagtccctattcgggatcatcaaatttgggaaatacctgttcctagcttgttatgaacatttaaaaatcttatttttttccccttcaaactgtgcttataatagatagcaaagtggggaataaaagtctaactacaagcttattaatttgaagtaataggacttactgctttcagtaatgtcactgtcatccatcagactatttcacctcaatttcattttctccctcaggtgtttcaagaataaggggttggttccctagaaaatgtgtggaaaagtgtccctgtgatgctgaaacagatcaagccccagagggggagaagaaaaatagatagctgctgttaaaacaaaattatcctttaagtctgcttaattacttgaaaattgtacatattactaaagaattatgcaatgagcctactctggttaagatgttcttttcctcaaaggtgccctagtgccatgatttaaatatttttattaccattttgaaatggagaagccattctgcatatgcctttgaattcctgcccctctttaccacstcttcctccccctcaaaggaaaaacatttcatccaagtaagttaacggcattttctgtarrattttcttatgcactgcacactctggacctcacctgcagatacagttccccccttgccaggagcatctgcatgtggtacttctcttttccctcagttgatatttcttatatgatattctagatactatagaactcaatttgtcagattcagtataacctcagattttgttacctgtcttttaaaaatgcagattttgtcaaatcaaataaagatcaatggatgttgggtawaatcagtttttacttaaagcatttttctttttgctgactaaaaaggttcatcttagttccttatggaaaaactgctctgctgccctgtggacaactggcatcttaaaacgtggcttaagacatgacacacttgcttcaagatattaaccctattaatgggatattgcggtcatagtgatggcagcggatggcagtggtggcctgaggggtgttgagggggagccgtgataggcaggagccaagcgtagctacagctgtccagccgtggctgcggacccgggcatccttgtgctctagggggccgaggggaaataccccccccacaccccccccccaacaactgcttggcctcttcctgctcctggcactcgctctggagcaaaggtgaggccaagcccgggtgctgtgaggacctggccaggtgtacgtgagctctgagtggtgctgacaccagcgccctgccgcctaggccccctctggactttgggctgccagccacagaggattccagctggggaagcaacaccccaaggatcccgtggcagtagtgttctagactttaaacatagtgatatcaaactactcatgtacccttgagtaaaaagctgaagcttgtgtgagtggtaggatccaagctggtgggcttggatgcttaaattgggcttgtctaaacataacagtggaatcacagaaggaaagagaaagcctatttctctggacttcagaaacctttccaaggcagggaatgtgaagctttgggggccaggcctgtaatagttgaggataagggaagagcacttgggaattcagcagtgaacagacaggtaaaatatatgtaagatggagtcatgttattgtgaagcaagaaggtaggacagtcttgagttggcatttgaagcagatgaggggacaagtcatgtgctttgggatatttgcattttagagacagcagcaagaacaaaaacaggctggacctgtgtctgacacgtttgagaaacaggaaggtaactagtgaggttcagctgtaatgcgtgaggggagaataggaaaggaagtgaaggcgagaaagttaaagtgataatgggagctagactttaaaagttaattcctgcctacccttttgtttcagatccttaagaatagatatttctttggcttttctgggctcaaaatctagaaagaccatccaagaacattctctttaactccagttggaggccagaaaagaatactattaatattcaagattataattagagtacaacaaagatggtaaaagaatggatatgacttgtgctcagttggagttttggctcagctggtatttgttttattctttacagctatgggataagaaggtttggtcttcagaacttacttttcttcactaacctgttcgcagactagaatcatctgtgggtcttcttaacaatctcagtgcccaggctgtatccggccatttaagccagaatccctggagtggcaaccaggcattagtggtttttttgttttgtttttgtttttttttttgagacagagtctcacactttcacccaggctggaatgcagtggtgcgatctcggctcgctgcaagctccgcctctcgggttcatgccattctcctgcctcaatcttctgagtagctgggactacaggtgcccgccaccacgcccagctagttttttgtatttttagtagagatggggtttcaccatagtagccaggatgttctcggtctcctgacctcatgatccgtccgcctcggcctcccaaagtgctgggcattagtgtctttttaaacttcctagataattctattgtgtacccaagtttaagaacagatactgtacttgatttttaaggggtccttgtttaagactgattttcatcatggtccatgaggaaagaaacaccacaacgtaagtatctgtaatagtttattttaaagactttacatttacaagtagaaacaacatgtgttatctgtgggtaaggtagagcaggaactctaatccaagggtgggggagatcagttggttccttcacagaaaataagcctgttgtgtgggcatcttgcttgcctgtagatctttgttcccagttcaggaggtttttattcagtgcttgcttcatttactggaaaagttcactgggcccacctgtcaactccttcccccacagcttccagctcagcagcaaactgtagggaacagatttactccccagttcctactgtaaataatgctttaagaacagcattccttttggacaatatgtcatagacccaatttttaatactcccaagtcagatatctaactagagagtttaggaaatgtttggtatgatcaaacttttcccttcagtacacaatttaatttacgcagaagagcatcggagacatttgtctcatagatatgattgacatgagtgataggctaaaactaaaattttagtggtttgtggagtggctagaaaacatgaattgtaagcagtttttcagaatttaaaaatctcttagtttgaacagtagaagatgtaaataagcatagagactgttggcaagttatgtttatcacaaaacaaagaagaaggcacagagggtccctttgacccttgaacttgtggttactaatagtattaaggttggaaatcatgaggaaggacacagaacataaactgggatcttgaagacaggcatgttgataaaagtagccctgaagccttaatattagcaacatcgaagatgggaaagacaggattgatttatttgggaactaagtttacacattatatgtctcaatataaaacaaaagctatggctttagagtttaacaggttaaaaaaaaataggaggaaaggcaaaacaaatgtaagaatagtttttaatccattttctcacaagcagtgcacagtgggccggcaggtacttaagtaccttatcctaatcctggatgtgctcatacaggctgtcaatttgggtccgaaagtatttggaaagctctcctcgctttgctttcaatgttggtgtcaagagcccattttcaatggaaaatggctctggatgaagaaaaatggctttgacctggaagatgaacacacacacatccatgctcattagtgatttggacttctctgcagagccccctgagtgctctgtgaagaaagtgaggttgatgcagtgaaagggtaaaggtaacagtaacacatgcccattcccacaaacataatttaagaaagtaatgagtagggagaagggagaatggacaataaacagcaaaaaaagggcgctgtacaagtaactacaaaaggtcattttgtagttaatggcacaaaatctaaaatcaattccttagaaattatacatttaaacctcattagatggaaactttaaacaaaactttctgacaagaggccagtataacatcagtggtagcacacacctgttcaaaagttttaaggccactttctttcccaattttctgcaagtcttctaaaatggcttcccttacaacctaagaatacaaaacatcacttaaagcatggctgtttcaaaaagcctgaagggctaagcatgaaccaactcaaagtgcctgtcaaagccatgcagtatgaaagcaggaatataaaactatgcacaagcacattatatgcccaatattgaaagaaaaactgagaagaaaaggcacatctaagtgttaacagttttctctgaatagcatttttactcttctttcccaatcttttcccacaatgaacatattattttaaatagaaaagagagttttattttttaaactctccatcctatccccgagtcccataaaactattcagtctgtttgggctgcagccacttgtgacagatgcaggaactggtgaggcatcctctcctccacgatgggcccatgggtgtgcataaagctttcctaggcaagacttacttggttttggcacagttcctcaaaggagcccttcaccccaagcttggctgcaaatgagggaagtacatctgtgtcaggaaccaccactcctactaaggatgactatggaaaggaaataaaaggtgcaagggcatgagagaagttatgtagggatgtcccccagtagttaaataaagcagaattatgtcattgtaatagttatttccccaaaaccttaaatccagtactagtgttcttttctcaccatatattttcaacaccatggaactgtaatcccattttcccactcaatatctcattacaaagatgttccattcaaatctgatccttcaacattaagcttaaagcgcctctggcttgtccatgtcaactctccccttgtcccctaaaagctacatttaagcacagtgtgtataaaacagttcgttgttttgggataaggagttccttaaagctacgtttaagcatagtatgtataaaacaacagtttgttgatcaaacttttgtttgttgctttatatatattgcaacagtttgttgttttatacatactgctcttaaacatagctttaaggaactccttaaggaatgggaactaagtgcaatgtggagctcattttttactgaatcattaccttttagtatagccattctaaacaattctactgacttgtgtacaacgtccatcatagttttgaaattttttaaattgaaattgccttatttgaggtttggaatgtaacttcatttttttttttttttttagttttataagcttggatcttctcattctgaacccaactatacaaatttcctgtagctacaagaaccagcatggtttgtgactgaaatgggctattgttaaaatgatatattacccgtaagctctccccgtgtacaaaaatttgtaacactggttgactcctgttgtagatattttctatcttctctggtgcaatgtattctccttgggccagcttgaaaatgttctttttacggtcgatgatcttcagagttccattctacatgagacagataaaagtatcagtatttttgagccacagagatgatatcagtggggagagtggtgaagtcacagtcatctttcttctctaaagctgatttctccagagacttttgagctgtctttcatttctctttcttggctttggtgaaaggggagggaagcatcgtgcagcaagaacctgtctttactgtatatctatgtggagagtcaatgcgcagccttagagaaagtctcctggatctactggagttatgcaaattgatgcctcatccaaggaagaaattgcacagctctcaatttccaatcactaatttccaattagttcattttcagaactctcagaaatagaggtgttgtcttttgtttagacttttgatttgatttgaatagttctcccaccacttgactccctgttatgttttcctccttgttagatccgggagcaggctcaaacagctccactgtgctaatcaagcaactcaattactgggcttgttaggacagcaacagggctgagaggactctgaccagccaccaaaggtcatttgcagcttcatttctctgaactaattggtctgaggagcttaggtctttagggatttgaattgtagaattgggacaaatggcaaataaaatccacatgctaacaccctaagtagggcgactaactaaaccaacactggaactatcacaaggccgacttgataaattagccatcaattcagcctaacgttcattatctgaaagtgattaataaggtgcagccttctataaccctggtgtggggacatatctgttgcttacatcctaggcttattagagtgttatttaattctgttactagacagaaacaaatatattagcaagatactaccaaacccaaatcaataaaatgcatcgttaggaccagtgttcttaaaagttacattgtcaagcattccttaaatctcacttaaatcttaaatattgattgagcaagaaaggagttttaagttctagtgacattcccacttccccagcacatagttaagacaaaact

SEQ ID NO: 98192 - DNA, 44927 bp, Homo sapiens
ctaaagtcctgaccatttctcatttcctgaaccagagcatgctgatcaccactggcctttgctccagcaaagtgccagcttccccagccctcaggtggttcctaaccaggcttcacctggaaggcttttaaatatatggatggccactaggaaccactaaggagccatttggtcttcagctgagcaccagtcattttaagttgtctgggtgatttaatatgtggcaagtgttgagaactccagtttgcctccttccttaagcttcctgaccctgggccaaggccacagccaaggcagtactgcctgatatatatttgcctggttaggtacctaaaggatctcctcaggtctggcatgttagcagtggtcactccggtgtggccttctttacagcccagcctagacccacagcctccctggtggaagccctcctgggtaggccctggggctcagcagatcaggaaagttgccagcaccttgcatcgggcctggcacacaggcagcaaatcttgacgggctctagagctcccaccacttggctggaatccctgctggggcagagaagatggagcaaaggggcgcaaaccaggtaagtgctgccttagggggctccctgctgtgccctagaggtgtcttaggggaaactaggtccagaaacccacactgaggtggcagagggaaggattcagcagcagctgaagctactgtcctgcagcccagagcacacaaggccaactgaagaccctgtgggcctaggccagagaaggtaaacgccaggttggataggtggtgggtccagaggtggtgcagtggctggagtctttggcttctcaccctgaaccagtcagattcagcacagcaaacttgggttccctgttccccactaaggggtaacctctcacccatgctcatagagagtgcccctacagcccacgggtccttctcctgcataaaccccagagtgcaacactggcatccagcacagacatgccacgggtcattttgtgttgtctgaaataagcagtgactgagcctgcaggggccagtgatccaggaggggcctacacagtggaatttgaggagctctcccacctctctggacaccccaaggaactgcctgtggtctcactgttggagctacctccttcactttcagtgctgctacttttctcagaaataaatatatttttattattttatgaaaataacaatacttactgtaaaaataccaaaatccaataccatcacatcttaaaatgtcaatccttccctagcagcgggtgggatagcgggtcactcccaaacaggctggtgcagaggtcaggatcccaggcactagaggtggggcacaggcagggggctggagaaggaagcagggtgcagaggctttctgccaactcacttatgctccctgagtggtttctttgaggattgttcctctctgctcatcccaagctcccagctctctttagctgcagaactcccattcctgcatgatggctgagcagaatggcaggcaaagactggatttttggggaggagggcaagtgccactgaggatttcccaagggccttaaggtgggccccaaaaccagcgaggagagaggagggcaggagacccaaaaagaaagttagtggagcagagctgaggaacccaggctgcctgagcctctggggctctgggtctgaaatggctggggggatgcgctagctgagagaggcaacagggtcgtagaggcagaggggtcaaaggggaggacaggaaagaagcaggaggaacccgggaaggcacccgacgcctgcgcaccgccggagagaggccaggccccaggctcagctagaggcaagcgcacccgaaggagccaagctgagcaggacagagtccaggcctggaaagccggcctggagagccggcctggtgcaccggccagagcaccccgagggatacgaaagaagaaagaatgctggacacaggttctgagcacctgaaccggatactgaaggctctgccagccctccagagcgctggcagtgaaggacagaacggctccgcagaaaggtactgggtagtgtctgggggagcctggcctacgaattccacccactcacatacatcccttagctcccctagcacccagcacaggcctcacattgccgaccctagagagggctgctgcgggtcgtggtgttgggggtagggggcaggggagtgtatttatccacaggcaccagggatccagttcctagcaccacgaaggctcgggaggtcagtccctcccgctgagcggccaaaaggcaagaaggcgggtggtgcgggtctggagggtcccgggggaatgaccagaatgggcccacgccccgaaaaggcggcaggaattggagggtggcggaggatgctgagcaaggttgaatccagagaggatggcctctttacccgacttcagccgggctttggagaaaccccaggggattccagttctaaggggagctgggagcaggagtgcccctccctgccgaaggtcttgccattcctcccactgagaatgaaggacctgaaccaccattgccctccccccaccgtctggcatctcccttccaactcccctaggttcagtttctcaatcatcttaccaaaaaagagaggaagtaaagagtcgaaagaaattatctgggctcctggggtattggcgggttgagatcacagtgaggccgcaggtggagactgaaggtgaagaggagagcagcaggcccgggacaggtcccagcttcgaatgaggaatccctgatcccagtgaattcgtgccaggcggactcaccactcctccagctctgcgtccgtcttgcactgggcaggaagtttcctctagacccaggcagggacccaacttacgcacgctttgttctccaacccacgcacatactctgaaggcgcggtaccgcacccctacatcccccagtacaccctcaccatgtgtctgtacccgggcacctgtggcccagccttcctcaccaaggacccgggggacttagcgaggcaagatgtcctctgtctctaggaaggggaggacgccggtgggagcctagtggctcctgcacaaagcgccttcttggtggggaactagaccgcccaggcagcgagctcagggaggctcgggggccgaagcggcctggggttcaagaacctgtgttccagaggctggccaggctcccagctcggcctgaaaggggtctgactagtcagggaagggctcggtgaggagacccagtcctcctctccactcctcctccatacacaccccggcgcctccgtacacagaaaccctggtttccttactccatccccgcatgcacgtgcaccggggctggcgccccactgcccagacctgcccagaagagaaagccaggattcctgagggaggccgaatcttatacctccaagagagaacgtgagaaaggaagaataaagggtgcaggagaaaggagaagactggaacacccaagagtcaacacctagctggcttggagctgggcagtgctccctgcaaggctccccggggcagacagggaagagaaagctgccagaacctccggggtcctggctccgaaggactctatgggaggcttctgacttttcccaggagtgtgctgacacctaggacctcatccatgggccctggaagaggactccgggactaagacccgagttactggtgtggaaagatgccatttgtgaaatgaaaaattaaaacgatgacaacaaacaaagcctggcacggtccagcaagtgctgtttttctgtttttgtctgcacagaaactggggtctcatctgcagcaagcagaaccgctagagctgggggtaggggtgcagtgtccaggcaagccgagtgtttgcttatatttctgtttataatttttgtatactagatgcatcttactcaagtaataaaaataaacttgagagagccagagaggcaaaaaactgaagtgcagagtagaagtggtggttgggtgagagacaagacttttggggagcttggcggatggagagggagagggtctgacctgcatggcagtcattaaggagttcactgccactcccagggcctggccgggaggaacagagtgcagagctcaccgcacatcatgcaacatggattccttcagccgagctcgagctcggttccactggatcacactttccccaggaccctcctgaaacctctttctcactcctccctcctacatacatatacattcctacagccccgtgccccaggcccacaaactctcagcacctacaggtagtccacgctgctctccctctgaaccgtaacttaagccttgggctcaatcccacctttcctgcccccccgcccaaatcactttgtggctgcatttcccttccttccttcctttttttctttccttccttccttccttccctccttctttccttcctttcttcccctcttctttcctcccttcccttctttccgttagtattaccagcaagacctcccgacctgccctttttaccctccccttttcctaggttccataccctaagtggagtagttgttaatcactcaattaaataattggtgtgtgtcccccccaacctcaccttctgccgggaacatctggcatcggaaacacacaaccattcacatgcacattggacacacactatgccactgaaacacgcacacactcatacacctgctttcccactcacagggataatggaggctgcaccagggacacactcagccatgctacagccactttcacgggcatatccacgccagctctcacagacacccttaaccagattattggacagaccaaagcaccctgctcacgccagcaggtcagaaaaacgaaggaaagtctgagattgtagtgctttaggggaagggtcacaggccttgttgctcgtgcacacatttgcacacacaccttcgttctcaatctttcgtccaggcccccttctgagtcaaagaaggccccttctggtgcgttgagagagacactaggctcgggagagcgctggcctctccagtaaatggtggggatccgcacgcctcaaagggctgcgccccgggaccccagctgctccgctcctcacagcctgaccctgcttcacttccagccgtgctcacctccgccctttacctctcctcagcctcggagaaggcgggacccgggacagcgacagagcacggagaaagctccgcgggggaaacaaggaaatccccaccttctatccctgtctcgtggtgcggtcccctgtgacggcctcagacctgcggggaacccaggactttgccgcctaccacggtctcagccttattctcgagcctctgggcgcctgcaaccggctgtctgtctgtgtgcctgttcactctcccccggggatgcgggtgagtcggtcttcttgcctcactttgctagccttattcgcccactcttgccttgctcttccaggagggccgggggagggggtcctccggtctgggttcatgagtgtgggtgtgggtataaatctaggggttggcgcactgagcctaggcctgcgcccccgcctccagcacccccaccgaccccaccccgccaagcgcccgagcaaggccaacctcctgttctctgctaggtctctccgaggtcgccttctttgcgcactttggttattgatcctgctgaaccggccggagcgcagcggctgcgcttctctgggaaagaacggagtggggaggtgagtaggctaggggaacggtggaggggaggagaggttgatcaactttaggagggggtgtagggcgttcctcagggccgccccagtctccctctgccgggcttggagcagggctagactaggggtggagcgggaccaccgctcccctccccctctccccctggcgcggagccccggcgcagctgggagtcttggaaacctgactcccacccaatcagcagggaggggaggagcagcggccaggagcggggcctgaggaggaggagtcgagcgggggcgcgaggggyggggagcggckctcccggccagcgtaggctggctccgcsgtagaggggttggcagtggcggtcagcatgggcgatgggggcgccgagcgcgaccggggccccgcgcgcmgggcggagtctggtggcggcggtgggsgctgcggagaccgcagcggagcgggggacttgcgagctgatggcggtggccacagcccaacggaggtggscgggacctcagcctccagtcccgcaggctccagggagagtggagccgacagcgacgggcagcccgggcccggcgaggcagaccactgccgccgcatactggtgcgaggtaaggggacagcccgcggccctgctccactggaccctcaccctacccatactggggcccccgacctagctgcagctgacacctctcaattcrtatattcattcattcgtcatccagtcattcattcagcaaatattattttgagcgtctattgtgtgctggacattaagctgagtgcaagggacaaagcagcgaatgggaccgaagcggtccccgtttctccgcctctcrggccagtcccctagttctaggcccattcggaacggctactgtggcgggggcagaaatggagtgcgggatgctgagagcctggactccgtcccgtgaccctcaaggcaagtgcggagaaaagcgtcttgcgcgctccgcggggacaggacgtggagggagcagcgtcggcaaccgcgggaggaaaaggccccggctctgcagggcggccggggtgcttcctcgcctcctgcctagccgcgtttcccgtccccggcaatcgggacccgcayggattgcccaggggagacggcgcgggacgcggagggtggcgtgcgcggcgctagcccgctgtgcttcactctctcggttcccacttcctcgcggcgcctgggcccagccggctctcggcgccgccttcccgcggcctggcctttcacgtccttctctttctccctcggccctcgtcctcctctcgtctttcccggccattcctctcagccgaacgcgccttcccagcaccttcttcctgcaagctcctccatctggactgcgaccgattacccagctcttcccggcctcctctccgcgaggccgaggctccccaggtccccagcgccagcctttcgcaatgccaagggctccgctttccctcgatctgggcctcgcccggcgagatgagaggagaaaggggactccggggtcttgccctcagcccgaccccaggccgcggccagagcctgaagtccgctgcctcctccatccctaagccctgggaccgggagacccagcgccagaagaggccactggcggtaatggctcccccaggctccttcctgggctccctcctcccggcttcctcctgctgcctctttccagcctcttcacacgcgccgctcgggagagccactgggcctctggaggctaccggcccgagcggatttctttggcctccgcctggggaaggcgaacaggctggaagctggccctgggtcgttccagcgaggggattatgtttgatctgagctcggctaccctcaagctgactgggacaccctgggccagttgggcactayctctctgcggctgctgggtgtgggtggcactggggactggagggtagagcatgcatgcagcccagtgtgagggtgactgatgactgccttgaatacagagacaggggccttagctctgggaaacattcctggtgccagatgtcactgggacagtaggtgctcactgctactcatagttgactgcttgagtcaaggcagttataccatcaggaattccagcaggtgtgtggacctgttgggcaccagggattaaatccgattttattctttagactgtgggatgtcttgagtgaaggcataagcagaccttttggttccattaaaaatatctgtaggactgccagagaaatcagtcctccaatcccacacattcccaggggargatctaaagtcactgcctgtgacactcatcaccttgaaccccacctatgggtggacattttcttccccccaggacaattgtgagttctgtgcccacctaacatcctctccactctactaaccctgtatgtagagcaaataagttttgtgtacagatgtcaattaaatagccttcaggggtaaactcataggaagtggaattcaaaagtgaccctccaccctgtgaggtggggccacccaagctgggagcaatccacagccaggcagagatgggcttgcactggatgtgagacagcctgtgtgcgtcttcagggggtgtacttttataaatgtatgtgcacacacagaggtgccaatgcatttgtaaaatataatmgaaatattagacataaagcatagaggatatatttacacacttgacagaaatgaaaggcaaatggggcttttataaatccctctgcccttccccatttaatgatagggaggttattatgggcctgaaacgctcaggatgtgatttgccactaatctctcctagccagggtcacctgtgttactggcagtcccaccatggctcagggctctgatcaatgaaacaggcctggcactggtgaaggaaagtctgaactaactgccttggcccctgaatgaacattccttccataggccttcaatacactttgcccttgacctcagagaacacatcctcccaaagagcctttggaaggaaaycactaaaaggtaaaagggaggcatttgcccttgctgtcctatgtcaatgttgggttggggcctccccaggacctgtcctttcttggggaggcctcaccccttctgggtcctttctgcctccctttcattctgcactcctccacctaagggcataccacaggggggtggggggcaggtttgttgagggagtcctttggcacagggagtaggaggagagcttgggcaccagagttaagcaaaattggtttagattactgaccttacagccctttaaacctgaaccagtttctttgtttctctttgcttgtttccttatcttacaaagggacccatagcccttatcttaaaggacttgccaagaatcagaggtgatgtctataaaattgcaaacacccagtaggatcttcataaatatttgttgacagaaggaagggtgtagctctgaggtgacccacgaaccacttttgatgggtggggcagtggaccttcgttgtctgaggcctctcccaagtcacccctttcsccctccttctggctctgggcccggggcctgggctgtactggaggtgagcacctaggggttaagaagccactaatggtaaaggaaaattagcaccatcttgcagaccacacagtgcagccctccccaatctccttggtgggaccctttttgggccagtgactcaagcctctgcgaatacagggtggagagccaaagaggccaaacgtggtgcgtctcctgcctcaaaatgaagactcctacaygtcacacatgggcacggaccagagctgctgagatgataggccgggcgcataacaggcaccccgcacatcgcaccgcggacgcagcgatcctcccatttgtaccctaaggcctgagaaggccgctcsacacctccgcgtgcacagtccctrgaccagtgagggcggggacggggaaatccttttgttttatattggaaaccttacgccaaaggcaggcaggaagcaaccaaakgaacaacaggccgcctgagccgtggctcaaacagcacagggcagtggccgagcaccaggcttttcggtggagctgggatmccagcaggcagaagaggtggacaactctgaccgcagactccctacaaccccgcgatcgatgctccacctgcacgctcaaacgcacctgtttcccaaattaatccagacgcgaatttaacgaccgattttgatagatccgggaaattctgtccaccagcgtcacccaacacagcaacttttacagacaatgcgtggcgtccgttcctgctcacccaaagcggcctctctgggctgacagccacccctgcgggtcctcaaaccccactcgaaaccctccgaacccctgtgtctgggagcagtagggtgggatgactgcaggatcccttgaagaagtgactcgctgcaaccccaccaccagcagcaaaaacgctttcacccgggagctgcatggatgcgcggatggctgggggctgaggggacgcgtgaagyccaggcctcttgcttgggctgggcgattcccgccgtgggacgggtgggattgaccttagtggagtccagtccttcggagaatccgcgggcagtcgggacccacgctccggaaacacccaagtccgaactcgtacacacagcacaatggcgtgcagccgccggggccctaactcccagagacgcgtctgaagaagccatacaagggggcgcagcttcggggctctggctgggaggttactgcagggacagacgcctcgcctccagcagccgggtccaggctcagggccggccggcctctgctcgctttctgcttggattaccaacagccactgggcttggggagatcggccgggccgcaggcctagccctgctgagcaggcgtttagtaaggaccacaggactttagtctcaatatctgagtctgttaatagacctgacaaccgaggaccagcccccaaggcagacgtggaaaggtgtaaatggttcatgcaaggaattgcactttgagatttttgtatttgttttattttttggttttagcatttgtagagggtttcttttttgtttgtttgttttcttggagttgctttacgttattttttccttttacttgttttcggcaggaggcccacattcccatagcgtgcctattcctatgccgggccctctcatttgggtcttcytttgtttcccccccttccataacccttacccccacaaacacacactgaagcagaccagcaacccgaaaaatcatcttgtaggtgtgtcttgtgtgcccagttttcattttcagggaacggttcaggaagattagacagctccttccctcctcaggcgatttctgttccccgcctggtctggtagacccaggaacccatggaactgccaccgcatccccttgccccacayacctgcatcttcagggatggtcccccaggtagcttctggggagtccgaggggcaaggaggccaaatcctttggaagcccggacaaggagtgggtacctggggctacaggaaagggaggagatggcagtggcatgcrcccrcagtcagtcaaagccaccgggctcaagtcttcctcttttgcgcagcaccggtaaggagagarggtgtctatgcatcacgttggcctgggtgccatttccccaattaccccttggctgcaggctcccttcttgttggctacatttctttgatttctattttaatggtgggaggtggagcatatgaattttgcctatttgctccttgcttaatataaaatcacaaataatgctagacctgactacccttggagagccagtagccggttacctggctgtgcatctgcagattctgtaccccagttcaagatactctgatagaagacaccaacgctgcatgggcctgcccaccaatccctgcggcgagacaggtctaggaggctagttcattcctcatacccccaacccagctcatccgggaaggcagttgggggtttcagtgtcctgggttctcccactgttggtggatgctgactggggacattcagcactgcagaaagaggtagcagccccaggcttggatgtggcctacagagccagggtgaatgcacccggaaagtcagggtgagtgccagactgaaggagtgtgctataaggccctggcggaggcttgggcttgtaaaggctcagggccctccttgaaccatctcccccgtggccttaacatcttttattctttctttttttttcttttcttttccttttttttttttttttttttttttttttttagatagagtggttgctctgttgcccagactagagtgcaagggtgcaatcatagttcactgtaaccttgaacctctgggctcaagcgatcctccctcatcgacctcccaaagtgctggattacaggactgagctaccgcgcgtttcttgttctttaacttattctacaaacattaatgcgtactcactgtgtgccagactgatcctggctcaagctgctggcacgcagcttcccataaatgtaagctgtttctgcccagctcccacagtcaggccagaaacagctgggtagagacttccccgctgaagtcgagggggcgggctccccgagcctgcttcccttgaagccaggcaaagaccacgtaggaggtggtcactgtgcccaccaaatccaggcgatcttcccggatgcttttagtgcactgtaggcactcaataaatacttctcgaataacttaaatgggacaaaattcatcaacatggcataattctgtaggtattaattaggcggccaacgccttctcccggaagaacgtgtgttctaatattatcttattttttgacgttgcaatgtccttcttatatgaaacagtgatcatggcagaacatagaataattgttaaagcatgaagttgacaaccccatagtttcgaaattttgtttctgcaatccgcagctttgggaagcactgaattacaaaacctgaaaaccctcatatatgtggcggcttagaggccggcctaggctggagcggaggtcttgggaagcgctgggccgctcgtaaagtcaatggtgagtctcccggctttcggctttcggctttcggcggcagccgggtgtgaggttccacgggcaaagccagccagagggttgacagaaataactggataaatctgtgcccctgcccctgccggctcacacggctgcagcccacggctggagccaaaaataaccgcgcagttgacgccacggtttctttagcgtcttgctggagacattgactttcagagcccctgtcccgccttccattccccactacttggcagcccaccgcgtccacccgcggagctgcggaagccagggccgggcaaaggacactctacgaggcacagcctccggcagggccacacttacaatgtagacaggaaaatagaggatttaaattcaaaaagtaatacgagctcgatttttttaaaaaccggaagcaaagaaggatcccaggaacagccactgttttcaattctgggcgagtccttccaggcgatttttccacgctcttatagacgaacaaataaataaaagcagaactatatttcataggctgttttgcaatttaccatttcaaaaaaatttaatctgcagtgatcatcttctctgctgaaccagttcttgctgtcccttgactgtagaattaagtattcctttagttggggaaagcctaattcccctaaagactggagggaccttggggttgtttttccttaatataaacactgtgaagtaagctccgaaggcagggttcttctagacctttgactgtttctgtgggataagtttctagcagtgtaattactgcttcgaaagatttacacacacaatttaaatatatttcatttactgtaataggtaattgtaaaatagataattaattcatcaaaacatctttttttcagacatcaggagatgggaggtctcactattttgggtttaagctggactcaagtgctcacatagctgggattacaggtgggagccactgcactttttaaaaagtatccggtgaaaaacctctcccatccctgtccccatcacccacttcccacctggttcaaggactttctaatatgtccttccagataatgtttatgcctatggaaatcagtgcagttatataacttttttcttccaatatatcttggggtgtaaataactttttgtttgttttttttatagatgcataatattccatttaagtggactaggtggatcataatgtatatcatataaccagtaccctatttgtggacatttggttattttcttatctgttgctattatatgtaatcctgaaataaataaacttgtttcttagtcatttccacatgtgtgagtatatctgtcagagaagttcctaaaagtgaattactgggtcaaatggtatctgtgtttgaaatttgcaagataatgcccaattgtttgtcctccataagatggaagcagtttacactgccaccagcgatgtctgaaagtggttgtttctccaaaatttgccagcacagttcacattttacatcctgatgaacatagtcaagttattctgcaggagaagtttagttacttatgtccacccctttgccctgtccccacactggacattttgtatcatttcatctttgtcgatcttcatattcattagccagttgtatttcttctatctattgattcatttcctttgaccagtttaatttgcaaatataccttttccttattgatctgtagaaactctatgtattgctttcaatatgtgttgcaacattttaatttacaatttatcctttgattttgtttaggatggtcttttgttttcagaagtataaaatgtctttttatttttattatgtcattatatttattttttagagacaagggctcactctgtcacccaggctggagtgcagtggcccaacaatagcacactataaccttgaactcctggcctcaagcagtccccccacctcagcctctggagtaactgagactataggcactccccacaatgctggcctagctttaattttttatttattttctttaattttttatttttaattttttttagtagggacagggtttcaccatattgaggaggccagtctcaaactcttggcctcaagcaatcctcccacctgcgcctctcataaaatatctttttaattacaaaagcaatccatactattttgctatgtcatgtaaaatttaaaagtttctaatttcccttacatgatacacttccactcctaagatttaccttccaaactttacctagtaattgaaaaatataaatatgtaagttatatattacaaaaattggatttttttgcaatgacttttttcttaattaaacaaattgtcttagcttgcaagtagagtaaaagaatatttgtggaaatctttctttctagaactccctcattctttttaaccactgtataggattccgttatgtagatatcatataacttatttaactagtcctctattaatggatatttaggttggttgtactttttcattattacaaacaatgctgtagtgaacatctttgtatcctaatttgaacaaatggtttgttttatttttaattattcttatctttttatcccaggcaacacctacctcatttataccatagaatgagtgctcccttgaacaaatggttttttttaaatcttatttatgagacaatttggaacatgtaaaaccaggtgggatattttattatattaaggaataattgtcratttttattgtgataatagtattataggtgacttttttaagagtcccccctttttaagagatacatgttgaaatactcataagtgaaatgttatgacttctagaatttgctaataattacagcagaatagaagaaagaagattattcctgagtttctaatagttgaaattgggggataggtatatcggagctcattgtactgctctccctaattttgtaaatatttgaaatttgtcataataaactgtttaaagtaacaagaatcattttacatatacatggtatgaatataattacaggataaattcctagaagcaaacttttaaaatccaaggatatacatttaaagttatgatagtatttccaaattttataccaaaactcttatattgatttatactcttagccatcttgtataaaagtgtcatttctctacgtcctcccaactcagratatacttaattttttagagtgaaatcttttcaagtgacagaataatctcattttattagtagtttaaattgctagtgaggttaagcatgtttttatgtagttattcttcattttaatattctcttctgtgaatttttcatatatttagccatttctctatcggatcactaattgttttctcatcttcgtaagtgccacttatatagtaaggaaatgagccctttttctgtgacatgtattgcaaacaactcccaggtcactttcttaaaaaamaaaacaaaacaaaamaaaaaacccacaaaaaaacagcaacaaaaaactttctttgtgggattttttttttttctaaactgaaatttaaactctaaccacatttaatggttgttcctttttgggcttctagattctagctcctagttagaaaaatcttcatccagcatttaaaacattatatatgcatacacaaacatattaaaatgtttgctaccaaaaaaattttattccctagtcttttcaccaaaagaaataataaagaaagacaaaaaatgagttgaatctttcctccctgatcggtttccactcctcagaggcaagagaagagtgaggtgcttcttttgccagacttgttcctatgtggttacaaaaacacaaacacacacacagaaagagtttacttttactgtttttttaatataaaaatgggtttatgcacacttgccatttcacttagtagtatacaataaacatccatccaggttatgtgtctcattcttgttaatgtttacatatagccaaagttattactagactgtgattttatcgacaattttcctattgataaacattcagcttttcccccttttctccctcttgcaaactatgctacaaacagtgggtctgtatttatcaactaygccaacgtttctgtgtgatagaaagctctataaaaatgctgggacaaaggaacagtgcattttaagtttagctaggcattattcctcttcaaaaaccatatattatatcaatttatgttcttaytgagagagcttgagagaacctaattctactcagccttgccagtacaattttccaaatctgatagataaaatatggcatctcaaaaaacaaggatatctcattgctgttataactttcatttttctgattcctctagcccgagtattttttcatatttattaaccacatgcatttcttcttctctgaataatttgttcggtttcccactggactgcttgactttactcactggtttacagaggctgtgtgtataccagacattaggactctgttaagaattcattatgaatattttctccccatctgtctcttaccctgcagatgcgtttatttttaggtactcaaatatgtcatttattttcctttctagaaagttattttatatttgttcttcaatttttagagcttttatttacatttaaatttgtgtttatttttgcacacagtgtgagataaatagctttattccaaataatgaactaattgttcaaaagctatgtctctaataaccctgtctttcctccaactaattcaaaatactgtcttcccaacataccagatccacatagacacatgaatttgcttcataactcttgtgcagcattataccattttagttgctgtagatttgtaacatatttgctgtgtggtaatgcaagtattcactactattgtttaactttttttgttgactatccttgcattttcaatgttcccaataaacttgagaatgaattttccataaggaatttttatagcaatcacattatatttgtaggtgggggcaggaagggccttgcacacttaaaagtcagcatattatcggccaggcatggtggctcatgcctgtaatcccagcactttgggaggccagagggggcagatcacttgaggtcaggagcttgaaaccagcctgggcaacatggcgaaaccccgtccctactaaaaatacaaaaattagccaggcgcggtggtgggcgcctgtaatcccatctactcaggaggctgagggaggagaatcgcttgaacccgggaggcggaggttgcagtgagctgagatcacgccgttgcactccagcctgggtgacagagtgagactccgtttcaaaaaaaagtcagcacattatcagcttatcgtgcaaagagactacctagtgctaggtaggaaaagaagtgagatagggctttggaggtgggggggatgtctattgggagaggtgccagaggggcaccagaggtcagaagcataagctaactactatcaggccgggggtcaccacctctcccaagcaaaggctcttgggcagaattcaccctcccacataccctcagagctcactgctctttgaggagacttgaggggtagcaaaatgcaggactcatttcatttcaccctaataagtgcctacctgcaaggaagccctggaatgaaagctgttcctctttccagatgctcctcccaaactcctcctagaaaaggagcaactcaaaaaaagaggactattttagtaagataggctatattttgctgcagagacaaccgcaaattttagaggcttaacaaaacacaaatgcatttatcactcacagaagtccatcacaagtggacaggggctcatcctgatactcagaaacccaggctggtaaagcttcttcactcctgcttccaagaccatcacagtagaaagggtgtggcaacacacacacactctctggttattgggttttgttatttagggcagggatggtaatatccccttatcttattttattgccttcccaacactcgtctttgccttacatatttttaaaatttattttttattagaaataaattgcttgaaggccgggtgcagtggcttacgcctgtaatcccagcactttgggaggctgaggcggggggatcacttgagccttttgagaccagtctggccaacatggtgaaaccctgcctctactaaaaatacaaaaattagcgggcatggtggtgggtgcctgtaatctcaactactcaggaggcggatgcaggagaatcgttcgaacccaggaggcagaggttgccgtgagccaagatcacrccactgcactctagcctgggtgacagagcgagactccgactcaaaataaataaataaataaataaataaataactttacatttattatctgtctccctccccagtacaaggtttacaggaacaaatgcttttctcttttgctcatttctgtatccccaggccctagaataatatttgacamataagggcttattaaatacatgttgaatggttgaatatattcagttgttttartctacataaatgagattaaactacatgttattctgtaacttactttcatacactaatgtctgttcacatagcttattgcctcattcttttcaattattacatggtattttataatacaaatgtaccactatttgttcagccatttctcttgtggaaaatactgaggatgctttcaaatttttggtgttttgagcagtgcagcaacacacaccattgttgtatatactttggagcacctgagcctgtgtttctctaggacaaataccaacgaaaataaaatcaggccaggtgcggtggctcatatctgtaatcccagcattttgggaggccaaggtgggtggatcacttgaggtcaagagtttgagaccagcctggccaacatggtgaaaccctgtctctactaaaaaattacaaaaattagggggcgtggtgatgggcacctgtaatcccagctacttgggaggctgaggcaggagaatcacttgaacccgggaggcggaggctgcagtgagcattgatattgcaccactgcactccagcctgrgcaacagagtgagactctatctcaaaaaataaaataaaataattggagcaaaagttatgtgcatctttaatcttgataaatgcagccttaaaagatggactcaattatggttctattaatagcgtataggagtgtagatttccctacagtgcaccattgttattaattgtcatcattgtttttaatcacttgttaatgtcctttcaaccttatgggatataaagggctttccattgttgctggaacttgtattatattgattactataaagctatgcttatcctttcatatgtttattggccatttagctgtctttttttgtgaatgacccagataaattacttgaccatttattttatcaggctatttacttaaatttttttttttttttttgagacagagtctcacggtattgccaggctggagtgcaacggtgcgatcttggctcactgcaacctctccctcccaggttcaagtgattctcatgcctcggcccctgagtagctgggattagaggcgcacgccaccacacccagctaatttttttatttttagtaaagaagaggtttcaccatgttgcccaggctggtctccaatgcctggcctcaagtgatctgcccacctcggcctcccaaagtgctgggattacaggcatgagttaccacaaccagcctctttgactcttaaatgtattttttttttcaaatctgtttcttgtactttaccttgattttggtgcttttgtcatccaagtttttagctttaatatagtcaaatacatcctttgtgtttcctttacagcctccagtttttttgctgtttgttttttgttttttttgagaccgagtcttgctctgtctcccaggctggagagcaatggcacaatctcagctcactgcaacttccccttccctgcctcagcctcccaagtagctggattacaggtgcctgccaccgcatccagctaatttttgtattttttagtagagacggagtttcgccacgttggccaggctggtctcgaactcctgacctcaggtgatccacctgcctcagcctcccaaagtgctgggattacaggcgtgagccaccacgcctagcctacagcctccagttttgcagcttgcttagaaatttcatcccaagcctagcattctaaaaacatcctcctatatttttttgtaatgcccttataattttatcatctatgatttggtctttaatccagttgaaatgtgttgttatttatggagcgagataggaatttaacttaattttattccaaacatacaatttatggtcaccaatctgcttaacgtgacttattgactaaatcactcttttcccatcttgaatgcccttttatgataaactctatgactatggatacatgtgtctaatatccccttatcttgtacttcccatgctattgtttccccacatgcagtcatttgagtcccatcttcatttgttatattaatattccatttattttcttaatattttagcataatgcattttaagattaaatttccactttagcctcaccctaagcctataaaattataggtttaaatttttttctagtaaacattaaaataaatgcctaactttttaaatgacatgcttatttatgtacaattttaaatcatcttacaaaccataagtggaatacagagacactatcgtgttttttctactaatggatttgtcaatttctgtgacaacacatcactctagctttgtggcatgcttttgttgtcaactttttattttgaaataattatagactcgcaaggagttataaaaatagtacagagaagtcccatgtatccatcacctagcttctctgtagatggcattttacaaacctatagtaccttatcaaaaccagaaaattgacattaatacaatataattaactagactacagaccttcctcagatttcacctgtttttccttgcactgtttttttgttttttgtatatagttctatgacattttattacatatatagatccatgtcaccaccaccacagccatgatacagtactgtggtgtcaccacaaaggaacttcctcttactactcattgatggccaggtccttcctccatccccaaatcctggcaaccactgatctggtctccamctytataattttsttacctttatattaaataaatggaatcatatagtgtataacttttgggaactgttttttcccctcagtataatttcctgtgtaaattgttgtgtgtttcaatcgttcttcctttttttcctgagtagtatcccagagtacagttacaccacagtttgtttaaccattcacccattgaaggacatctgatttatttccattagggggctattacaaataaagctgctatgatcatttgtatacaggtttttgtgtgaacataggatttcagctgggctgaaatgggattacagctcacgcctgtaatcccaacactttgggaggcccaggcaggtggatcacctgaggtcaggagttcgagaccagcctggccaacatggtaaaaccccatctctactaaaaatacaataattagctggttgtggtggcaggcgcctgtaatcccagctacttaggaggctgaggcaggaaaatcgcttgaaaccagaagacggaggttgcagtgagccgagatcgcgccactgcactccagcctgggcaacaagagtgaaactctgtctcaaaaaaaaaaaaaaaaaaaaatcagccgcgcatggtggcaggtgcctgtaaccccagctactcaggaggctgagacatgagaatcgtttgaacctgggaggtggaggttgcagtgagctaagattgcaccactgcactccagcctgggggatagagcgagactctatctccaaataaataaataaataaataaataaamcaaaaacaaatatttcatttccctagaataaatgcccatttattctgggcatttattctgggttgtagggtaagtatatttttaactctttaagaaactgcctggctagtagtaccattttccattccyaccagcaatgtaagagagatccagcttccctgcatcctcaccagcttttccactctcagtattttttctttttgctgttctgataggtgtttcttattgcagctttaatttgcctttccctgatggccagcaatgttgaacatttttcatgtgcttatttgtatggcatgttttaatatttggtggcaagtctgaggttgcctttctcgtctgggtcatgcctccatgaccctgagggagacagctgcacttggctgctccctgaggtggcaatccccctttaggtcttgtataaagagggaaggatggtttgatctcatgtttagggactcaggctcagatgctacagggtgggcttgaggaggcttattaaggggagggtaagacaccagctgtaacagcacccttcctcctattcataccccacaaaacatgtttgataaaatcagtgcctttgagatggattcacttgggagttttgccacaaagttctgagtctgctctcacaattggaaattatggaacctgagcaaaggagactgatccagtcacagtggggtcacacatattatcctatctttttgaaatgtgaacagaattggagytggggagcttgagttgtcctaagaggcctgtagtytctagaacacatccttttgataggctcygcccagcagcttrgcaggacctggcctgggatggggagggaggccacctctgagcagtgacacatcctccaccctggctcaccttttccctgaggctgactatgaacaggacggtgcttgagaacctgtgagatctgagccaggactcttgagccaggagccagagcataccctggaaggggagtgtcaatttgcactggcaggacccagaaagagtcagtctcctggggtgggacgcttggagggaggggctcagggtaaccctctagagcagggattctcaaggtaggtcccaccgtccctgtggatcacaaggagcctcctgccagacagcacatcccgaatacagctctttccattatgttctcyaggggaatgatgaacccatccagaagattccatcttttactcatgaccaggtcctcttcatttcaacctattaattgaattattaagaattatcaaccgagggctgggcacagtggctcacgcctgtaatcccagcactttgggtgtccgaggtgggcagatcacgaggtcaggagattgagactatcctggctaacatggtgaaaccccgtctttactaaaaatacaaaaaattagccaggtgtggtggtgggcgcctgtagtcccagcttcttgggaggctgaggcaggagaatggtgtgaaccctggaggcagagctgaaattgcgccacagcactccagccgtctcaaaaaaaaaaaaaaaaaaagaattaccaactgagggtagacataaagtaaaatgatggaggcgggcgcagtggttcatgcctgtaatcccagcactttgggaggtcgaggtgagcagatcatgaagtcaggagttcaaggtcagcctggccaacatagtgaaaccctgtctctaccaaaaatacaaaaattagccaggcatggtggcgcacgcctgtagtcccagttactcgggaggctgaggcaggagaatcacttgaacctgggaggctgaggcaggagaatcacttgaacctgggaggcggaggttgtggtgagccgagatggtgccactgcacttcagcctaagcaacagagtgtgtctccacaaaaaaaaaaaaaaaagaataaaaaaaaaagacggtgtttcaagagtttcttggacactgccagtaggaccttgaataaattacttaaattttgttactccatttcctcatctgtaaaatggggatcatatagttccaaattcatggagacattgagaaggttaaagtgcttaaaacagcagggtgtggtggctcacacctataatcccagcactttgggaggctgagacaagaggatcacttgagcccaggagttcaaaaccagcctaagtgagaccccatctcattttttaaaaacaaagaaaaaaataattaaaaaataaaataagtccaggcacaatggctcacacctgtaatcccagcactttgggaggctgaggcgggcagatcacttgaacccagaagttacagactagcctgggcaacacggtgaaatcccctatgccccccgtctctacaaaaaatacaaaaattagcagggcgtggtggtgtgctcctgtagtcccagcaacttgggaggctgaagtcggaggattgattgaaccctagaggtcgagactgcagtaagctgagatgcgcctctgcattacagcctgggcgtgagagtgagaccctgtctcaaaaaataaataaacaaaacaaaattaaatttaattaagtgcttagaacagtgactggcccagagcaagtactgcagacgtttgtcagcctttgttacggctggaatgtcaacagccactgcccattctggccgcgttgcaaactccgactgcgtgcgccccctggagggtattggaattcctgcacctgtggagggttgcttgctttcttgggcttcctcaaggcggccttgtgttggtaagcttcccattgccaatgctaagtaatggaaattcctgttagtttagcttcgttatcatggacatcatttgtagggagtgattttgtaaatcctacaggatgtgatgctgcatatttccacaatctaatttgtaatataaaatgttctaataactagatttcaagccatcagtatatgtgggtcacacatggatcatctccacccctgtagttaaatgttactaagttctttatcaggaatgtgtggggaacgtgggctccaaatcactcttcagtgggctccaaaatattggaggccctctgtgcggagggcattggtcagagcccaggagtggccctgctgttcaggactaggcacatggggagtggcagcagcccccctctggaaggcatccagcagcctgatatggtagcagttgtccttgggctcctcctagggacctcagctccccagactgtcctctaccgctcatcagctagcctcctcctcatggaccccaggtcccaggtctgtggatgcatgacactccttcatgcatgcatgcatgcacagacacacacacacacacacacacacgcacagcttaggacctggctctgacctctccagtaagccttacctgattgatcacattcaattctaacccatcatcccctatgtacttgaggacccagcatatttttcccatctgttccttactctgcaaaggcccagaatcctggctgggacagagtgagtcctttcttcccagaccacattggtagacctggcagttgtactgaggcctattcacatacatttagccacccattagatataataycctgcattgggtggttaaggaatctgggcccagagagggtgagcaacttgtcacaggtcatgcaaccagatccaggcctgaggagctctgcgatagatcacaccaccttttattaagatgctttctggtgatctaactccctagctaatgaactaagctggctcctttcatggcctctgcagatgccaaagggacaattcgggaaattgtcctgcctaagggcctggacctggaccggcccaagcggacacgtacatccttcactgccgagcagctgtaccgcctggagatggagttccagcgctgccagtatgtggtgggccgcgagcgcactgagctggcccgccagctgaacctctccgagacccaggtaagagaccagggccaggccactccactcttgtcctggcagcctgggaactcctggggatatgaggccctgtgagctgctacagggagacccaactttggaggagttcagacaagcatgagggaaagactttaagctacaggtaaaccagagtgaaagagcaaataaatatagcgcygaccacagacagtcaggaaatgccaatgggggccttctggatagatcaggcacttttggatggaatatggaaaaggttcagagaaactggggragagcagccctcagggcacagggagtggcttgggggggtgttggcatgtaagaggagtgacaagaagggatggtgagggcttggctggttggaaataacgattctggggaagatgaaacattataaaattgggctggggacctctcgcttctccatttctggccctttcccaccctccatcaccttcccttcatctcagggtgcctcagtctcttgttggaaaggaggggtctgcacacccccttcacctgggtaggactggcattttaacagcagtgtgcttaactcaaaagaaaaaaacttttgtaaattaagcacctaccctgtatgaatggagacccttcaagctggtactagagctataaaatactaccactactactactactactaatacttagtacttacatgtgtcaggcactaagtgctttgcctatgttaagtaactaatccctcccaagaagcagatgatgtcattcccatgttacacgtgaaaggaagttatgcccaaggtcagacaactaattagttccggagctgggctttggacaagcagtctctcatctttatgctgcctataaactgggcaaccttccttgagattgtmaaagaataactcagagacccttctttcagccagagctctagtagtttgctctcatatatgagggagatcaatcaatacatgcattgtaaacgacggccaaaacaggattgataaagtggagaggaagggaggaggggaatgcggaagcactggtctggagcagtgtgctggtttccttccttggagcgaggcrggaggctgtgctggagtgagggcttcccgtctgtgctgtgtggctgctgtcctcccctgtgtccctgcctcagtgaggtcagctctccctgtttccctcagcataattcctccagcccctcaaatccccccaacagagtgctgtgcagcccacccctggggagggggtagtcagatgcgcctggaagtcctcctggtccccttgagaggttagcaggttcctcctggggtacactgagagtagggcagaggaagaggtgagaaggggtgagaggcagaggaggggcaggccgggaggaggggcaggccgggaggaggggaaggccggggaaggacagcagctgctgtcctgcagggccgggtcatctccacctgcacttgtttttccccagctgccactgcagagctcccaaacaaccctgcggggcctccctccagctgggctcaacagggggctgggaagccaggcttgtgctcagagaggaggctgcagtggcagggccaggccagaactcctggggaagtcactgaggcccgtattccctacactgagctgcccttggaggtcaagcccaagcccccctcttccaggaagccttctgcaggcaccttgccctcttcccaagagacccttccacatggcgtgacctggagagacagatagtgtgtgtgtgtgtgtkcacgtgtgtgcatgtgtacatgtgtgtggtgttggatgtccaccagtatttgcttccctaggacaagaatgtatttataggccatggctcctcgtcgtgcttcacaaggagcccagaacacagctggacacatagtaggccctcagcaagtcctccgcactgttctcactacaaccctccttcctctgtccccagtcctagggttgacagatagtaaaagtaatggacagctgatgcttattgagcgcttcccatgcaccaggtcctgttccaagggtgtgacatagtctaactagtttagtcctcaccacaaccttatgggatacgtgtgagatttttcttccaacaccaggtgtatggtatgttccaaccaccagcaggcagtgctccaattctccagcatcactgagtatattcaacagttcaatactgacactaattcccagagctagcacagaccctacaagttaagggctctgtcccacaagacagtgccacagcagactcaagttccaggagccacctgtgcttctgaatggactggcctaaaaccgggggctcccacatcgccctctgcaggtttgacaattcactagaatgacgcacacaactcaggaaacacctcccctacacttgctggtttattataaatgacacgagtgaggaagagccagatggaagagacacaaagggcaaggtaagggggaggtgcgtggagctcccatgccgtttccagtgcccccattcccagcacttccacgtgttcgccaaccagaagttctcctggtctccttgttcaagactaaatccaggcyggcctggcacagtggctcacgcctgcaatcccagcactttgggaggccaaggagggaggatcgctcaggagtccaggagttcaagaccagccttggcagcagagggagaccttatctctaaaaaaagttttttaaaacattttttacagtttacactgtaaactgcagggtgtggtggcacacacctgtagtcccagctacttgggaggctgaggtgggaggattgtttgagcccaggaggtcaaggctacagtgagccatgttagcttcactgcactccagcctggatgacagagcaagactctatctcaaaaacaaacaaaaaaagactataatccaatctccattcccctcccctccctagaaggaaagaatgggggcggctgaaagtttctaccctctaatcacaagtatggtctttctagaaccagccccagtcctgaaactacctagagatccaccctgaatcacctcattagcatacaacagtaagtcttatttatttatttatttatttatgtttactgtagagacggggtctcgctttgtttcctaggctggcctggaactcctggtctcaagtaatcctccctcctcggccttccaaagtgctgggattataggtgtgagccaccatgcccagccaataagagtatattgtttccactttaaatagaaggaaactgaggcatagaaaagttaaatagataacttgctcaagacttgcagcgggtgcattcatgggtaatagtacccatgaagatggctttatgggtactattatccccatttaagcaaactgagcctcagagaggttaactaacttgtagctagaattctgtggcattctcagtatgttcacccataattttgttcaaaaatattattgaatacctactatatagcaggtactcttctaggcacttgggctttggcttagaacaaaacagaccaggcatctgccctcgtgcagctaagatccacagagacaaagacaaaccgcatttccaggagtgatgagtgttgtgagggagctcaaatggggtcataggagagagactaaaaggaagtgttttactggggtgttcagggaaggcctctttgagaagatgacgttgagcttaggcctgagtggcaagggagaaacagccagatgaggagccagaaggagacgtcaaggcagacggtaactatgaagacgtgaggggcaggaattggcatagaatgttctagaagtatcagaaggccagagtggctggagctacagggtaattgggtaagtaggtaggggaggatcatgcgatgcttagagactatggtaatacattgaagagaaagtgacaggagatgattggcattttacagaggttctctggctgccacttggggaagggacccacaggggaaaggagtggacaggtgtggacaggtaggaactactgacatgggtcctgaacagagcagtggtggaggagagaagcgtactaatgtgagaggcactctaatttagtgctggaacmtattaggacttgctcatggattatacgcccagggcaagggaaaggaagtggtttgggtagaacaactgggagaatggtgacaccatataatgagttgagaaactgggggagaagcaagatggtgggagcataatcaagaattttgttttggatcagttaagtttgagatcccagcggagatgtcaagaaagcatgtcagattttggggggagggctggtttttctctggtttaagttatctgagagtctctgtcagagctcttttgggggaaaagataagaaattccttcaagtgccctcagataatggatggactccccagggattaaaaacagaagccatagccttgttgaaattcaataacaggaaccatggtgtagccaggaattggaagagactggaagccaaaggctcttttgggcccgagggattcagcaccagctactcacagaacttcctcccagtgctctgctgagtatgtgctccaactgctctccaaaatatctgcttctctctctgtttcttcctctcctctcctctctttttatctcttctcctctcttttttctcttctcttccttctgccaaatagcatctctaccttcttccctggatactcagaggacccaggcatggtcccaattcaggcagagraaacacagagcttgctcagggcccatttccatggctagtctcttctttaatctagcatgcccaattcagctgagttgtctgcagatttaaatctgaaacccacttacaggattgggcaggcagaatggcgaagccctttccttggctctccaccactcacagggctctacaggacaaagggtccaccagagtaggaacagtgaacaagacacagtgcagctgacctctgtcccggccttgcccagactccatggctgtgcaacagaggctaagcatggctgccctggagagcaggggcagcctcagaggaatctctctctcaagactatcaaaagaaccctctgcccacctttgtcagcccaagggtagcatacactgaaagttcttctcatgtcagagaacatggacagccccacttagtccagttctccttggttttagaaaccttctgatacaccttgtcaccatgctttgtttgaaaaagaaagtttggtgtttgattaaagcagcatttctcaaggtatgctctggagaccagctgtacgtacagctcccctggggtaaaatacagatgcctgtgccaccctcagcccagaggttcccagtcagatttctagggaagaccccacaacctatatattttttgttccaggtgatttaatgcacagtgatgtctgagaatcactggcttatggaaaagtgagcaaatctgaccagatgatgtgatcaccatgttgcttaaaagacttcatcaactgccagcactttaataagtctgtgattattagcccaccgagtcatcacaacaaaactatgaggaagagttaagaaccccattttactggtggggaaactgaggctccaagaagttaagtaacttgacttaagtcatctagctagttaagggaaccagaattgaatcagtggctgtctgacctctgattctccacgatagtttgctactatatattgtctcctccactatattgtttgctacttcaaccaaaacacttaccgtgttgtaacacttactgcttgcccatgacccaccctgctagtgtctgacagccaagagggtcaaaatggagttttatttatttttgttttttcagcacctggcaatgcctggcttgcatcaaatgcttgatatttctgtgttgcctgaatgaatgaccagagtaccagggtccaagtaggacataagaggatgtggctgcagaggaaaggaagatgagaagctggctcaggactcccctcctgcagctgggctggaggacgttctcagggccaggagcccaggagccaggtggagaacaaactgccaagtcccaatatccccccgggatgcccacctagcttgggtaagagctgctccagcccttcagcattgtcctcagcctcatgcttgatgcctctgcctcagatggcttcttccagaacagcacgatagatggtaccttcctagtgcagattacaaaaaccaagccatcctagatacacagataccactcacctcagattaagtatgggcccatggtcacagaaaacagtcttcaaaagatgaatgccatttccagatcaacaatgaatcctggaatttgatattgaccatgagcccaaagaagctggtggataatctcctggaaaattcctctgtagtcctggcagccaagtggaaactgtgcccatctcctggtgcgcggccatggatcacagtgtggcccagaaagaaatcagggagggggcagtgccatgggtcacagtgtggcccagcaagagatygcggaggggggcggggcagccaccaagcactcactgagtcccagggagtcaagatggcagcctccaggaggccacacaggaccctgagaaaacagaggagggagacagcccagaaggtgcactgggcaggtgaggggagaggcacagctgcggaggtgtgctggccccgccaccctgtgaagtcggctaggaatggtttcccagaagtggataaggaccgatcactttggatttaaccttgagaagaggatgaacctgagatggaaatgaaggtttcctggggcaggagggacacattcagagggctctgagcctgtctgttcttcagaaagacagagagacaacatttgcaggsccctgtgaacctacccgctagggcctgaagggcctgataggcttggtgggcctgatgggcttgatggtgggaagtagagagttgacccttcttactctcacccttgaagtttgcaatgctgggaagcacattagattcacccacagagctttagaagaatacccaggcctcagccccattccctagagattctgatttaatatgggtgaggcatgaggcccggacatcatcccagaaaattccagtgtgcggccaaggttgagaattcctgacctagcccrtatgtggccaagaaacaagcacccctggtcccagcccctgctccatctgcctctgacttctcctctcctagggtccaggctcaccttctcaggagacgcccaaacccagcaccagcccacacccgcctctccttgctacacccagagctgcaggaagatgggatatgtgggagagcaccttgtaaatgcctggtcattcctcatctgtcacaccccattactgccactccctgagtacgaattgccctctgttttttgggaatgagttagtgccactccyccactagaccctcagcttcccaaggactggagtcatgacatctgtgtctcctctccctctagttcagaaacagagctagaaacagagaaagccagcgataaataactattcacatttcctgtgggccaggcgtgatgccaagctccctaaatgggttttcttctttcatctctgcaatagccaagtattattgtccccattttaaagataagacactgaggctcaggggttcctggaggtggcctggcctcaggtcctaggacggggaggtgctggcttggctaagaggtcaggaagcttcccagcagggagggggaatgcagcagtgtgcagcgctatggtccttgaggatctggtgagactccttccctcagcagtcagattccagaggtgacaaatgggaaagggttttcttctttccagtcattgccttcagctagacttggctgaatcttccttgaccatcccttactgatatcttcttcaaatgtcccctcttcagggaggctgtatgtgccattccattaacaaaacagtcacccccctccttcctttctgctatcctgccacctttctctaaagcagtgccccccagagtatggcccttgggccactgccagcccataaactgttacctgtctatgacatggtaagtatagaaataaagaataggtatttagaaaaggcctggagcggtggctcatgcctgtaatcccagcactttaggaggccgaggtgggcagatcacgaggtcaggagttcgagaccagcmtggccaacatggtgaaaccctgtctctagcaaaaatacaaaaattagttgggtgtgatggcacacgcctataatcccagctactcaggaggctgaggcaggagactcacttgaaccccggaggtggaagttgcagtgagccgagatcatgccactgcactccagcctgggctacagagtgagactccatctcaaaaaaaaaaaacaatgtatatagcaatctttccagtaattcattttaattgtattttttaaagtattggtcctcaacaaaattggacactttataaagtggtcctcacctcaaatcatttgagaaacacggctcaaagcccttgctgccaattgacagacaggcttgtttgtgtttgttgttcatcctctgcctccccaactccaccgcccactccacgtggcaaggattcactgggctttgttcactgctgattccctgggcctcaatgtatatctggtgagtgaatgaatggataaatgaagcaatcaacctcaagtaggtctcataactttctggtcacttttgattattgaatctgcatccgccaggtgcggtggtgtgcacctgtagtcccagaacttgggaggctgaggcaagaggatcacttgaggccaggattttgaggctgcagtgagctctcatgacactagtgtactgcagcccaggcagaaaaccaacactttgtctctaaaaacaaaaataaagaaataaactcaatccaatgtccttcaaaacaccaactcacatctagtttaaatctcatcttctcctgaagccccacacctgcttccccactcagaacagccttgactcactgcttgccagcaaggtttgaggtttgaggaaagcacatctcacataggagcatgaacacccagtcatcctgctgaagaactacaaaaggacccctgcccactctttacctcctcccagtgcagcctctggaggggattgtratctgtctcagtcacttgctccctcttccmccaacagccacctcctccaggatcagacgacagggggtggcttcaaggaggcagagatctttttaaaagactggacatcttctggtgtgaggaggggargcaccaaggcctcactttctgaaggcctttgctgaagggccagtcactcctagcaggtggtgatgtctggcatggcccaggtggcccagtctgtcttggctcygcctgtcttcttwacctgggcagccctctggctcaagccttctcctccacccatctcttggcaacttctcaaaaccacagcagttgctggactattaaatcttccaaaagctggaaggaaccagcaaggtcttcctgaccttttcttattgggccctcccctccacggttctcaccctccctgccggtacacctgccccagctccaggcgaggagcagggttggcctctatgttcccagggaaacaagtctgggtgctcccayggtggcctccatgacatgggcctgtagatgctgtggcctgatgagtttctggagtggggcatgaatgccagtctctccttctagygcctacaagtgattcttttgggccctcccccaacttgcatctgcagggcagcacacccttcctcccatgaggttttgtggcccccaggggactgagcctcagcttcctgcccagttccctttcctcatgtagagtaggaaggggtttggagcactgggtgttgggtagtagaggcagggccagttctgcctcctctcagaggccctgaaaaagacctcttccatgattctggtgactttcttcagactgtggcacctctttgtcctcagctttgaatgtgtggccaacagaagtccccctcaacaacctgccacatccagtcacacttggtgtcacattgagaaacttggcctttataggtgatggggtaggagggtgctgctaaaaacttcaaaccgggcaatggccagattgggttagaaagagctccctccaaaggcagcgtggcggccagcatggatgcagagacctcaccatccccagacaggcatctggcccctcctctggtcatgcccctccctacggaatgaggactctgcaaagccaaggggtctcgcctgccagaagcctgtgcccacctttgagaccacccatccctgccaacaaagtgtccagtttcagaattcccygccaaatggccctgagccacatccggcacctgcctgggcctctccagggtcagtcttcccaagggcagaccacagacattattcagcactccaggcccaagaagcggccaatggggggctatttgcagactgtgaacaggctggggcagccacacacgtgtgggtcagagccagggtgggccatgagccagaggcttccattttttctcttgccccagccctctagatgttacagtttagacctggggcagagacacctttaaaacactggcttcttcaccttggaatcacctggtgagctttaaaaactactaaagtctgggtcccaggttcccccgttctgagtttattggtccaaggtgagaagtgagttaggggcttaaagctccccaggttctcatgggcagccagggtcgagaggtgctgctgtagagacaatgccayggtccaggtcagagagaacaaagggagagaggagggtctgttctaggcagctgggagacaggctcctgcatgagtgagtggaggcagccatgatggaagagggagcgtgggaagcctctgtttggaggacagagctgcacatgtggggtttggggtgttttttgagatatccatggggagatgtctagcaggcaggtggatacatggcctggatctcagttcagatctctgggcctgaggtagagttggaattaccagcacataaatggtggctgaggctgtgaacttgactttgagccaagggcatgtgggccaagaggagaacatcagttgtactcccaaactccattctctgtctgtcgatccattcctccatcctaggccagagtcagtttagtagtagaggggcctccataatttgggggaccagagtccctaatcagttcgcctacagcaggatggttgtggggagaccttaacaacaatctgctcttctttccctcttgctccaccctcacaccccacccccacccccatccaccacctgccccaaccccatgcccttcctctcctttcctcctcccacctgcccccactttgctttgcctgtcccatctccctccttgacaccccctcccccaccccaaggtgaaggtctggttccagaaccgccgcaccaagcagaagaaagaccagagcagagacctggagaagcgggcgtcctcctcagcctccgaggcctttgccacctccaacattctgcggctgctggagcagggccggctgctctctgtgcccagggcccctagcctcctggcgctgacccctagcctgccaggccyacctgccagccacaggggcacctccttaggtgaccccaggaactcctccccacrcctcaacccgctgtcctcggcctcagcgtcccccccactgccgccccctctgccagctgtctgcttttcctcggcccsgctcctggatctgcctgccggctacgaactgggttcctcggccttcgagccatacagctggctrgaacggaaagtgggcagcgccagcagctgcaagaaagctaacacttaagactcccaccctgtgacactgagtcccgagcacagcaccttcccagtctcctgtgccccagcggacagcactgagcaggccccggasaggaggggctgcagccacacactcttccccacctgccccccagctcagagactcgtgaccaaatggccttggtcccgcagcttgtgtgcgtgagtgcagtgtgagtgtgtgtgtctctcactgaaataaaaggaaaacaatgacaagaagggaaatggtgcccacagcacaactacttacccctcaatcccttctatccctcttgtcactggaagggaaaatgggcttagagtcagagggacctcagatgggagagggcagaaactgggattctgggggtcaggggactcacatgtgtcggtcagcaggcacctgattcccactcaatagaagcccatggcaccaacacgaattctttggttaaatgttgccctttacaagctctctttcaaacataaaaatacttgagagagggaaacattgtcaccttgaagagggtgaatggtgaaaggggagaccaggttgagagagagggagagagagcatcaaagctaaacacaagcaagagtccagatgtttagagacggcctacccatcacaaactgcaacatgaaaccctttaaaatatctatacacagcctggccaacatggggaaactccatctctactcaaaatacaaaaattagctgggcatggtggcgggcgcctgtaatctcagccactcaggaggctgaagcaggagaatcgcttgaacccaggaggtggaggctgcagtgagccaagatcatgcctctgcatttcagcctgacaacagagggagactctgactcaaaaaaaaaaaaaaatatatatatatatatacacacacacacacacacacacacacatacatattatatatatttcatattgctcaaacaatataaatttttttaaagttaaataagagtcttgctcaagactcttttatttaactttttattttgcagtaattatagatttacaggaagctgcagagataggacagagaagttccttccattggcaggaactcaatagtatgagacagataggcttcatcttccctaactatagtacaatatcaaaactaggaaattggcattggtaccgtgtgtgtgcatagtgccatgtcattttatagattcatggactcactgctgcaatccagatgcagacctgttccatcaccacagagatcttcctcatgctgctccttgatggtcacacccacccccgccctccacaggagagttctttgaaaggatgggcattaggaaccagagacctgaaatgggtcctcaggagggaggatgcggggtaagattttgactctgtgaagagaaataacaagcacagtctcctccagtctgctctgagaaacatagtagctgctgctttggtttcaaattggctgtcctgagtcacctggagtgggtgcttggggacagtgatccctaggcaaatgtacttctgccgttccctctgctcagtggtatggtttggggaggagcttagaaatgcagaaatcctgagcctagaatgaggcatgggggtgactagaagaccttgggttgggcaggtccagctaccacccagggtccaccctgccttgcccagaggaactgtaccacactccactcaccaggagaaaccacaactcttagtttcatgacatgaagagagagttcttgggaagcagtggtgaggtcttgggtggaacccaggccaggctgtgcacatagtttgatttataactccaggtatttagttatacaatacagggacctccattttactttctgacctgggctggaaaggtcagggcaggcctgctgtatagaaatctggaggtgaatgtgagaagatgagacacggttctatgatcagatggagagagaccagccctcattctcaagaactctcaatagtatgagacagacaggcttcaggagacccaggtctgtgggttgagacacaggctcagcttttgggggctcacagcccagtggcagggacaagagaggcctctcctaaagggcatgacttaggaaagaggctagatgtgtagtaaatcttggctgctagagaatccagagaaggcttcatgtaggagatggcactgaggctgaccaggaaataattctctacagatgttcaaaaagatgacgatggaattgtcagggggcagaagtatccaggtatagtcagggcaaggagtgcagggtaaggtcaggttgcgagaacagtgaagaaagggcagcctgccagaagttgggtgtggagagaccagaaagagctgtggtgagggacgagtgtgggaatgttgacagcacctgatggtccaggggaggaattgaattcatacagtttggggttggcggggaggaaccgcctagcacagaagaaggaaaaagccagccctcccctcttcccttctccctccacatcctccagctctcaggtgacgggggcccctcccagacctgcacagcttggtgtggggaaagcttgggagccagagccccaggcttccttgtttactgtcaacctagaggaggaggagagggaggggagggggagaggggaggggtggctgcaggggaaggctgagcagctctctccagctccagctggacctgaagtctcagagctgccaccagcagcaggctcagacactgggctcccagctggggactgctccatggccatggagatagacagcaggcctggggggctccccggcagtagctgcaacctaggtgcagcccgagaacacatgcaggcggtcacccgaaactacatcacccacccccgtgtcagtgagtagcccctccaccgtgatgggtgaggtcagggtggggagctggggtgggctgccaggttcccgggccccgcttcttgcctcagaaaaggaggaggacccaagacctggggagacctggagggctctctgtccagcagagtgacgcagtggggccacctggaccagaggccacctctgcaggtgaagggttgcaggtccccagcccagcccaccccagaagagagggctggggagtagctgtcatcagcccaatcctgctgtaacacccgaagtccagagatagcttccagttgcccctgagagtggggtgtgctgtgcacctgctcttgtgtaaacgtgcctgtgtgaggagtgtgcacccaagcactcagagtcaggcggggtgtgattaagtgtacttggagtggtgtgtgtggcagtgcagagtgtcagcgctctcagcctgaggaaataggtgccccgtgtgcgtcacatcaatgggtgcatgtcgtatgtgtgttctgaggagggtgcctgtgtgcataagcaggtaggagcatgtgcctagggggtgctcccaccttcacttggggtaaggaaatgtgtgactgcatgcttatgcactcagggcaaaggtgtgtgtgtgtgcacttaggtgtgatgtacgtgtgtgcatgtgcactcatggagagaacacttgtgtatgtgttctggcagtgtcacatatctgagtatggtgagtgtgtgtacagctgggataagaatgcgtatccaggtgtggggcatggaagtgtctacaggtgctgggatgtacccttgtcaatttcagaggggaggccctacttgtggctcctgtgcctgtcctgcaagggtggcccagatgtctggggcaaggtccagaggaccaaagggaacccctgcatctccttgtccaaggtcactctccctggcctggtgaattctcaggccgccctgctcactggagtaaaccagcatggcccgccacagctatgcaaagccagaggctcactggagtaaaccagcatggcccgccacagctatgcagagccagaggctcactggagtaaaccagcatggcccgccacagctatgcagagccagaggctcctaacagggagtgtggtgtgaggggaagtgagcctgatgcagccaccccacctccctctgttcctctgttgctatccaggccaggagaggaggtggagtgaactcagagggtagctgaggggtgaaatcagagtaaaggggcccgggggcgcatgggaggagagccctggggtgtggggcacctcctgaggcctgaggcaggtgctgagggtggagcacattccagctaagaagaaatggtgagaatggggtgggtcagatttctcaagcaaggcctgtaggccctgccccatggagctcgggggaggataggaggtccggatactccctaggccaaagctagggtcaccaaggcccagaaatatgcagtgactgggcccccttgggtccagagcccaggcctggagccctgagctggcatgtgtgactcttgccagtctgttgtgatgagccccactccctgcaggccgtccctcctccctgcaggcacccgggagttgctgggtgctgagtgtggtgtgtgatctgcaccttcatgctctgctttccttcttcctggaaagtgcccccacctcctgatacccagggaccctataggtaccatctaaccccacactcctctgggcaggttggcccaagcctggagccacctccagccagctctttcccacccagccccttatgtatagtcaacatgccctggaggttctgacccaggctggaacccagggatggctgtgcccgccccccatgtttgcatgcttccctcgatgctggctctatatggcctccacccaggagaatgtgttcacaccaaacaacccaacagtggacccagagcaaaggtcagtgcaggggagcccctctaggctctgctccctgccagcgcctttacttttgctgcctatcaagtatcctcacaggatgcaccgggccagcctcagcccagcccagatgccctcccacccccaggggaaggctgggattccttggtgtgtcccttcatccacagtgtctcccaatcccctccccgcctcactcacttcctcctcaggctctgggagtgggagggatgaggggggtggttctccctggggcctgtggacaggcgcagggctggcaagggtttggaaatttagggctgcaccctcagtacgccagaggcagggccactctgtccctctccacctgtctcctccccagcctggcctcctaccctgggtctgtaagcactcccagacaggagaactctgggagaaaagctgggggtgcctaagggcagggaggccccagtgctcgctgggccacggtggaggtgagtccaggtgacttaggcattcccctcccccgggggaggtgggctaaagaggcctgagactttaaggctgatttcactgcagtggctgagagaggattggctagaaaggaggagacactagaaagagtggaggcagcctggggagctgaccctgccaacatctaccttgggaaagaagggtcccctgtgcctcccgtggagctagaatggttccccaagggccttggctcccggctggggaggaggtatcctggagcttcatctgtttgggcagaagatgttgggcttggagggtggaggtgcccagcaggagcaaaggtcaggaaggacaagctggcagcctggttggagggatgaagccaggtcagatccctgaagatcccccaggagcttgagtgccaaaccactgtctttgcctccccacctcggtttcctcaactggaaggggaaggagttacacggagagagtcccaacaagcagggtcttgggctgaagagccctcagcttccagcccctgccctccctcctctaatccctccagcgggatcagggaggaggtgcgggacctgctgccccgggcttgcccccatcccggcctcacgcatgggcgcctgtctcagccctctcccaggacgctgcaggtgtggctgggccagcgctaattagtgggccgcgcgggggccccgctgagcctttgacagaaaaggcggtagggaggtgggggcagggaggcgctccaccagccagaagtccggagcgcaacccaaagtgtcagctaagacaatggagagggggtgggccgggcagctggagggagtgtctgcaaagtctctggaaggcccatggaaggagcgccctttgggtcttctgatccagccctctgcctgtggcaatgcacccgcttccctctccagggtcaaggcgaacatcccagggttgcagag

SEQ ID NO: 98193 - DNA, 16769 bp, Homo sapiens
actattacttttatgttttggacatgttaaggcaaaccaccctgacctgtgcttaacacacaaacagaagcccacacaccaaatgttcaaatatttaaacgctacaaatcacgccagtcacctgttaagtatgttctattctcctaccttgacaaatataccttcatcatggcctgaaagcccaagttcgaattgagaattctcagattcctcgggtgatgaactggcccccgtttgtagctacctcacctgttctctgctcagctccagcactgtccacaccccataaacaggcacccccttagtcgctcctcagagctagggtgggcaccctgctgcgtggcccaccttcaggaggacagactgggcagagggctgtgccgatcctggaagtgggcttggggctgtttgggcaggaaactccagggtcctacgtgctcagagtgtggtctagaaggggcacctaggctccaggtggattgctgctcaggacctcagagattcctcaccccatggggtgcagtgtggcaggaggggaccagagccttctgctaggtgaggataagcccaggagggactgggaagcgttggatctgatgctgtaaccagtaactttgggtgagtccccgatgctcagctgcctcatctgtgaaatgggccagcagctccgcctgcagcttagggctgacgggaaggtccccatgaaaacagatgtgtgtctgcctggggtccctgcagcctggggatgggggggcagggcaggtggccactctggctgggggatgaggatgcagaggtgtgggactcgggcagccctccaggaagtcaagcctccaaggatgatcctgggagggggcctctgagccagcagaattgctgaggctcagcctggaatggagctggcggaggcttcactgcagcctgggctggcctccttcccagatgtacggtgtgtgccggccagcccgcagccccttcctctgcccactggctgtgtgtctgctcaggggctccctggtggtcccccaagcccccaaagctctggtatgggcatgaggaacgtgccctcccatgggctggctgctgtggctcctctcattcttgtggcaccgcctctgacagcactgagctggggcccggaccatcaccgaggatcgacccccacacaccaccgtcccagcctcctgccccacagaaatgcaggagctactcaggttgggttggggccacgaccagtttgtcagcttcccctaggcttgggacacatgcaggctcccagagctggcccctgccctcagcccccatgtgccgcccagaggccccacggaaaaggcaaacagtgcagggccctgagacacgtaggaccccacgcacctagctgagcctgcctcagccccaccctgtctcctgctctctgctcccgggtctatgctgctccagacactgctgggattcgaaggcgcttcctctcccagccatccaagcccacatgctcacctctactccccaaagctgccccaagcctggtatagagcctggttagagagcccctgtctacttcgagaggaagatgaggaggactatggggtgcaggggctgcctggggagtagtcacctcaccagaaggggcatgatcagtggcaggtggagccccagcaggatggggcccggcctagagctgaacaaaccctgggctccaccaccttctagccctatgccctccacatgcaattctgcatctctgagcctcagttttctcatctccaaaatgagggtgattcttccctactggagtcattgtgaggactccatgcataaggcaggtaaaatgctcctatagcccagcaattccgctctgcgtatttaccaagagatgcaaacacgttctcagacattggcacacaaccacacaaccattcacagcagccccattcatgacagccaaaaaggaggagacaccccaaatgtccacctatggacgagaagatacataaaacgtgctctagtcatacagtggaatattacttagccatagaaaaagaatgtactggctgggcatggtggctcatgcctgtaatctcagcactttgggtggtgagagttgtaatcactcacctctcaggacagaggcgggtgtattgcttcagcccaggagttcaagaccagcccaggcaagacaatgagaccccgtctctacaaaacaaacaaacagaaagtttacgctgtggtgtcagcattcaggagcaggttgttcagtttccatgcagttgagtggttttgagtgagtttcttcatcctgagttctagtttgagtgcactgtagaaagttttttcttttcttttcttttcttgagacggagtcttgttctgtcacccaggctagagtgcagtggagcgatcttggctcactgcaaactccgcctccaaggttcaagcgattcttctgcctcagcctcctgagtagttgggattacaggtgcctggcacctcacccagctaatttttgtacttttagtagagactgggtttcaccatcttggccaggctggtctcaaactcctgaactcgtgatccacccgccttggcctcccaaagcgctgggattacaggcatgagccactgcacccggccaaaaagttttctttactttcctttttttttttttttttttttagatggagtttcaccctgtcaccaggctggagtgcagtggtacaatctcggctcactgcaacctctgactcccaggttcaagcgattctcctgcctcagcctcccgagtagctgggactacaggcgtgtgccaccatgcccagctaatttttgtatttttagtagagatggggtttcaccatgttggccaggatggtctcaatctcttgacctcgtgatccactggcctcggcctcccaaagtgctgggattacaggcgtgagccaccgcgcctggcctacacttagctaattttttttaaggtttttgcagagaagaggtcatcttgccatcttgcccaggttagcctcaaactcctaggatcaagcgatcctcccacctcgatcccccaaagtgctgggattacaggtgtgagctaccatgcccagccaaaagaaaatgttactagatatgctgaaaaccaggaatttggcaggtaaggcgtagagggaaaagcatcccagacacagtcaagggctcaaaggggagaacatggccaggtgctgtggctcacgcctgtaatcctagcactttgggaggccgaggcggcagatcacgagatcaggagttcgaaaccagcctggccaatatggtgaaaccccgtctctcctataaatacaaaaaggtagccaggcgtggtgcggggtgcctgtaatctcagctacttgggaggagtctgaggcaggagaattgcttgaacccaggaggcagaggttgcagtgagccgagattgcgccattgcactccatccccgtcagcagtgtgagattccgtctgaaaaacaaaacaaaagaaaacaaaagaggagaacatgtctcctttggccagagtacaggacccatggagtattagtccattttcatactgcaataaagaacacctgagactggataatttataaaggaaagaggtgtagttgactcacagttcagcatggctggggaggcctcaggaaagttacaatcatggcggaaggcgaagcggaagcaaggcaccttctccgcaaggcggcaggaaggagaagtggagcaaaggaggaggaaccccttataaaaccatcagatctcttgagatctcactcactatcatgagaacggcatgggggaacctgccctcatgattcagttacctccacctggtctctcctttgacacatggggattatggggattacaattcaagacgagatttgggtggggacacaaagcctaatggtatcacatggagaggagatggaagccacaggatgggccagggccagggccaggcccaggagtctggagagggacagggacccctgagggcttctaatggggtgatcaagtcattcctaggttttgctgggggtttttgttttgttttgagaaaaggtcttgctctgtcacccagcctggagtgcagtggctcaaccacagcttactgcagcctcgagttcctggcctcgagtgatccttccacctcagcctcccaaagctgggaccacaggcacgcaccaccattcctgactaatttttaaattttttgtagagatggggtatcactatattgttcaggatggtcttgaacttctgggctcgagtgatcctcctgcctcagccttcgaaagtgctgggattacaggcatgaatcactgtgctgggctcagactgaggtttttaaaaggccactctggccgggcgcgatggctcacgcctgtaaacctagcactttgagaagctgaggtgggtgggtcacttgaggttaggaattcaagaccagcctgaccaacatggagaaaccctgtctctactaaaaatacaaaattagctgggatggtggtgcatgcctgtaatcccagctactcaggagactgaggaacccaggaggtggaggttgcagcgagtcgagatcgcgccattgcactccagcctgggcaacaagagtgaaaatccgtctcaaaaataaataaataaataaataaataaataaataaataaataaaaggccattctgcactgtggtggacagtttggaagggggccagagtggctggggcaaggaaggaggcttttatgggggatgggggtggtgagctagaaccagggcagtggaaaggacaggaaggtatatcacaggtaaaatcggtggctgaagggaagggaagggtgagggaggggaggtgtcggatcttgcccagctgtaatacaaggtgggcactgcccacagaaggggagctactcagggatgggttgtcttggccctggaatatggtggaccctgcggggcattcaagggacagtgtcttaacagggagctgaggccatcagagctggagacagggtggaaggggcccaggacagggacagcattggaagctccagagctagcagtcatcagccccctggtatctcgtggggtgcacagagtgaatgctgaagggcctgagtccttgcgggcaggcagggaaagagactaaatgtcggggacaggagctaggagaaggcagcctttcaggcatggtgccgtcaaccatggctcagatgcgtcaagaagtgggagggggccgggcgcagtggctcacgcctgtaatcccagcactttgggaggctgaggggggcggatcacgaggtcacgagatcaagaccatccaccatcctggccaacatggtgaaaagtctgtctctactaaaaatagaaaaattaactgggtgtggtggcatgcacctgtaatcccagctacccgggaggctgaggcaggagaatagcttgaacccgggaggtggagattgtggagagccgagatcgcaccactgcactccagcctggcaacaaagcgagactccgtctcaataaaaaaaaaaaaaaaaagaaagaagaagtgggaagaggccgggcgcagtggctcacgcctgtaatcccagcactttgggaggctgaggtaggcggatcacttgaggtcaggagtttgagaccagccttgcgaacatggtgaaatcccgtctccactaaaaatacaaaaatcagccaggtgtggtggtgcgtgcctgtaatcccagctactcgggaggctgaggcaggaaaatcgcttgaacctgggaggcagaggttttgcagtgagtcgagattgcaccactgcactccagcctgggcgagaaagcgagactctgtctcgagagaaaaaaaaaaaaaaggtgggaagaaggaaaagtatccactggatttagcaaagtgagattgtcagtgaccttgaggaatttccactggagagctagagagctgggggtaaaaggcagatgactggggttgcggaatgagtgggaggtgaggacgtggaactagaaaaatggtgaggaccgctctttgaagaagataatttgggattgttttatggtgtttttttaaaggctaaccggcaggaaggagaggaggtgaaggtataggaaggaaggctccatgggaactatggcctggtcaagggacaagatgcaccccctctgcggccagaggaaggggtgcagccaggtctgtaagagcagcaggaaaaaaccatgcgacagcctgtctcaagggtgagggcaccggcgtggagctcacagagctggaatgagggcctgtggttttgagggggaccctgggctcagtgggatgtcctgagggtcaggctggggctggggtgccagatctagcaagtaaaactacaggatacccaataaaatttttttagcataagtatttcccatgcaatgtcctggatatacttacactaaaaaaaaaattattcgttacttgtctgaattcaagtcctgtaattttcagccaatcctagcccagcgtggcgcagtagtgggtcagggagggcaccggaacagcgcgacccgacagccygggaaacggacagccgtgtcagaagggcaggtgccagtgggcaggaggccggagagaaagccgcagcttccttccacctcgcgccgggcccgcggccgcgcacggggaccgctccgagttcctcccggcgggaaccccccgccccagaactttggtctcgtcccacccacccccgcccgcgccatggtctcgccctagggagccatcgataactctacgctcggcctcgatcgactcgctccggctcccctcgccgtcctggacacggcggagtgcggagccgcccgtaaggtacggaggccgcgagccaggggccgggaaccggctgctgggtggctgggagagcacggccaggggaagccggccagcaggacggagcaagggcggtcaccggaggaaaggggagctcgggggtccagccagactgcgccctttcccatcagggcctgccgctggcctgctacgcatgcgcagccgcagcgctcggctttccccggcccatccgccgccttgcgcacgcgcagcccgcccctgcggcagagtggcgcccgcgcgtgactcccccctgccggctgcggaggtggggggggacggcgcccccgccgtgtgcgtggggcggggatggagcacgcgccctggagccccggagccaggtatcacgcgtgtgacgcgtgtccctgaacctacctgcgcttcttgtcccaactctaaaatgggaatgataagcgccattcggcagcgccttgtgggtctataatctacttagcacagagagtgtcttctaagtacttcacatccttctctgcagatgctctgacctttgacccctgccgttcagctctagggcccgtgcaggccacaccatgaacacctccccaggcacggtgggcagtgacccggtcatcctggccactgcaggctacgaccacaccgtgcgcttctggcaggcccacagcggcatctgcacccggacggtgcagcaccaggactccgtatcctccacccggggcgggcagggcggcgctggggggatgcctcgtgtggggaccacagcctgtgtgaaggccagatggtggaggcctggggggccctggcctcagggytaccttcccgtcatcctccttaacagtcccagcaggtgaatgccttggaggtcacaccggaccgcagcatgattgctgctgcaggtatctgtgatccttgatctctaaactcctgagctctggtgggtcgacctsagcacagccaagcttcagttcagcctgtgtccctaggttaccagcacatccgcatgtatgatctcaactccaataaccctaaccccatcatcagctacgacggcgtcaacaagaacatcgcgtctgtgggcttccacgaagacggccgctggatgtacacgggcggcgaggactgcacagccaggatctgggacctcaggtgcggtggggagggggcgtgctgcccggggctggggtgggctgctctgggagaccgttttaggttgggttctcttcaagcagaggctgagacagggagcttcctgtgggcgacttactgagagaagtgaggacaggaggagagtgaattgcatcagagcgcgagtcctgccttgagcccggagccagcttgttattccccttccaccagccactggcttaggctccctgctggagcagagggccctgcgtcccaagtatttcccaagaggcaggtccttcagcagagggaggggaggaatggccaggccgaggccatctgggtagggcaccaacaagcccagatggacagcatgtgccccggcccggcccgcaggtcccggaacctgcagtgccagcggatcttccaggtgaacgcacccattaactgcgtgtgcctgcacccsaaccaggtgaggggtgctcatggggccaggcaccctgggactttggarggctgggcttgggccctgcctcaccacccctgcaccccaggcagagctcatcgtgggtgaccagagcggggctatccacatctgggacttgaaaacagaccacaacgagcagctgatccctgagcccgaggtctccatcacgtccgcccacatcgatcccgacgccagctayatggcagctgtcaatagcaccgtgagtcctggtggcaggtgctgggtgygggcagcttggcactcagccctcagcctctgcaggtgggcttattcctggatgtcccttagcggccccctcctgctttccccatcccgggcactaacacccaccttgccagcaaagccagaagccttagtgtcgctcccgatggcttagtcctgtctgcaggtcggtcactccgctttctggagtctctcccaagtcgatccacttccctcttttcactctgttgcctcctggtcccagtcacccttgtttctggtgacggctgacacactctctgaggcttcctttccccctccctgacctcccctggcccctgacacgttctctcttggatgcttctagtggtgcctggtcagtatcagccaggtggcgtcattcccctgaggagacccggggctgctggcctcgcccgtaggctgctgtggcgtggcccctgctcttctctccagcctcattttttttcattaacttcatttaatcccagtgcatcacttgtacctcttgcccccggatttcccttctgctggcctttgtcatgctgtctctctagctggtgcccttctcctgtctacttccgttggccatcggcatcctccaggaaggagaatttgagtccttggccaggcgtggcctcctgttcttggcttgccaggtgtggcccttgsttggggccaggcttcccaggtgccttctgcaggcaggaccagaggggcctgcctgcccctcacccggggtccccatgcacagttggcccccagtgttggcccccagggcatccttccctgtgtctcagacctgaggccttgggccctccgtgacggtcctcctgacctctagggaaactgctatgtctggaatctgacggggggcattggtgacgaggtgacccagctcatccccaagactaagatccctgcccacacgcgctacgccctgcagtgtcgcttcagccccgactccacgtgcgtgcagggcctgctggcccgggaggggacctgcctgggctgggggctggagaggggaggggctgctggatggagtggctgctgctggacacgccccatgcccacccactaggctcctcgccacctgctcggctgatcagacgtgcaagatctggaggacgtccaacttctccctgatgacggagctgagcatcaagagcggcaaccccggggagtcctcccgcggctggatgtggggctgcgccttctcgggggactcccagtacatcgtcactggtgagccccrccctggcctcccccatccctggcccccggcgctggcctccagagccagcccacctcggctgcagcttcccctctgctggggccgcctgcttggcctgcacctgcgctcttagccctgcacaatctcccyctccagcttcctcrgacaacctggcccggctctggtgtgtggagactggagagatcaagagagagtatggcggccaccagaaggctgttgtctgcctggccttcaatgacagtgtgctgggctagcctgtgacccctcgggactgcctggtgcaggtggtggcagctggagggacccatgcagcacccaggtcagagcagaccctcccctgccggcctgcgccagctggacctgatggccccctgtggcgccttgacctgctgggccaggctgccctgggactctcagcccccagttgcttatccagatgtgacagagctcgacccaagccaggctgcacactcctggactgggctagcctgcactgcctgggaaagtcggccgagggcccaaagctgctgaggggtctgaggctggtgcccacccccaagctagtgygttytctgcccctccctgcccgcgtttcagggcctcggtccatagagaacaccaccaccatggccaggtggaagggtttattagtccctgccagcagctgtcctccctggtgcaggtggcctggccagcccactggattggggacgggccaggctgggccaggtcgggggctcagtctgggaggtaataaaagcagaccgasacgcagatgttgctcgggaagcagatgtcgatgcagagataaatcagccgctgtctccggggccctgtggcgagggtgccgtgaatctccaagggctccgcccccagctcctcaaaccatcccgagggcctggccttcccccacagcggtcctgactcaccctctgctcgccgggcccagtagatgggggtcctcatgcacaggcgctgcaccaaagcccccgcctgggcggggtccacttcgaggctcccctgcactgccagcagctcctgggtgtggtgggtgtcctggctggggacccaagcctcttggacctgttgagaaggctctggtgggcggtgggacagggctgctccctgctcctggcttggcagggccgggtaccctccaacccccagtgatgtccccaccctcagctcttgtcagcagcctgggcttagggcggagagagcttcctgttccctgaaaccagagctccagcctgtcccgtactgggctgcacacaggaccctttgtctagcccctggcccgggcctgcgcccagcaggacggctcaccttggaggtatccaccagcagccgcagggtctcccgatcactgtcctccatcaggcggaggaagcagacctggtgctcctcagggcggtaacagatgcagccctggggaggcaggggggtgaggcggggccccccagaccgacacctgccagggtgacccctccctgcccactcacgctctgcccgtcgaacagcaccgcccagctgtggttgctctgaggtggggtcactgtgatggtcgccgcgttccgggccacgtccaccaggatggtttggttgggccggggcatgtgggggctcgggagggtcattcgcagcgtctgcagccttggctggcagtgggagttggagttcagccgggcagctgtgcaaccccagcacagcctccagctctgggctgcaggactcctgacacccctgagtgggcccttccaccccttggtcctctggctgtctgctcctaggtggtgtcactgcctgctccgcacccttgctctgctggaggctgggatatgccagcttcccttctccctttccactgtccatgtccctggtgctgaggaggggctcaccttgggagggccctgagcagagccaagaagccctccagccacaacccccacagcggccagcaccagcagcagcagcagcaggagcaggcccacggctctccagcccccgcaggagggcttggtcttcacctgggcgtgcatcagggtcagaagggtcatgagggttagacatcagggagcaagtgggctggggaagggaggggctgggtggcctggggcaccccctgggtccttgctgcaggagtaacgggaggcactcacccctgtaggcccaggtttggggcgctcagcacagcagcttgctggttccatcctgcagcccctgctcacaatgtgccgattgtctgcgtcccttgtctgcagccttggccaggggaaactcagaacagaacccctcccctcctgaccctgcgcctccccctcagctctggatctgatatccaggtcagagccaggacagcccctcctcccacctgggggatgcctgtcaccaggcccggctccagacacctggcctgtgcagactggagctcagggtctgggaggcgtagggctcggccgcgtggaaatccagtccggctgaccgactggagggcagcccaggcccggccagggtgactcgctaagtgtggttggggtggatttcgttttcctaaagtggcctgagtctgtcaggttatccttgactcccagagttgggcacagggcctgacacgccacaagctgtcaatacgtgcctgttcagtgaatgacaggtgtgggactgtgcacccccagccacttcccagcccccgcacacccaagaccagggggttcctgaagcctggaccacagacaggcagcctgctggagcctgtgcccctgggacagtcaggccagcctcgggggcccgcctagcccaacttttttttttttgagacggagtctcgctgtgtcccccaggctggagttcagtggcgtgatctcagctcactgcaacctctgcctcccgggttcacacaattctcatgcctcagcctccctagtagctgggattacagatacatgccaccaagtcccgctaatttttgtatttttagtagagatgggttttcaccattttggccaggctggtcttgaactcctgatctcaagtgatccacctgcctcagccttccaaagtgttgggattacgggtgtgagccactgcgcccgggccagcattacttctgagctctgctccctgccctgggcgctctgacacggcagcccaccagcttcactccagggccctttgcttccctggcttccctttgtgcctggctttccctcattcttcaaaacatcttcctctgaaccaggctgggagtgggcagttggcattccagctctggagttggaaccccagttacccatctactttgagtcctcccacccgtggtgagacggcatcacccgggccaatgcaaggtgagagcaaggacacctgagccagtgtgggtttgagagtttaatctgtgctctggcgcccacagtgctgcagcccctcatgggccagagacagggtgcacggggactcccagcccctacccggcaagagaggcatcactgaggctgcatctgccatgcgctcctggtgtgactgcaccctgtcaggccagacccggcttgagccaacttagccaagccagcgtcagtgtcaccagcctcatgggtggagccaccctcatgctgctctgcagcaccctctgaacccgatatcccaggcctgggaggtgctgaaggctcaggacgcctcttattgctctgaagtctttgtgaccaagtggagtgctgtgactgtggggccaagagagaagctgccaggtacagggaaaggcgctggtagggagccagccagaaggtgcagcatcccgggatggccctgctgagtctgctgtcaggcctgtgaaaggtcagcagagccaaggagcaggcaggagaggctggagccccgcccagaaccttggcgagctggtggccctgccaagtcctgctggccactgaagagggaatccagggcaaggcaggtgacctcctgggccaccagtctctaacccctaccccagcctagggaaggggaggacaggaagagactggatgctttgtaaaggacttcctgttcttggggacataactctcgtcccctcccagagccctggatgactgacaggcattccttggccaacacatgcttgagccgcgctgctggctgcagggcacctggatgacaggcattccttggccaacacatgcttcagccgcgctgccggctgcagggcacagaggctccttcagtggaattttgcctacgacacagagcacagctattaatacacttaaaattcaaatccattgcctgacacagttgttcaaagttaaaaactgtttggtagcagcactgctctgagctccctgcactgcagcccggagttcagtgaaggcgtccacgccatggtagctgctccgtccaaatcacctgggtataaatgcacacttgagacagcagagctttagctgggctgcgtttacagaactgggcagcagccctgggtatctgaaacggaacagacactcagttgtgacatcagagtggttttcaaggaagtaagggaggtgggagagtggtgagggcagcactttgcacccaagggcagggagatgccacctgggagcagccgcctcctccactcccaccctgctgggaggcacagggacacagaaggctccgctggactttcagtcatactgatggggctctggtccatgcaagcctctcccaacagtcagaataatcagtccctctgccccctgaggggctggatccctgaatgagtttttcaataaaatacaggacacacacccctagacccgcctcagtcccatcggcaggccctggttacctgaatcccggacaggtgcagagcctgcccctgccaaccccacccaaggcccagaacccagcccacaatgccttccaagcctaaaagtgcatcttcgattacaagcatctgtaaacaaaatcgtcccccaaacgtgtacttacaaggttaacaatgaatgcctttgcttaactccaattacactctttgaagccacttagccgagcagatgcttaagccccacctattaatttgggtaactggttttcaatttctttttttttattctgcagattaaagacactcaatctttaaccttgaagggcaggcaaaaggtcggctatgctgtcaacatagaagtcagggaccattttcttcttagacacgcagtcactttcctgattattcttcacatcccctagagtggagactccggtgagggtcaggatggtcttcaggccacaggtggcgcctaggaggatgtctgtgtccaggcggtctcccaccatgacggtgcgctcggggttgatgccgtattcctgggacacgcagtcgaaaatgaagcggctgggcttcccgatgatgtcggcctggcgctgggcggccatctccacggctcggaccagacacccggtacctgcggggcacaggggaccgggtcaaagggcagggagggggcccgccgcccgccccccagcctcccgccccagggcgcacggacccgcgatgaagcggccgttctcaagcggaagccggttgtccatgttggtgcccacgagcaggcagccgggctgctgcaggtagcgcagggccttggtgagcttcatgtagctgaagtgcgggtcaaagcccaccaccaccgcgcgcacgtcgggctccagcggcgcgtgcagccagtcgccgggaccctcgccctgcagtggctcgggccccacgcccacgctggcgacgcccacggcctccagctccgcggccagggctgggctgcccagcacgtaggccttgggcgcgggggcgccggccaggcgctggcgcaggtagagcgcggtgcagtaggccgtgccgaagacctccaggctggcgccgggccccgcggggccgccgaagcccaggcgccgcagcttctcggcgtaggcagcgcgggtcttgctgctgttgttggtgatgaagcccaggcgcttgccgcgggctcgcagcgcccgcagggcctcgggcgcgccaggcacggcggtctccccgcgccacagcacgccgtcgcagtcgaacagcagcgtgtccacgtcggccagcagcgcctgtgcccgctcggcgctcagccgcacgcagcgggcgtcgtcgccaccggcctccgccgccgccatcgccgcccgccggccgccgccgcccgccggccgctcctcgcagccgcccgccgcggcgccctccccgcccccggggcgctcattggcccagcgcctcgcgcccgccgcccattggcctgcaccttcgccaatccgcccccgcctcccgcgggctgcgggagctcagcgccaatcggtgaggcccggcgcggggagaggggcgatcattggctaccggccttgggacgccccggtgattggctggcagggctccaaccggcattcggagtgaagcgctcgctgcggaaatgcgccagaggggagagcagcgcaggcgcaaggccgctgttcccgggctgccgcgggccgctcacccattggaagcgagtggtcagcctaggtgacgaggcccttcacggagtgacccgggccaggccggctgtccattggccggtctctcccgcgggcatgggcggggctctcgcaggagcgccgcgggagggggccggggcaccttcgtcggccgtgcccgtgcctctgtgccgtggacgcgctcgggacacggggccaccacgtgggtcgcttaccggccagtcccgcgagccagcccggggctccttccccggcaggcgtgagtacgcgcctcagtccttt

SEQ ID NO: 98194 - DNA, 13273 bp, Homo sapiens
gcgtgtgtatgtgtgtgtgtagtgtttgttggttttgtctttatttttgtttttgttttctgaaacaaggtctcactttgtcacccaggctggagtgccgtggcgtgatctcagctcactgaaaccccgcctcccaggctcaggtgatcctcctacctcagcacccttgagtagctgggacgataggcgtgccaccacacctggctaattttttgtaatttttgtagaaacggggttttgccatgttgcctaggctggtctcgaacacctgggcccaagtaatctgcttgtctcagccctcagcctcccagagtgctgggattgcaggtgcaagtcactgcgcccagcccctcgtgtgttttctaaccatttctttgccatgtgttttctaagaactgtggtgtatgtggtggggatgaatgctctttagctctgagagatttatagcttcatatcttatactttaataatttgggataaaatgattacacagatgacttcaaagcagaaaaatacagatttgtttttcattgtatgtgtagaattaaatatatataccgtccatgtgtttgtaaacaagtttttataatattttggaaaaaatattgaggatgtgcctggagagagaagtaaattttgtctataatttcatagctgcttttattatcagtgatattttcattataatcaatagaattaataagctattgattcatgttaaaaattgcattctctttcatgaagttcaaataacattgatgagcttttaaacatttcagcacatagtgatcttaaaattaaatgtattttgaaatcctatctagattataaactaatttccactagctgttgttagacacatcaaataaataaaatagacttgccttcgtcagcttcagcaatatcattcatagttctgaatcttctaagaattcttagaacatttgtgaatgataattgtttcccgggaaatatgagtacacttggaagaagcatattccaccaaagtgattctaaatccctaccacgtttttaaagttttcttttaagcttgttaagaaatagtaagagaaggggcttccttttcgatccgccatctgcggtggagccgccaccaaaatgcagatttccataaaaacccttacggggaagaccatcaccctcaaggttgaacccttggatatgatagaaaatgtaaaggccaagatccaggataaggaaggaattcctcctgatcagcaaagactgatctttgctggcaagcaactggaagatggatgtactgtctgactacaacattcaaaaggagcttactcttcatcttgtgttgagacttcgtggtggtgctaagaaaaggaaggagtcttaccccactcccaagaagaataagcgcaagagaaagaaggggaagctggctgtcctgaagtattagaaggtggatgagaatgacaaaatgagctgccttcgtcgagagtgcccttctgatgaatgtggtgctggagtgtttatggcaagtcactttgacagacattattgtggcaaatgttgtctgactactgcttcaacaaaccagaagacaagtaactgcgtatgagttaataaaagacatgaacttaaaaaaaaaaaaaagaagggattatcaaagaagacatttgaggtagtgaatgccactttcccccattttaatttaaactgtagcatgagggaaagtatgttttttgaatctgtaaatcttttaattaaagaaaatcagttgccagtaagaagggctggctgtttaaattggttctggtgtcaatgctggaatgctagcgcgcctgagtgtctaaggcttacctcctactcttagctcctagtttgtgaagagcaatttttagcagcttgtctccagacgaaatacaccttaaaatttttattagtaaggacattggaatttattttgaatcttgcattatctgatgcaaattattatatatctgttttattgctttttatggcattagaagtgtccagtaatatttttttaaaaagaaaaatttcagaagaacaaattattgcctttgtacttgtgtgctataagagttcgacagatcattgggtgtctcgctgtttcttttacctgtggcacctggacttagaggggaattctcagaggatgccatgctgtggtggccttgactccttgtgtgggagccagtgtcttccattgtgttctctttcataactcaagagagtccccgtggaaaactggcctgaatttatgacccggcttactgattaactcataggattgttacagctaaataaagcttaatgagtaatttttaatctatcccactatgtgggagaagaatatcacttctttacattttagaagtagagccccagactaaataaccttcagaaatttgtctttttttttttttttttggtgaaaacattctttattagtaagcagacatttgaaactttttgattacatgcatcatgcaaaatgactgacctcacacatggttgtctgttcattgtgacatcttttttgagatgattacaaatttaagatgactgcagtagtaaaaataattcatgaaaatgactctcaatgaagcaaaacactacatagcacacatgaaatactgttcatccctcctggatgtttaattctctcctaacgtaaatctctattttggaagactattatttacaaaaatggcagttgtttttgtatgtgcatctataggcactgaactgatatgaacaaaatttcaaataattttacaaggtttggttgttttttcctgttttgttaatccaaaacaggacaatgccctttgatttacaatgttcagttcttttaagaaatcattttctttggaagatgattttgacccatgaaaaagttgttttacccctggtaatctttttgaaatggggctggctgttatacattatacaggttgttttcagttaagtgaaaaggagttgggcttgtcttgagaagaattcctctaaattatggcactgagaaaacttctctgcagtggtgggctcaccacttccatcctgtggtagttctggtagcactcctggtatgaaaaccctagcacaggtaatttcacctctttgaaataagcagtgatcctggagaaaggtgaatattccaaatctagtagcatattcaggtcatctggcagagaagtaggcataaaagacttttctaggtacttagaatgctgctgtaacaaatatctaaaaatggaaaagtggctctggaattaggcagtaggtcgaggctggaagaattctgaggcgcatgccagaaagaagccaaattgccttaaacagactgttagtagaaatgtggaatgttaatgctagggaggccttgaaggaagaaaggagtatagcagagaatacctcgattgcggtaaaatatctaaatcatcatgaatagactgttggtagaaaatgaggaatatgttattggaaaactggaggaaaaggggtccttgttacatagtggcaaaaagctaagctgaattgtgtcctgcagttatgtgtaaagcagaatttttaagtgatgacttcagtattagctgaggatatttccaagcaagctgtggaaggtacagcctgctgtcttcttgctgattatggtaaaatatggaaggaggtagataaattgagggaagaactgttgaatataaagaaactaggacttgatttgggaaattcgtggcctattcaaggcaaaagccactaaaactaagagattcactgtcaggacagccttctctagagaaagtgatgaaggtatggctgtataaccttctgctaatacttcagaaacatcaaaaggtctgagtatcaagtcacacaaaaggctctttgaggagattaagagtgtgaatcatagatcctcccagctatttcagaaaaagccaaaattagagacgggattttccaggaaagatatgtgaggagcctcctgtgtaaatgagtgaatccccatgacatatgtaagagacccacaagtttctcgacaatgttatagcagcagaaacaccactatttttaacagaatgctttagagaatataaaagaagaaacaaactgataagctgatactcagctgcaaacatgtgctaccttttgtgaaaaagtaaagatgattgagacagtcacaagcccagagaactgagcagtgagctgaagattactcccaggccttgaaactgaaaggagggtgcctggctggttttgtaaattgatggtgctgatggctccttttttcatcccaatttctgctttttgaacaggaatgtgtatagctgttactgtatgcctgtcacaccatcatacatgggagcagataacttgttttctaggttcgcaagtgcacagatggaggagaattatgccccagaaatcacacccagatcctctcccaaatttagatggctttagtgtgagatttgagacttttgagttggtgagactcagataagattttggatttagagttgatgctgtaataatgggttgtgacttttgagcacctatgagtgacgtaaatttatttgtgatggatctgaatcttttaacacaggggtggagtggtggcggggcgggggttgcactgtagtaggcaagaagaataatgttccatgtaaaacgttaatgtcctaatctccaaacctgtatgtaaccttaaatggtaaaagagattttgcagatgtaattaaggttactatggatttcaagacgaggcgataagcccagattatgcaatgggactaatttaatcatgagtcctgcagagaacctctccagggtggtgtcagagagatgtggtaacagaagggtcatagagatgaaacagtgctggtttttaagatagaaggccgcaagccaaggaatgcggatgttctctagaaggtggaatgacaaggaaataaataattctcctatgcaacgctgccgacaaactgatgttaaaagcaccgcgaaacccgtttggactcctaacctatagaattgttaagataataaatttgtgctattttaagccacattttgtaacttgttatggtggcaatgggaaactaaccagaagtgataactaaggatgaagtggtgtctgggaagaagggaaaccttctgacttcagaaatacaaacatttatgctggtagttctttagatctagtctgtccgacagaatatacattcctgtatttctacactagtcttgttctggagaagacgttctaggttgagcacatagaagagtgtttagtgtatatagtgagtttcctagaaaaatgtgttgaatgaataaatgaatgtgatcaaggcaagctctgggaggaactgtaattacttgattttaaaatgctgttgctgtttatcatatcttcttaagaattgctgacctttaggccaggtgcagtggctcacgcctataatcccagcactttgggagtctgaggtgggtggatcacctgaggtcgggagtttgagaccagcctgaccaacaaggagaaaccccgtctctactaaaaatacaaaaatgagctgggcgtggtggtgcatgcctgtaatcccagctactcgggaggctgaggcaggagaatctcttgaacctgggaggtggaggttgtggtgagcggagatagcgccattgcactccaggctgggcaacaagagcaaaactccatctcaaaaaaaagaattgctgaactttatgtgtttctgtttaagttcacagcagtcataattctgcaaaatacaaggcaaaactgtcgtttctgatactagtaatatatctaaatcagtaagtaaaaaggatgtgtaacatcttaataggagaaataattattgtatgatcaaacaatttcaaaatcaaactagacacttttcagtatttactacagacaaattttcaacttatttgatcaaaagatttcttaatggctgttagtcaatgctgcatcaagaaactttagtgcaaattttaccaaatgcatttatcaaaaaggggttttcatttttttctgcaaacaaaacattaacactaagtatgtaacaaactgatttgcctacaaatccaaaaactatcaacataagccagtccttcaactaaaaactcaaacatacttatcttaaggtctattcctaatccagatttgtctatattcaggttggaagacagaataacartaaaaccaaaatttatctgtaaaaataataaaaataatttgtttttttttttttttaatgctggaggtattgtccttattaatacgacacatcatctgttcccacatggtactgcatggataggaacaatattattttagttgatggagtaacacagtgttaagaatatctgcttctagcagtgtcaggctttcatctgttagctctttattcggaaatgaagtcacaagaataaagtcaagagctgcaaattcaggacaagactgtacaataaagttccggacatccaggatcctgtgtgtactattgaatctttgtatcaaacractcccatctgctaacctgatttgaatttttgttgttggcactgaatcatcaataagaacaaccgygttaagtattgatttatcctcctcttctggagaggaaggtgtactgactatttcaggtgtaagccttccaagtttttgcccttctccactaaaagccttgaacctcaatctagrttttatgtattcttgatcctgatggtcctccatatcccaattcacttggccaccatgaacaaggcactgaagctccagggggatctctcctcttttaacaaactccagaaattgagcatttgttggttcattgtaaggtctcaattctccatcawctaaactgaaaccattgctccacagtttaagcaaaatctgaacatcttgtagctgattttctccatgcatatattcagaccgcttacaaaaggaattacccaatctgtatcctccacctgtaaatgacattgaggtggtgtccgtgggctcttgaagactgcagctttaggtctgtcagacttggaagatttgcgcttcacttcatcttcatacagttcttccaaggccagtttatttcttgatatgtcatccctttggctgttttcaagtttctttgcaggttcttcacattaagttctgcaaatcctgtgcgctcggaggccacagcctggaagatctcctctcctgctcaccgagctcagggccgccgccctccgccatcttccgctggctgtatttgtctttttttttttatttttttcgacagggagtcttgttctgtcacccaggctgaagtgcagtggcgccatctcggctcactgcaacctccacctccaaggttcaagcgattctcctgcctcagcctcctgagcagctgggattacaggcatgcgccaccacacctagcaaatttttgtatttttagtagagacggggtttcaccatgttgaccaggctggtctcgaacccctgacctcaggtggttacccaccttggcctcccaaagtgctaggattacaggcgtgagcacctggcccagaaatttatttttaaaagtttaatagtttgttttattattgcttattgagtgatttagtaaatattctgtcagggttagcttgaaatacaaattttaaaatgtgtattttaaatgtgtatttctgaaaatggtatttcagaaatatgtatacattcacatggaaagatgttaattataatcttagtgacaaactcttagaacctgtaggaagaactcatttttgtttctatgtctacacacaagggtctggatggatttatagcagggtattaactgatgatttctgggtagataagatgccatgtggctaacattcttttgccttgttttgttttaataacattttttaaaaactcaatttctcaactgaagagaaaataagcaaataataccttttcaaattattttgaaagttcgtatttttcgtagcttttttcttactcttttttccgtatgactgttgcgtattcttagcaaataaaactccacaaaggcaagaaaaaacgttaacactcttatcaggcatatggtaaggattttaaatatctcagagatagggtatctattatcattttctaatacagcttcccttttcaacagtatagtctttttcagagtgaattttttttatttttattttattttattttatttttttgagtctgagtcttgttctgtcacccaggctggagtgtaatggtgtgatctcggctcactgcaacctcagcctctcaggttcaggcaattctcctgcctcagcctcctgaatagctgggattacaggcgcctgccaccacgcccagctaatttttctatttttagtagagacggggtttcaccatgttggccagtctggtctcgaactcctgacctcaagtgatccacccgcctcagcctcccaaagtgctgggattacaggcgtgatccaccaggtccagccatatttcagagtgaattttaagtggaaatttgctcgaacattaatgacagacagcatacttagttacctgtcttaattggtctcctttaacttgtattattaccattttttcgtttttccaatattattaaatatttattattaagtaatattttccaataatattaaataatatttgttggagaccccgtttgagattctgctcttactggaatgaatgcagtgtgcccccactttgtcatggcgtgtgactgataaacatcatgcatgttttcataaaatcataatacttctgagctggaaggaccttagaacagatgtatcactgccccttcattttcttatgcaaacattgcttttagcctacatgacattggaaagatggctgggctgaatgatctaatagattctttctagcttaaggtttcctgattctaggaaatttcacatgctctttcatgcttttactgttttttcagtgatgtacccttattgccatctggatatctcaaaatgcattacattaaaataagaatggagtttagttgttgtttatttttaatcagtacttcatgattcctatggtgtactcagaaagtgccaatatggaacaatgcatttgatgttttggattgagtgcaggaaattactcgaccaatcaaatatgagatttttttattggattttgaaagacctcatctcttaaaaaaatatttatgctagctgattacacaattgtggctagaatgtttatcctgtcacaaacatgcagtataaaacagagctaatttaaatgctcatgcattcttcacaaagttcatcttttttaaatctaatattatagaggaaaagtttttaatttttatttatttttattgttttgagataggatctcactttgtcacacaggctggagtgtagtggtgcaatcttggctcactgcagccttgaactcctgggctctatcgattctcctacctcaacctcatgagtagctgggactacagccaccacacccaacttttcatagagatgaggtctcaccacattgcccaggctggtctcaaactcctaggctgaagcaatctgcctcctttggcctcccaaagtgctgggattacaggcatgagccaccgtgcctggcctaaaaatctttaagatacatttttttagatttatttttgagatgttaacagcacattttttgtatttcaagaaaagtgacttgagtccgtcactaaatattttacaaattttaaacgtgttaagtaggccaggtgcagtggcacacacctgtaatcccagcactttgggatgctgaggcgggtggatcacttgaggtcaggagttcaagaccagcctggccaacgttgtgaaacctcatctctactaaaaatacaaaaattagccaggcgtggtggcgggcacctgtaatcccaggtactcaggatgctgagacaggagaaccccttgaacccaggaggtggaggttgcagtgagccaagatcgtggcactgcactccagcctgggcaacagagcaagaccctgtctcaaaaaaaataaaaagaaaagtataagcagtaataacaatagtaattataatattgtgatatattaatacgatatgtagcagagggggagcaggttcaacttgtgcatgaaaacagcttatatctttatcttttggggtaggtctcacagccacaggggagggagggcgggctttcctagcttggtaacagcacagatttacacctttgggagccgtgtctcggtgtctcatcaaatggctggttgtctgaggcagctttttgtggtattagtacagagatttgctaaattgtacgttgatcttcagtgtatcgctttttttttttttttttttttaagaaatgttttgaataagtaattgctttactgttctgtgtttttctcctattcctttttaggcttctctacagtttagcctttaatgccaggtttctgagacatctttggtttctaatatcttccatgtcaacacggatgatcacagggtatgtattatacagacttataaattgagctcaagggcacaggaagtggcagcctaatcaaaaatgttgccagaacctgtttttaagtcctgtttatactgggcttatttcatattagaaggtaagttccagatggtctcagttgcacaaaaagaaaaatcagtgtctaatcttaacagttacttatctgtatatattatagagagtatggttttatctgaaggtaagtttcctttaaacatcctagccatgtttttaaaaaagcagacatttggaaattgctttgctccatatgactttactcctcttttcacagtgaaaatacagatttgaagtaaattaaagactgctgcaaacattagaacagtgtagaagtttttaaacatttgttgaaataatttgatttttcttatttgaatcgtgtaatttaaaaaatatcatctttgacttaacatattttaactgagtatgtaataggtaggaatttcatacttaaaatccttcatggtaaactgacttagcctagtactctgttgttgaatttttcctctgccagaagtctaagccggccgggcgcggtggctcacgcctgtaattccagcactttgggaggccgaggccagcggatcacctgaggtcaggagttcaaaaccagcctggccaacatggtgaaaccccatctctactaaaaatacaaaaattagtcgggcatggtggtgcgtgcctgtaatcccagctacttgggaggctgaggcaggagaatcgcttaaacctggaaggcggaggttgcagtgagtcgagatcatgccactgcagtccagcctgggtgagagcaagacttcctctcaaaaaaaaagaaaaaaagaagtctatgccaatccccctgtgctgtaatcggaaaagatgaagtgtgtaattcagttaattggagactaaacttacaagatgcaactgtgtgtcatgctcatggtagtagtgataatagcagtcactgttactgactccatgctgtgaaccagctcattcggtggtgggaagacacatctcagttgtagggcaagagtgtagaaagtggtcttgttttctttttaggaacaagaagttagaagaaagaatttttggtgggttggggtggtatatctaaaatataaacacactcatctgcaatctaacttgctgtgtgcagtcataatgaaaactcttgttgagatttctggattttgagctttttcatgcaatatgtagagcaaaagatattcatatgttgttcagccaggcacagtcagcccctttatgatgggactggtgttcaaatcatctggacaaaacagttcatactaatgaaaggggaatgtcagtttctcaatattattacttcaaatttttcatttttttaattgaatcttaagtgaggaaaggggagttttactgctgccgctgtgactggtgaaactcataaaggttaagtgagttatcttgcatcaacagtgggtggctaaagcagagacaaaagactcctagaatgatttactgtcttgagaaattcttttctttcatttccaaaccaaaatacaagattttaagtatgttttgttgtgttttttttggtgcatttcagccacttctgactacgccagctttggttttcattagtgacaggtttgttttgggcagaagggaattgagaatcattaggacaggaaattatcgtttacccataagtgccccagcttagcaacagaaacactgtcatagttctgcctgataattgcttatttgtttatggcatttgtctcttgctaaggaaatggagtcatggtgtgtgaaagaaaagtgggatattgttaattatattaaattattaatactattttatgatagggtagttttacaaatcttattaaaagacagtttgataatttgaatgtctttttacttgtttattagaatgaagtccctcaagaaactgacagtgtattaatgcgttcccaatacagatactccttgaggtacaatggggctttgtcctgataaacccattgtaagttgaaaatatcataagttgaaatgcattcaagacacccagcttactgaggcctcacagcttagcctagcctacctaaaacgtgctcaaaatatgtgcattagcctacagctaggcaaaatcatcaaacactaggccaattttataataaagtgttgaatgtccatgtaatttattgaatattgtactgaaagcgtaaaaacagaatggtttatggatactcgaagtatggtttctactgaatgggaatcacctttgaccatcttgaagttgcaaaatcctaaactgaaccattgtaagtcaggcaccatctgtaaatgtctcatatttcctactgggaataaagtttaaaatgaaataactgattttctgaaactggcactcaatttaagtcaaaaatagtttaacagtaaggcttgcattgctaggacttacagctttagtgggcagaagtatcatcaggggagcgtgttaaaatgcatattctcctgagacgagattgcgccattgcactccagcctgggtaacaagagggaaactttgtttcaaaaaaaaaaaaaaaaaaaatttcagcttctctgttcctgccctaagacttgggttagaaaccctggagactgcaacctcacaagcttatcaggtaatcgaggtacagatggtttgggggcc

SEQ ID NO: 98195 - DNA, 142317 bp, Homo sapiens
cttgggggaaggaaaacaccaagtctagcctgctttagctatcctgtcccaattaagggtggaagcaggagggaactaagtccacagtccagaggcatagggtcattaaaagactgtgacctaatcgtagaactacagagcacttgttctcccccacaacttaccaccatgttatgaaagacctatttatagcagctcctttcacctggtatatcatgtccagctattaagaaaaaaattacataaaaggaaaaaaacagaatttgaagagacagagcaagcatcagaaccaggcatggcagagatattggaattatcagaccaggaatttaaaacaatgattaatatgctaagggtcttagtggataaagtagatagtatgcaagaacagatgtgcaatgtaagcagaggaatgaaaatcctgaaaaaaaaaaatgctagaagtgaaaaaaaaaaaaaaactgtaagagaaatgatgaatgcctttggtgggctcattagtagactgaaatggctgaggaaagaatctccaagttaaaggatctctcaacagaaaactccgaaactgaacagcaaagaaaacaaagattgaaaaaacagaacagggctgggcacggtggctcatgcctgtaatcccagcactttgggaggcccaggcgggcagatcacgaggtcaggagatcgagaccatcctggctaacacagtgaaaccccgtatttactaaaaaataacaaaaaaaaaattagccgggtgtggtggcgggcgcctgtagtcccagctactcgggaagctgaggcagaagaatggcgtgaacccgggaggcagaggttgcagtgagccaagatcacaccactgcactccagcctgggtgacagagcaagactccgtctcaaaaaaaaaaaaacaaaaaaaaaccacccagaacagaatattcagggactgtaggacaactacaaaaggtataatgtacatataatgggaatatcagaaggagaagcaagaaaaagacagaagaaatatttgaagcaatgaagatttttaaatccttcaaattggccgggtgtggtggctcacacctgtaattccagcactctgggagaccaaggtgggtagatcacctgaggtcaggaattcaagaccagcccccgccaacatagtgaaaccccgtctctactaaaaatacaaaaaattagttgggtgtggtggtgcacacctgtaatcccagctgctcgggaggctgaggcaggagaatcatttgaacccgagagacggaggctgcagtgagccaagattgtgccattacactccagctgggcgacagagtgagactccacctcaaaaagaaagaaagaaagaaagagagagagagagagggagagagaaagaaagaaggaaagaaagaggaagaaagaaagaaagagaaagaaagaaggaaagaaggaaagaaaggaaagaaaggaaagaaagaaagaaggaaagaaaaagaaagaaagaaagactgacaaaatacaaccatataaaatgctcaattaaaaccacaaacagctgggcgcagtggctcaggcctgtaatcccagcattttgggaggctgaagcaggaggatttcttgagcctaggaatctgataccagcctaaaaaataaagtgggtccctgtctctataaaaaatttaaaaattagctcggtgtggtggtgtacacctgtagtctcagccgctctagaggtttcagtgggaggatcacttgagcccaggagtttgaagccgccgtgagctatgatcacaccattaggttccagcctggattacagagcaagaccctgtctctctctctctctctctcacacacacacacacacacacacacacgcacacacacaggagaaaaactgtggcagatataaataggaacagagaacaagggcaacaaatagaaagcaataacaaatacggtagatattaatccaactttatcaataataactttgaacatcaatggtctaactgcaccaattaaaagagattgtcagagtggttcaaaatatgagacccaactctatgttatccacaaaatcccactttaaatgtaaacacgcatatagataaaaagtaaatgaatggagaaaaatacatcatgctaacaccaataaaaaaaagtaggattagctattttaatttcagacagagcagacttcaaaacaaggaaagtttgttggaataaagaagagcattatgtaatgataaggggtcaattctccaataagacagaacaatgcttaatgtgtacgtgcttaacaacagagcgtcaaattatataaggcaaaaaactgatggaactacaaggaaaaatatatgaatccattattatagtggaagatttcaacacccttgtatcagatatgaacagaaccagcaggcagaaaatcaataaggatgtaattgaactcaaccacaccatcagtcatcttgatatagttgacatctatagactattcaacaacaacagaataaacattcttcctaaacatgcaaggaacattcgccatgacagaccacattttgggccatagaagacacttttgtaaatttaaaattatataaagcatacaatatctactctcagaccacaatgaaactaaactagaaatcaataataggaagatagcgagaaaattctaaaatatgtcgagtttaaacaatacatttctaaataacatgagtcaaagaagaaatctcaagataaattttaaaatattttgagctgcaagaaaataaaaacataacttaccaaagtgtatgggaggaagcgaagtagtgtttagagggaaatttgtagcattgaatgtatatattagaaaagaagaaagacctaaaaatcaataatctaaacttctacctcaggaaactagaaaaagaagagcaaattaaatctaaagtaagcaaaagaagagaaataataaaagttaagcataaactggtaaaactgaaagtaaaaaaatcagtaatcacaccaaaagctggttctttgaaaagatcaatgaaatcaatgaacctcttagtcacgctaagaagagagaagacacaaattactaaaatcagaaataaaagaggggacatttctacagatgacatgaacattaaaaggataataacaaatgctgtgaacaactatatcccactaatttcataacctagataaaatggaaccccttgaaagacacaatctgccaaaactcacacaagaagaaatggacaatctgaataaacctatatatatcaaagacatcaagtaaataattaacccataattaagtacccaacccataataattccctggaataaactatgactatgtctgggttgttgtttgcttactctctggatggactgaggcttttccttgctagggagctataactccacacactgatttcccccaaactttaggaaaagtaaagagaactaacagagtcctaaaactaaaattatcaacagtttcgaaaaacaaatttcatggcccttcaaattgccattagtcatgattgattgatgacaataaatcaaccccttctgggacccacagattatctcttcttgaattaacagcctccccctacccatgtatttgaaaattttacttccaatcctacgttctaccattacagagtaatataaataaatgcttcatgagacttatgctacctgccgaattatccctagtaggttcaagtgcatttccaaaatacttacctaagcagactttgattgatctaaaacctggcaatttggtcctttggaaaaggaaccagaataaaactgtccttgggcactggtggaaagaaccttattgggtactgttagcaattgaggtagtggtttaaactccaaggtaatgatgttggatccatcgtttccaactaaaaagacataccactttcttctgattgctgggcatttactctaacagaagacataaaactaaagattttttaggaattcttcaggagctaatatctggagatgtggactgcttttgcccaagacaaagaaaccagactatttttctgtttttttctaattaattttctaatttttcagctctaccactaatcttgccttttattgtattttgacatcctccaatgaaccagtattggtagggcaattataagggtacttagataaaaacaaaaatgatctacaattgcttctgtagacacagggtctaggtatgttgcccaggctggtcaggaaaaaaatgatctacaaatttcaatgctttaactgttaaaagcaacaacttactaatgacttatcttaccactttttaaaattcattaacctaaaaaacataatttctccgaaaagagagactttaatcattatttgagtatgaaataaaattaagtatcgtttgaagggactatagtcgagcctcctaatcatgaaatcttggcttccttgagcttatctttccattcattacttcaacatttattagaagcctctatccatgtattaactcgatatttactaggagcttccatcaatttattgaattcatccatttattactaatatgtaccaaataatgttagacagtaggatatgaggacacagatctatggtgtttcagttttgtggatgcaggcaaataaactataaagggaagtaatatggtactgagtgctctgacacaggtatgaagagagaatgtggggataggtaattgtagccatttctttataatgtgtgtgcttggggtgagattcaggagaatactacggggtgaaaacattggtggaacagaaaaaaatttcacaaactaacagttgcagaatggctacagatcatatcggaaatgaaccacacacttctgtatctgtagtcctctgcgttgtgaaaagatcgacttttttcaaaacaggtcaaggaatttggttatgtcaaacacaaagttgcctcttttttccttctgacatggtaaaagaaaaaaaacaatcccataggatgtgtttggttggccatagtatattgaacttatcttaaccgtctcaaaacgcatgtcaaggacaccactgagacttctgagtaccatttaaaaaattgggtagtctggaagtgttctaaattggaccgtttggggtttctgttagggcaactttcccatttacatcttggaacacagccttttgaatatagcccttcgggattggcggggagaagggaccgcgatggaaaaagtcatcatccaaagaatgaagagggaggatccaacatttaggatattttattgacttgctaggcgcgtttaccttatcttcgtattaaccccattttcttcattaaccaattgatgctgtgagaagctatgtaacttgacgagcagtgcccagaactgttttttttttttttctggactcggtcttttccactcaaaaccaacaaaaaaccaaaactcgttcttttccacatcaaaagcaaacaaaaaaccccaaccccaaccccaagagccccactctttcaaaagggcttctccggatcactaagtcctagaggtctttggctaggcctgggtccgatctaaataggaaggtaattctagtgttccgcaaatccttgccgaattccatcccggccaaagcagggacccgggggagcctctggtcgcacccgagacagttcgttaaatactcagtgcacgtgctggggatggaagtgctgacccactgctcaggtacgcgcgaacctgacgccgcttggtgcgcgccgcggggtactgggtacgtgctccgcgcgcgcgcgcccggcaaagttccccgtacgtgcgccgtacgtgggcgcggtgccccagcgctcagcgtttcagcgagtgagtgggctccgtgcccagctgaagtctgggaggggcacttttccaggcggtcgcggctccccctggcggcggatgtgcctcgctggaggggcgcagtcaggcgttctccgcgggcagccggcggcggggccttgccttacagcgcggggtcctcggcggcctgggtggctactgcccctgctgctgtcgtaggcgaggacggctgttagtgctgctgctgttggttcgtcgcggcggcgaaggaggaggaggaagagggcgaggcgacaagagaagaaggaggcaggcgcggcggcagcggcggcgccccgagccggcggaggcgaggggggggaagatrgcggacgtgcttagcgtcctgygacagtacaacatccagaagaaggagattgtggtgaagggagacgaagtgatcttcggggagttctcctggcccaagaatgtgaagaccaactatgttgtttgggggtaagtccggcatggctgtggcccaggggtggcagggcagagttgggcgcccccaggcgacctctttcttaacccctccccccgtttcccctggggatgggataaaacgggtgttcggggaaaagaaagtttctctctagagcagaagttgcacttttagggtaaggaaagaaggggcggagctctagagcagttcatcacttaaaatttttgagaagcccaaaggaaaggtaccgtgggagtttctgacttttacagttaatttttatcagtaggtatgtgtaccagcgaagtgtgggactggtgcgcaagggatacctgaacataggtgcacaaaggagcacaccgtctggtgccgtagacgcctctttttgttctttattttttttttctcttttccaggctgctatgtaactatctccgctggtctttgcaactcctggtttatttcatctcctttcattgttggggtgggggtgattcctgtagaagagaaaagggaatcaaccctgaagttaggaccggaaagaaatttggtgaatttggaagagtcataaaagtctgtgttagagaggtcttcaggagttggtgaaatgagtgagctttacagatctaagaaatagatggtgcgtgtgatttttcggaagtgtattttaaagggaaatgtttgggaatgttggtccatgtgaagttttatcagtttaagtcattcaggaaaacttctagagacggctctaacagtcattaggggcctttttaatgatgtcactgtcattggtgcatcgcttctagaattagaaccttgagctacaacttccctactcattttgtttctttgaatggaagctttatgaagagtcgatgaaaaactagggaaatttagtttgttggttggtatttatttatttatttttgagagggagtcttgctctgtcgcccaggctggagtgcagtggcgcgatcttggctcactgcaatctttgcctcctgggttcaagtgattctcttgcctcagcctcctgagtagctgaggttgcaggcccccgccaccatggccggctaatttatgtagtttagtagagatgtggtttcaccgtgttggtcaggctggtctcgaactcctgacctcaaataatctgcccgcctccacttcccaaagtgcttggattacaggcgtgagccacggcgccctgcctattggttggttttaaaatttttttgtcttatgatttaattagctttataaaatgttgatcaaatgacattctgagtttctggtgttttaccctttcgaataatttgcataggtagaattacatgtggttggatttttagtgaatttttttttttttagacaatggctaaggagtacctagggtgtgaagtggttcaatctgaggattaaaaaaattcctaagactctggtttctacctcaaaggaggttaacttagtctgaatagaggagattaaacagataagttgatgtgaaatgctttctataagttgatgtgaaatgctttctacaatagcttttgaagacagcagtcacttctagttggggttatttaggagaaggttccatagaattgtctttggcaagttcacatccaacaaagttttcttgaatgaatgaatgaatgaacaaacaagctttaaagaataggtaggaattctctgggctaaatgatgggttaagtcttccaagatgagtgaactgtatacttaaaggctgtatgcttaaaggcataaagaactggaaagtaaatgtgttgacagcaatccagtgaagccagtgaaaaaggagtgcttatcacagtagattttaaactttttcaacagtttatcacaccaagaaattgtttttattttctatatgtgcacatgcacatggaaatatatacacatataaaacactaaacaatacttactcttctgattgtatgcagtgcattttatttttctgttcttttctattctgaaaatagaaaaaatatggttgttaactatttattgggtttcatagtacaataattgatggtgtgtggtttgaaatacattggtttagaggaaaaatgggactagaaggtagaaaagtaggtttagggctgattatagtggaccatattcagatggattcaaagatatagaaggggaaagtgtagaaggaagggtaggattggaatgaggtaatattagtacctgcattagagatcttgcaccgttagtagactacattgttttatcacaggtagaatagcattttggttttacattattggtctaatttgagggatgccataacagtcatacccctgaaattcagtgttgtgtttactgtaagaatgtgaaggatgttgttcagcagtatcttatttatcaagagccataggataaatttcttttacatttagcaccagtgataattgtgcttcttctaagcagtgtaattgttttctcttatggatcctcttcgatatggatctggttagatttctctattggtaaagcccagagcctaatttgggcctaattctaaaaagtttgtagtaccttagagtatgaattttttgtattttccctacttcttgctttttgtcattgccttcctttgtgtttcttttgtgatcatgacagtctattcattattagattttatactttttttttgttagctatgttaaactcattgttgttagcaaagttgtttatataaatgaatccagcctgaagagttgaattagaattgtcagtaaaaaaaatcttgccttaattatttcaggactggaaaggaaggccaacccagagagtactacacattggattccattttatttctacttaataacgtgcacctttctcatcctgtttatgtccgacgtgcagctgtaagtagaattcattttacttatctayctatttatcagttttatttttatttatttaagagacagggtctggccttgttgcccgggctagggtgcagtggtgtgatcatagctcattgcagcctcgaactcctaggctcaagtgatcttcccacctctgccttcaagtagccaggactgcaggcctgtgccaccgtatctggctaattttttttgttgttgttaaagatgagggggtcttgctgtgttgcctaggctggtcttgaactcctaccctcagtggatcctcctgcctcggcctcccgaagtgctgggattactggcatgaatcactgtgcctggccaataattcattttaaaactttttttttttttttgagataggatctggctctgttgcctaagctggagtgcagtggtgtgatctcggcttactgtaccctctacttctcgggctcaagccagcctcccacctcagtctcctgagaaactgggactataggcatggcccaccatgccgggctaatttttgtattaacacattttttttttttttggcttcgtggtagtaggtatcatttggaatggatagcttccctcatgggtttcaaatcaaaagaatgaaaggtttgtatgagtgtctccaggagagtcaaaattaggtgactgtgtgacttacacagactttttaatctgtgatattttttcatgtaaagtgtgggtaatgtttataacaaaggaagttttaaagggatttatagagccaggcttcttagtgcacgctggtaatcccagctacttgggactctaaggcggtagggttgcttgagcctaggagatcaagaccagcctgggcaacatagtgagatgccatctcaagaaaaagaaaacccgaaacgctaaaagtatttatagagatgtttagaaaaacttgtaagcctgtggaaggaccctgttacttcagaactctagtttaatctcaagaaaactttttttggttgtaaggattaagattagcagacatttaaaaaaattgtttcttaatcagttttgtgcagctgttttagtactctggagaagttcatttgtttttagttttgcttgctttctcagtgtttgaaaatttattactcagaggaaatatttggaaacaacttgaaaagaactratttcataaactatgatgatgagattcttcatctgtagggaagtatcattaagacctaaattatagcagtatattataattgataagtaaataagattcagagttatttggataggatagctgtatgacatggaaaagtactataatgcccacataaaatggcctaaaagatatttaatttttttaaatgagcttttccctcagattatttttggtagagttgaacataaaattttttgaagatataattgaaataattaaatgtctgcttttaatatttgttgcttttgcttacaagtatacacttaaaattaagtatgaaatgtatttataaataactactttttcccatttcttatagttcttaaaacaatcttcttaaacttttcttatagttcttaaaacaattttttaaaatatcactgtgtctgtcatcactggagctgctttttgagttacctaacaccgttgctggatcacattaagctgtgtgaaacttaacttctataactctaacctccctcccaactagaaatagttaaggtttctggcttatgtatctttcaaacaataacttgttgtctaaagcaactaaaagccaggtgtggtggtgcatgcctgtagtcccagcactttgggaggctgagctcaagtgggaggatcacttgagctcaggagttcaagaccaacctgggcaacatagggaaactttgttaaaacaaaaaataaaaaaaattagccaggcgtggtagtgtgcacctatactcccagctggctactcaaggggctgaggtgggaggatcacttgggcccaggaggttgaggctgcagtaagccatgatcacaccaatgcatctatcctgggtgatagagcaaagactctgtctcagggaaaaaaaaaaaatgtgtgtgtgtgtgtgtgtgtgtgtstgtgtgattatagcaattgagaaagtatcccgtcacttagtgggctttgtattaaaccataaggcttctgctttcctgagtaagaaatatatatttatgttacatatttaaaaaaataaaattagagtgggactacttgggaaaataaggggaaaaaaatagcaccagctccgtctttaaggttattttaactcagatctttaaaaactaaattaggtagttcttacagtgttttgttggatatattcattttagtgtaacaaagattcagatagttggcttagatttatagattctgtttttgggaaatggttgtgcatataactgatagctgtaattgttactgtggaccttgggacccttggttgcataagatttaactcatttttcataagtatttgccagattgaaagagtaggattctaaaattccaaaattctatgaatttgagattgttgtctcctaattactttgtgttatttgctctttcctgtgcgcagaccactcattttttttttttttttttttgagtgcagtggcgtgatctcggctcactgcaacctccgcctcctgggttcaagggattctcctgcctcagcctcccaagtagctagaattacaggcacacgccaccatgcctggctaatttttgtatttttagtagagacgggggttcaccacgttagccaggttggtcttgatttcctgacctcgcgatccgcccgcctcgacctcccaaagtgttgggattacaggcgtgagccactgcgtccggctgagcagaccactctgaaaacagattcctgatccttagttcctattttagtgtgagtagatgtaatctttttcagtggattgtgatgtgtacataactcagtagtgaccaaatgatgatgtaagttattagacttagaaacagtaacttaaaattaactcaaatcttttaactgtttatgatattccatatagactggtttatttttattttttatttttttttgagacagagtcttgctctgtcacccaggctggagtgcagtggcaggatcttggcttgccacagccttaccctcccgggctcaagttgtcttcctccttcagcctcctgagtagctgggagtatagctgggactgcaggcgcttgccaccatgcctggctaacttttatatttttgtagagttggagtttttccatgttgctcaggctggtctcgaactcctgggctccagcaatccacccactttggcctcccagagtgttaggattacaggcatgaaccaccatgcctggcctaggctggtttaaaagaatacaagcacaaaaaaactctgcactcaaatttttaaactcataaggagaaactaaaatttagcttgacctttttaaaataaaaggttaatttttaagtgattaaatacagtttatctaaatcattgaggagtcagtgcagaatgtttggtgcagtaaattataataagtattcaatataaggtcattggccaaagatactaaaggttcttgttgttacttcattgttacacatataaagtgacaaaggatttaaactgaaatctgttagctaccaatttttcttgcactgtttgtttgtgtttcagactgggtctcgcctcagtctcctgagtagctgggattataggcttctgccatcacgcccggctaattttttttttttttttttttttgagacagtgtctcactctgtcacccaggctggagtacagtggcgtgatctcggcttactgcaacctctgccgcccaggttcaagcgattctcttgcctcagcctcccgagtagcagggactgcaggtgcctgtcaccgcgcctagctaatttttgtagttttagtagagatggggttttaccatcttgctcaggctggtcttgaactcccgacctcatgatccacccgtctcgacctcccaaagtgctgggattacaggtgtgagccactgcgccctgcctaatttttgtgtttttagtagagatggagtttgaccatgttggccaggctggtcttgaactcatgacctcaagggatgcgcccgccttggcctcccgcagtgctgggattacaggtgtgggccactgtgcctggtcattgctttatttctaatgattattttctgtatatcttcctggaatttcaaaaagaaatttatttattwatttatttatttatttatttatttatttatttatttatttagagacggaatctctctatgttgcccaggccggagtgcagtggtgcagtctcggctcactgaaacgcctgtctccgcctcctgggttccagtgattctcctgcctcagcttcctgagcagctgggattacaagcatgcttcaccacacccagctaatttttgtctttttagtagagacggggtgttgccatgttggccaggctggtctttaactcctgacctcaggtgatccacccacctcagcctcccaaagtgctgggattctaggtgtgagccaccgcgcccagccaagaaaattattaaaagtaacgtgtttaatacattttcaggatttttattaggttcttttagcctagtcattttgttcaaatgtgatttaaaatatattgtatcaagatatattggaataaaattcagacattacatgttaatatcaagttgtaagaaaattattaaaagtaactaacatgtttaataaattttcaggatttttattaggttcttttagcctagtcattttttacaaatgtgatttaaaatacgttttttcaagatatgttggaataaaattcagacattacatgttaatatttattaagttgtgtatcattgttattcatttcatatctcatttaaaattttggttttagactgaaaatattcctgtggttagaagacctgatcgaaaagatctacttggatatctcaatggtgaagcgtgtgagtactttttaaattgttcccagtcttaaacagacattgtttcttttttcccctatgaaataatgattagagggaagagaatttgtatttccaccaaaaaattaacctaccttcatttttgtccatgtgctcacctttttcttatacagtggatgcactgtctttgcccttatggccagtcaccccttccttgtgtgtggattccatctcctttcacagtctcaaagactttgtcttcgtaaattgttgtttctctgacatcatcagttttctactttcttctggatcattcccttttagaatacctacagtaagatttcatgtttaaaaaatgtttttgatcccacattcctactgtctactgcttcatttatctcctccctgatactgtaaaatattctgcaagagttcgtgtggtatcattgcttcttttttacctttgtttctttcttgaagccactctagtctggccttcatccttaccatcccactaaaatcactccttgtaaggtcaaaactgatttaaggattgctacatcctttggtctcttgtaccatacttgacctctcaacagcatttgatactgttgaccactcatttttgaaagcctttcttcatttggcatttggaacaccagcctcttggttctctttctactcgttgttcacctctcagtttattttggttacttctgtacctgacctctaattcttgaagtttccaagacttgatctttttttttatcttttcttttaacctgtattctctaggtgatctctttcagttttatggctcagatatcatatatatgctgatgaaatttcaagtgtttttttcagcattgatttctttcagggcaccagatttataaatttactgtcaacatgtttccttgaatgttgaataggcatctgaaatttaacactgaaaatggaatgcctgattccctctttcccttctgccctcacacagaacaaaaacaagtctgttgttttctcagtgttcccactttagtaaggggtagtgagacgctcttcctgcagttgcttaggccagaactttggtgacatctttgtcacatctcacatccattctatcaacaagttgtttttttctctttttaaaagtatgacaacttcttaccattctacctgccctatttcatccttgctttttagattattgtatagcttcctcacaggtccccactctttatttcctatagtgtagtcttagcaatagagtgtcctgcttttgaaaaagtatataaacttgattgtgtcactcacctgtggcttcccatcactcttagaataaaactcatacttgttaccctggcagtcatcttgcctctgcctaaatctctgtgactccatcttctaccattcttcctttgctcataacagtcagtctttttggtcttttagctatgctaatcttagcacctttgcactttctctttctatcttgagttgtctttctctacattatcacatggctcacttgcttactatttcatttagatctgtgctcaagtgtttttccaaatgttgttccatcagagaagacttctctgaccactcttatcgaaaatatagtattcctttcctccttctgtggtttttatatagtgccatcctgatttatttttcaccagatctcatacattgacctgaaattatatatctgtttatgtacatagtgtctgtctttcccattagaaggtaaatcctaaggggacagacagttgtttgtcttgttaaatacccagcatttacaatagtggtgcatggtaggttcttaactgaataaatgagtaattattaatttactctcttacagagtacaagtacattgatataatacaactattgggtcttactttgctgagtgtgacgtgtagtacctttaagtcattaacagctgtcttgtcatgcatggctttaagcagtaagattgatttccacagagaatcttgtgtataatggaaagatcatcattaggaatgctttcttcctatgctgtcctcattcaataaggacttattacgtgcttattcttaaaaggcattatgctgggtgttgtgcaaaatgccaaatccctgtcttaaacatgtaaacatgtttactgtcatgcaagggagactggatacacaaaagtttagaacccagcagtattaaagagggagtctcaattctgtgaagaggatggagttggggaggatagaagaaacttttttttttctttcagagatggggtctcgctacattgttcaggctggtcttgaactcttgggctcaagcagtcctcctcccttggcctcccaaagtgttgggattgcaggcatgagccactgtgcccagccattttttttttttttaatcaaagcaaatttgattctttggagcagtgtttctctaactttttaagtgatgagaatcatatggtttgaaaatagtggttttttttgtttgtttgtttttggcttcagaagatgtgatataaggtctaagattctctattcttaagcatcgcaggtgagcctgataaataggctagttttggggaagcactttagagcaaatgatttttctttttagaatcaaaagtagagttgccctttatccatctatgtcatttcctgtagatttttttttttttttttttttttgagaaggaatcttgctctgtcgccccaggctggagtgcagtggcgcgatcttggctcactgcaagctccgcctcccgggtgcatgccattcttctgcctcagcctcctgagtagctgggactacaggcgcctgccaccacgcctggctaactttttgtatttttagtagagaccgggtttcactgtgttagccaggatggtatctatctcctgaccttgtgatctgcctgcctcggcctcccaaagtgctgggattacaggtgtgagccaccgcgcctggcagtttttataggacagagttagtcactaagcgtattgctttgccactttttaaaaactgttaatttaatagtttaatgaaaaggttgagcaaatattaagaccgtattcttaggaagacataatagctaaagatgttggttcttaatttatacatttaacatggtctcaataagaatctctagtttttcttgaggtaggaatagaactagacaaggtgattctaaagttcattggcaaaagtaagcatcctaaaaatttrtagaagagcattgagaaaaggctagtcattctggagaacttaaaaccctgataatttgaaacaactaaatgactagatacactaataaaaaaactttatctgttaggttagaaatctatatgtgaatttaacatatgattaaagagacatgtcaagtcaatgggaggaaggtgggattattcagttacaagctgataaaagtagtaaagttctgtattataaaaaacaaaagacatgacaaactgggaaaatatgttaatatttcaactcatcacagataaagggctaatctcactaatatacgaagggtcctggaactttatgcataaaagaccaaacactctatggattatgtcataaaattcacagaaaaggtgataaaatcatgaaaaatgcttaatatcatttataataagagaattgcaaatttaaactatacggagataggatttttttttttttaacctgatagaaaaaaatctgtaagtttgataatatgctctggtgaagcaatgagaaaacagatattctactatattgttggttataatgttaatcagtgcacccctacacccccattgaagaattggcagcagtctaacattacaaatttaacatagaaatcctgtgtctggaactttatcctagaggtatatttcgtttagcttttttaccagttgtgaataactaaaaattacatgtgtagggtgaatgctaactttaaaaaaacttgccattatatataatatctatatgtacatttatatatttatgaaaacttgtgactttatattaatatattattgtgccattgttcgtaacaacagaagactaaaattgaacagctcatcaacagggacctagttaaataaattgtagttaggccatacagtagagtactcagtagctataaaaaaatggttaaagagggccgggcacagtggctcacacctgtaatcccagcactttgggaggccgaggcgggcggatcacgaggtcaggagatcgagaccattctggctaacatggtgaaaccycgtctctactaaaaatacaaaaaaattagccgggcgtggtggcatgtgcctgtagtcccagctactcgggaggctgaggcaggaaaatggcgtgaacccgggaggtggagcttgcagtaagccaggatcgccactgcactccagcctgggtgacagagcgagactccgtctcaaaaaaaaagtaaaggaaatgctctacttactgatatggagggttatgggagataagttgttaggtaaaaaagaaaacagggttcagaacagtatgtttagtatgtcaccttttgtattaaaaagggtaaaaataattttgtatttctcatatctacagaaagaaactctagaaggatatataagagactagttggctgcatagggtggtgggaactaggtgaatggggacaggtatacccctttttgttgagccattcaaaaattaagtaatttaattttaaaaataatttagttttttaccagttgtgaataactaaaaattgcatgtttagggtgaatgctaacttaaaaaaaatcttgtccatatatatgtgtgtgtgtatatatatatttatgtgtttacttacacctttttaggtgtctgtgttatgacattggagcatatactttgaagcaactaatttcagtcagatcatctcagtaatttgtaagctaaattgttaaaaatagtttgtcctcttagagactttctagtatagattaatcttttaaataacatgtttttgcagagctgctttaaaactgaattttttacctagagaaaatcaccatatagaagtatataaaaaacctaaagcatttcacttgtaataatatccaatatatatgttgaaatagtaatccttacgtgaatctttttatgtcttcagcaacatcggcaagtatagacagaagcgctcccttagaaataggtcttcagcgatctactcaaggtatgtcttgttgcatatttatattgaactttcagaagcccattccaaaactacacatttatttacttctctttcttttatagtcaaacgagctgcagatgaagttttagcagaagcaaagaaaccacgaattgaggtaaagaaactgtattttaaacaattttatttatattgttattgaaattgggattctttagtaacaaggattctttgattgcagtaacctgaggagctttttttctgraaaaatttttgtggtagaaagaacaattgattaataagtagctcaagctatagttttagctctctcacatgcaagctatgtgagggacaaatcattttattttctttgcttttatattcttatggatgaacctattggctcaagggtcagaattctttttcctttctgttcttttttttttttttttttgaggcagaatctttctctgtcacccaggctggagtccagtggtatgatcatagcttattgtagcctcgacctccggggtttaagtgatccccccacctcagcctcccgagtagttgggactgcaggtgcctgccaccatgcccagttaatttttgattttttttttaatagagacagggttttccgtgttggccaggctgcagaattctttctttatgaaaggccagatagtaaatattttaggccttatgggccatacagtttatgttgcaactattttactttaatattgtagtgtgaaagcactcatagacaatacataaatgaacagatgtggctatgtttctataaaaaacttcagaaaacagatggcgggccagaattggtctttgggatgtagtttgcctacctttggaacaatgtgttatgggtgcttgctttactgctcagagctgtgaacatgaagtacttactactttaatgtaatcttaattaaggatattctgagaaatggatctgatatttttaagagataatgatgataattgattcattgttattgctctatgctatgtgttattctaagtactttatatgtattaactcatgtaatcgtatttgctcatagatgatatgcatagtactcccagaactcattaagttggtagtactgtgcatatcatctatgagcgaataggctcagacagagtgagttcctgaggtttgaagaaccagttggaaccttggcagtctggtttctagccattctgctatactgggtataaattttgtggcagtaaaactgaatatttccccttatatgaaaggagattgtgacctgtggtaaacaatgtgtatgaatttagggataccatttatttgatctcaaattcctggcctcaagcattctgcccacctcggcctcccgaagtgctgggattactgccatgagccactgcgcccagctcaagggatgccatttatttgaaacaatctgaacatcacagtctaattatttgaaaaaattcaacatggcagaagtcctagtttcctgggattccagtaacttaaaaaatcagcaggaaatgcataatacattttttttccaaatcatttgtggggttgaaatgtgttacataaacagctatggttttcaacattggttttcagttcagtgtatgtcttttgaggatctataaggaactgtgctaggaaagagaaactgagggtagagtttctgatttgataaaaatctaggctgcagttatctttaaaatcagtagtaaggaatttgagaaatctgggctatatctttattgcaaatggaaaaagttggatgcatttgccaaaatatttttgcatttatttcagctgatttattcattttaagatttttacatgatagattaataataggacatgaattggagcccaacatctttttggatctctagagtatgctgatgctttttatacagttttgtatttcattagtcatagtcattgactctggtcctcagttttgttatttgttgaatgtggacattaaactggatcagggttaccagattttgttttgtttttaaccaacagcttttcagactaaattttacttgacatcataatatgtgaattagataaaagctgagctaccagggttgaatttcagacaaaatcttgaagtggcccatgaggcgtttagttggaagcttctaacgttctaatgaccatcctttgaaaacctttaaggttttccttagagcattttgattagtgctaatggattcaggacctgtagcaacagatgaaaaaaaaatggagataccaaaatgaaattgttgactctggtgaaggcttgtcataacatttggttattaactttctcaaaaagatgaatttatttgttgtgtctttctgaagaaagtcagctatgatatgggaagagcacttaatcataaagaaaaaagtagctaagcaagtttttcctaagcttttcgatgattccagtcttaagattcaacatatatttattgttattatctttacgtagccaaaagtagtcttgaagttggcctaaagacactgatacctagaattgtagaggtaggaaatttggtaaggaaaagttacatgtagcgttttttcttcctaaaagttcaataaaaattttaaatgcattaaccagtggttatttccaggatgaagagtgtgtgcgccttgataaagagagattggctgcccgtttggagggtcacaaagaagggattgtacagactgaacagattaggtaagaattctttttaagtagaaagtaggtagtttagatatatgtaaaagtataaggaaaaggaatattaaaatgctctccacatttacatttacctcttggattcattttatgcctctttgctcttaagttcgtaagaacatgtgtggggattggaagtcattgtgtttatcatgctttttgaaaagtcttcttgtttctattaccatgttggtctttctttttaaaaattgcgttataagctgagaaattcattttatgttacctcttattgattacttacaccagaagtcagcaagctttttctggaaagtgccacatgttaaatatttttagctttgaaggtaatatggtctcttgaaactactgaacttttgtggtgtrgggaaagcagccatagacaatacatgaatggatgggcatagtttcttcactttttaaaaatgttttcatttttctggattccagctactcaaactctacttgaagttgtttgacagctcacttacattcttttcttttttttggattcttttctatctgtctgtttatattcttttttgaattatttttggatagtttctgttgtactgaactttaattttttttttttttttttggagacggagtttcactttttcacccaggctagagtgcagtggtgcgatcttggctcactgcaacctctgtcttctggtttcaagcgattctcctgcctcagcttcccgagtagctgggattacaggcgcctgccaccacgccgggctaatttttatacttttagtagagatgatgttttcaccatgttggccaggctggtctcaaactcctgaactcgtgatctgtccgccttggcctcccaaagtgctgggattacaggcgtgagccaccgcgcctggctgaactttagtatttttttctttgacagttcacttacattcttctctttttttgaattaactttatatctgttaaattctttcttgagtcctttttggatagtttctgttgtgttttcaactttacttaattttttttatgtaattccatgcatgtttagtctccagcattgtagttttcatctgaagtttgttttgctctttttttttttgagacggagtttcgctcttgtgacccaggctggagtgcagtggcgtgatctcggctcactgcaacctctgcctcccgggttcaagtgattctcctgcctcagcctcccgagtagctgggattacaggtgcatgccaccacgcccagctaatttttgcatgttttgctcttttttaaaaaacatacctacttcatcttttcatttagcttgttgaaatatagaacgtagttcttgtaattattttcatgccttgagattgattgatatttctcctcgttctgctttattacatgtctgctttattacattttcctgctttattacatatcatgtgatctttgcacaccaaacatcatatatactttttaccttgttgagggctagatattgttatatctccccacatcatctttagcttttttttgggacacagttaaatcccttggaaacagtttgttacttttgggtcttgattttaatttatctgaacattggtcagctagggtaattattccccacccactgagggaagaccattctgagtacctaatacttcatgaacgtgaggtttcattctggctagtggaacaggcactattcttcactttgtgtgaacactaggcattattctgtctaattcacttgggtggttctttattcaaccttacatagtttcttcatatttgtgctagtcagaattctgctggggtacgtgagggggatcttctgtgcagttctcaggtcttctgacctatgaattctaaacaccttggtcttgctgtagtctcagctccatttcttcttatcagagaatccgctcagctctacatgggttctcctcccaaggccatgtcttggaaacttacaggcaataagctgaggcagtcatagggcttaccttgtttgtttctcatttgttagggaattactgtccttcattgcttgatatctagcatctagtaaaccattgttttatgtattttgactggttatttaaaggctggagggttagtctagtctctggtacttcatcttggctgtaagtaaaaattctatgtttcaaagtccattggaggcttgattatagtttggagaagtacggtagtcccccatccaccctctggggatatgttccaagacctccagtggatgcctgaaacctcggatagtcctgaactctagccaaggagtgccaaggtcaccttgtcgtttaagggaagcactttggcagtggcatatgcgaattgctggcatcactactcttgtgttttggggccattgttaggtaaaataagggctacttgaacataagtactttaatgctgccatagtcgatctgataaccgagatggctattaagcgactaacaggcagtgtatacagtatggatacattggacaaagggatcattcgtgtccggatatcccaggcaggtgtcccaggcaggacagtacaagatttcagcaggctactcagcacggcacataatttaaaacttacgaattatttatttctggaattttccatttaatattttggactgtggttgatagcaggtaactgaaactgtggaaagccaaacaggagtactgtatttgaatttggcttaaggtatgctggtgtgctttagattttaagggaaatttgcacagtattacacaaaatgcatcaaatgccagatgcatatgagcactactataaagtaccttcatacctaatctgaataaaattagaatactgtataatactactgtatttaaacctgcaggaatttttgtcctttttctagattttgtgtaaacatatttcaagattttcatcttgtgactaaagtaatatttttgtctactgttattaaggtacccaaacactttttaattctttttctcattttacatgataaaagacactttgcttaagattatcattttatgacgtatactttcagtgttgtctttttttatatttctgcaaacatagtctctttcaactattttgcctatttgaaaatcaagaaaagggaagaaaaagaaaactgtataaaatatggctttatcttccagagattaaaggagtatgtttttgtggcatataaaagcctgtcacttaaattatgttctgcactatggcatacaagtttgaaaccttgaaataaatttcaaggaaaacctaggctttgaactttctgtaggatggattttttacctccttccaaagtggcatctgtgtgtgtgtttaatttccatagatacagaaaatataaagaaaagcacctatattaatgagtcctgcttttttgtggggaagagatgaaaaaccatgaagaattttgttgtattgatacttctaagaaattactaatttgctcttagagtaatatctcgacatgaattctttataaaaattttatataattgcagaatagcaagtcagtcttacagataagaaaaccttaattattgccatgtaagtgtttttaccagaaatttataaatgtaacaaaatatatttatgatacactccaggaatgcctgctgtgaaaatttaaaaaagaaattgcttttaggtctttgtctgaagctatgtcagtggaaaaaattgctgcaatcaaagccaaaattatggctaagaaaagatctactatcaagactgatctagatgatgacataactgcccttaaacagaggagttttgtggatgctgaggtagatgtgacccgagatattgtcagcagagagagagtatggaggacacgaacaactatcttacaaagcacaggaaaggtaattaaaatattttactcattcattggagtgagagagagagagagagagtgcgtttaatctgtggttatagaattggttaaactttgcttttaggtggaagtttcaagttttatctctttgaaagctcagtaataatgtagatttccagatggycatttttaccattccattcttgaatatggttgttagacatcagagatgctgatgaaaaagtaggaatcaaaatgcaagctccttcacagatcatttgcaaatcaaagaatggcccagttttcctgttgagtcatttttgcttaaacctaataaatggaataatattgatggcaagttctctggttattaatgccatcattatttttttttctcacatggtagagaacttatggaaatctgtagcaaacatttattgagtatattttacacactatattctgttgtgtgggtatagcagttttttcattagctccctattaatggaaattgttttcttttgtttttgctccaaagattgtgcagtttttctccttttctctgtccttcctttcttctctctgcccccctcctcctttctctctttctcctcccgtttccctctcttcctccttccctcacttccttttccctattatgaataatgcattagaaaacattgttgtacacgtacctttgtgtgtttgtgtgtatatagccaaaggattaattcttggaaacaaattgctggttaaaggagatatgcactttatattttgaaagataaaaatctgaaatactgaatgtccagtattttcatggatctccaaaaagaggatgcatttatcctgatttatgtactttcatttgtcttttcctctttagtgcctcaattttctcttaaatgttttctccactgatgcacagttgttaataatgatgatctagtaagaatgttgaagtgtgcaaagttacttgtgaaactgaaatttaacattgttttaggcaaattggttttgattgtagaattttgggattttagtcttaaatttacattgctattttagtagaaataaagctatgaaaagagtatatgaagaaaagaatcatttctttttcttttgtactttgactttgttttacaaagtacctaaggttgagattaagaatcattctccagagcttagaattatagagaaatctgaggatgtgagtaaacttccatttttgctatttacaacaaaatgatttgttgatactgattttcactgtctagcatggctaatacttgagaaatattgtgacttacgttgatccaccagtgttcattaaaataaaaaaatctcaaactcatagtagaagaataaaaacaggtgatataccctacctaacttttagaccaaacattactttttcaagtaactgaagtgaacagttttctttgagctctaggtggcaggattgtaccatcatttctaaacttactgatttaatattgttggtaccactatatcttttaaaaaaataagttaataaaagaattgttttgtagctaggcttgcctgagtattattagtattaaaaaataaaaaatactttgatagtttttctgtgtattgtttttatctggtaaactctaaaaatactcttaggcaggtgagaataaaaaaatacccttaggtacttaaagccctgtgggttttagatagaccttcattattactagttatcagggctttcttattttttgagtttcaggaacaaaagtcaggttcaagattcatgagaggctgggtgcagcggctcatgccagtaatcccagcactttgggaagtcgaggtgggtggaccagttgaggtcaggagttagattccagcctggccaacatggtgaaaccctgtctctactaaaaatacaaaaattagtggggcatggtggcatgcgcttgtaatcacagctacctgggaggctgagtgaggagaattgcttgaacctgtgaggtggaggttgttgtgagctaagattgtgccattgcactctagcctgggtgacagagtgagactctgtctcaccaaaaaaaaaaaaaaaaaaaaaaaaaaaatttcatgagaggtataaatatgttattatttttgcaaggaccccaaataaagcaacttgattttataatgccgtttagaaaacacacctttaaacttacataaattaggtgaaaggtttatacgatctgaagagaaacatgtataaacttatataaattagtatatgttcatcattgaaaaactaataaaaaggagatcactagaaggaagatgttaatcacctgtaattctgctgcatagtagattgatgataatattgattaattcttctttatttttaaagtagtgagatttgcttttcatatattttcaactattttttataataagactaagattttatgtgcatttttcattgtattgacctttgcagtgatggtacacaatcaatggttggtaaaactgctggtcatggtgtgaatcaaggcaatggcacttagccattgtgttctttactcacgaatgtccttgatgacgtttttaaaatttatgaattttgttaaatcttgaccctcaagtgtgtctttttattattttgtgtgacgaaattggaatgtagaagcacttctgcaaacatgatggttattctcatcaagagacttgtgccgttgtgtgaagtatgaactgaatcaacatttttttatttaagtaactgttattcagacttggttatttggcagacttttttttttttttttaaatgaaggaaataaatttgttccttgaaggaaagcaactgatagtatttgttgccaatgataaaatgacagctttcgtgagaaaatcagaattttgggaagtttctttatgctgctgtcaccataacacttttctaattctttttccacccataagtaaagaaacaagcaattttctaattcttaaagtcttctagtgagtcttttacaaataatattaacaagtataatttgttgatactgtataattaaccatgttaatatttggaaaatgtgcataattcagtgattgatattttccagatgaccagtgaatgctgtcacaaatcatgcatgggtagaaagttcatttaaagtgcaaggagactgatggattttaaagtacctatgcaaaaagtttatggatgtggtttccatgttgcattaacctttaagaaccatttattgcattttggtatgatatcaaagaagactatccacagttacctgaaaaaccttttccagctgtttgtgtgaggatagattctctcggtattctttgaccaaataagatagcacatttatgaccaaataagaaagcacaataaatgtcgaatgtagaagctgatctgagaatacagctgtcttctattaagccagagattaaggaaatttgcaaaaatttaaaacctgccactctttcttgtcattacttttatgcattttgaaaagtgatttttcatgaaatatgctattatgtttacatggaatcttgttttcttatttttaaaagaatttaaatttttttcaattttaatctttaattcaatagatactgtagttcacacaaacttaaagctctttggggtgctcagtaatttgtaagagtgcaaaggggtcctgagacttatatttgctgctccagagaattataggaactagttagcactgcaactggtatagtgataatagttatgtttcaagcagcctctcattttatatacatatttatttgtatagtatttatttaacatctacaaactaggcaagtgctaaacactgaccagaggtgcattggtcctagctctcacagaagttatactcttcagcagaagtcaatattaaataagcggtaattattacgtacattatagggcagacacccagcaagggcagttaacttagttgagagtaaagaggagtgatacctaaagaacaaaaactagtgagggaggtgagaggggtaaggtgggaagagtggtcccagccaaggaaacagaatgccttgtttaaagaagagaaattatgttgtatttgaggttcatgagggcagtgaccatgtcttttttgatcatcattgtacccaagtgccaagcaaggtgtttggcttagagtagattcttactacatattccttcaaatgttaagtgattgataggcagcataagaagagccccaaaggaactgtcagacattaggggtaaaaccaagagagagtagcatctcagaggccaagtatctttgtctgttttgtgctgctgtggatatcacagactgggtaatttatgaagacaagaaatktatttctcatatttctgtaggctgggaaatccaagagcatagcagtggcatctggtgagggtcatttcatggcagaaggcagaagcaagcaagcaagcaagcaagcaagcaagcaagcaagcaagcaaatgagacacagagagaaatggggccaaacttactctttcgggaatccragcccacttttgcaataacaacattaatccattcgtaagggtggagccctatgacctacctaatcacctcctaaaggctccacctcctaatactattagaatggaataaaatttcaacatgggttttagaggagacattcaatccatagcatgaaggaagaatatttcatgaaggaaagagtcgtcagattagttagctgtgttgacttttgatcagcatgtaattgcattgtgagttgaagagcatttgtacttgtactttccaacttacacatctttgaaaagtgtacattgacttctgatagtatctcaaaactcatatgtagcaatctgaaattagcactggagtttaacgggaggatgtagtagttgattatttttttttctgaactagaagcctcttttgacaaatgtatttatattttatttagatttttttttttagacggattcttgctctgtctcccagggtggagtgcagtggcgctatcacggctcactgcaagctccacctgctggattcacgccattctcctgcctcagcctcccaagtagctgacactataggtgtccaccaccacgcccagctaattttttgtagttttggtagagacgggatttcaccgtgttagccagaatggcctcaatctcctgacctcatgatccacctgcctctgcctcccaaagtgctgggattacagtcacgagccaccgtgcccggccttatttagattttaacttgctttctggttatatatttgaacagatgcagaatatgaatacatttgtagcagttttttttttcttttttttttttgagatggagtctcgttctattgcccaggctggagtgcagtggcatgatcttggctcactgcaaactccgcctcccgtgttcacaccatattcctgcctcagcctcccgagtagctgggactacaggcacctgccaccacgcccagccaattttttgtatttttagtagagacggggtttcacctgtgttagccagggtggtctccatctcctgacctcgtgatctgcctgccttggcctcccgaatgtagcagtttaagtaaaatgaaaatgatgaaatgaataccatgggatttacaataatcagtctctggatcaatatcttagtagtggttggtttttacatatgtgtataataatgataccttatgacatatgtagtagggaagaatcgatagtaagataacttagtcttaaattatcaactaaatttactattgtatatttaaagtgggcttaattaaaatccatttatattttagaatttttccaagaacatttttgcaattcttcaatctgtaaaagccagagaagaagggcgtgcacctgaacagcgacctgccccaaatgcagcacctgtggtaagaatgctttactgctttacagtagatttaatgaagttgccacttatattgcagtgtagtaacgttgaagacatcttcacattttaaaatcagtggattctaaaccttttgctcctttagcatatctgaaagatgtgaaagccctccccaacattaaaagttacttacttcagcagtaattcttaactggagcagtaattcttaatatacctgggtcagagtctgaaaaaggttaattagggaaagccctctatttattttaggtaaactgtggctggcctactcattgttgcttgggacaattgctaaccattgttaataacataaatccctgttaactcccagtttggggttctttttggcattgtatctattacatcttggtgaatgtatttctcttgatcaccagccatgctgtcctttaattgtacctccatttcagctgctctgagagttgactgccttctctttgaagtgccacttaagaccctcccaaagtaaatttcacgtatgacatatagcctatatttaaattcaaacatcctctaattttgttgaaaatccttccagctattttcatatgattcaacaaaggaataaaacatacaaatgaaattgtttctattttctgcaatagaaaatagaagattctataaatagaaaatttataattttttttttttttttttttttttttgagacagtctcactctgttgcccaggctggagtcagtggcacgatcttggctcactgcaacctccgcctcctgggttcaagcgattcttctgcctcagcctcccaagtagccaggattacaggcgcatgccaccccacccagctaatttttgtatttttagtagagatggggtttcgtcctgttcaagaccaggccggtcttgaacttctgacctcaggtgatctgcccacctyggccttccagaaaaccttctatatttttaaaactctgtttcaagttttaaaaggcacattgaaatgtattagagtactaatacagcctttgcaactactttgtagtagttttatttgctcatgaaattgttggaatttaacttttaaagatggtaggcttttgttgataattagataaatacttttagttgactctccatcaagtacttaagtgccttctattaggaagtctgctaatgatcttgagatacaatagtgagaaagattatagtccctactttctttgagcttatagtctaatacagcagtccccaacctttttggcaccagggaccagtttcgtagaagacagttttttcatggaccagggggaggtttttggaatgaaactgttccacctcagatcctcagggtttagttagattctcaaacgaccatgtaacctagatctctcagcagttccctacttattagatgtttttttttttttaaagtagtggagtaagagctatgatggcaaagcacaaggtacttagaattatgaatttgttgacattttgaatagctgttgataggaaacatgtcaaaccttaaaacagttttaccatttgtgactgattattctttctgtatatttatataatcgttagaatacttgaaggttttaatgtttggcatttgactatagaagtatatgcctagtgtgaagtaagcatatacttatcattcttgataggtattgataagtatattttatttggcataatatttgatatagaatcctatcataataaaatgaaaagtatttcagtcttcatgaattttccaagtagctttgggaatattcctaaatatgtgtttttagtttgttaaacattgtgagttttgataaagtatttgtgattaaataatgcatcattagactgacagccttttctaattatttaaaaaaaatacgtcttcagtcttactctgtttataatggattaatcatcatggctttcatgtttatttaaggattaataatttgggtttttttgttttgttaaaacaatcataattgcagggaagagtattatgtcgtaaaggtactttagccaggtatggtggctcatgcctgtaatcttagcactttgcgagactgaggtcgatcacctgaggctgggattcaaaaccagcttgagcagcatggtgaaactttgtctttataaaaaaaaaaaaattagctgagtgtggtggtgcatgcctgtggtcccagctacttggaaggctgaggtgggaggatcacttgggcccaggaggtcttggctgcagtgagccatggtcatgctactgcactccagcacattaaataagtgacatttaaaaatattaacaagtaactcataattaatttttttacaggatcccactttgcgcaccaaacagcctatcccagctgcctataacagatacgatcaggaaagattcaaaggaaaagaaggcaagttgcttaattcttatcttccccttagtgtggttgtgttgaacttgagaggcagtgtggcctgatgtttaagggtaagggttggcaaagtaatgtctacagaccagatcttacccactgcaatttttcttaaataacattttgttgggacacaaccacactcattcatttatgtattttatatatggctgctttggctttgtgacatcagtattgaattgtttcagtagagactgtgtagcctacaaagcctaaaaatattatctggccctttacagaaaaaaagttggccaacccctggttaatagcatggattctggatccagatagcttatgtcgtagtaactttttgtgtgaattttaatgttactttaactgcattctgccttagttttctcctgtgtataattaaaatgttattatactgcctgtctcttaccattattgtgagtattggactggttaataaatattgagttcccagaatagtatctgatatgtaagtaaattatctataaatgtttgctgttattcatactgcttttgtttttatataatttaaagtagagattctatatgttaagtcatttttcccaagttataaatgtgtatgtacattgagaacttggaaacaaattttgagcaatgatgggaggacttactttgtgatagtctacgtggtattctggctaatgcaataacaccatttctgcagttgtgaggtgagactaatgtcagtgtaacttcctcttgggatcttcattcatcatgacttgattcatgaaaatattaggtagaagcaactggaagttaatgatatttttaagcataatctgaaatcttcatttaagttttttttaaatgatatgttgccttgatgcaatgaattttgtgtgctgacttcattcagttgttaaaggcatgcactggatatgtgccatagaaagactacgtccattctttcattataatattcaatgtttttcttgaggaatgaattatataaagcagaggttgrtaaattacagcccccaaactaaatatmaccctccatgggccaaattgggttgcccccaattgatcacatatattgtttattctgcttttgcactaaaatacagaattgggcagttgtgacagattttaaggcttgcaatgtgttaaaatatttgcctttacagaaaggcatattgggattctgtcctggcactccaatcattatttacaacattgctttctataaaatatgtaatatggttgattgctgtagctcacacctgtaatcccagcacttttggaggtggaggcaggaggattgcttgagttcagtactttgtgaccagcctgagcaacatggcaaaaccgcatctctactaaaaatacaaaaaaatacctgggtgtggtggtgcatgccagtggtcctagctactcgggaggctgaggtgggaggattgcttgaacctgtggaggggggatgggagaagaggttgcagtgaactgcagtgccactgtactccagcctaggtgacagagtgagaccctgtctcaaaagaaaaaatatatatgtatgtatgtatataaaaataagtatatgccttatgactgaaactttggaacactactttttataactttgggtcttttcatggtattagatgcttttagtggtactatcattgagtattagtagtaagtaatttggggttataaagtattcaatcttaatttttgaacataattgcagagatagtcttaaccagcttctatacaataggcttgctggtctgtatttaatatattaatattttttaacctagagtcctttttaaagtttttatcttcacaagtacgtaatttaattttacatagtagattcaaggctttgtatattattgaaccatcacattcaatgtagattattactttagatttgttataggtcataagatacatgatctataaaatcttaacaataagcctcttttttttcgtagaaacggaaggcttcaaaattgacactatgggaacctaccatggtatgacactgaaatctgtaacggtaagttaatttggctgtagatgttcttttgttccagggattttatgtgagtagcacatgttgaagtaaatctttagtctctcatattttttatttcaaacatttttctttattgatcacttgtgctgattgatctgtgtggtgtattatttgattcatgggtatcctgtttcatttttcttttccttcaaattaagttgaatatatgtaaataaaagctgatttgattaacttgcaagtagggcaatgccacctggtcagtatttaaagcctttaagttatgaggtcagtttgggagagctttttcgcataatatcttttgtttttatttttatttatttatttatttttttgagacagagtctcgctctgtcgcccaggctggagtgcagtggtgcgatctcggctcactgcaacctccgcctcccgggttcacgccattctcctgcctcagcctctgcgagtagctgggactacaggtgcccaccaccatgcccagctaattttcttgtatttttagtagagacggggtttcgctgtggtctggatctcctgacctcgtgatcgcccgcctcagcctcctgaagtgctgggattacaagtgtgagccaccgtgcccagccttgtttttaacaatgtaatgtctttcgctctttaaagagatggattatagtgattataatgcttacaaagtatgtaattaacagaactaaatacttgggtatctgtgaatataagcctttggttcatgtttagcaaactttctttttttaacctaaaaatggttatttctatatattctgaccaagccatatttaacattttaaatttttatttaatgatcggacttggtgatgtagaacaggaattctrttaacctcattttgcatatttatattctagaccattctaccttttatacttttatttatattctagattattatacttttaaaatactatgcatgtgtattaaatagagtatacttaagacactaataccaaacttttgtctttgcttgtgaatcatcagatctttacggactctatataacatggaatcattatatatgtgctgtggtttctcagaattaacatataactttatatctacgtgggcttttacgtgttttactcactcatttccaaaagcaaatagcaagtatagagatctgattttaagtttgtttttttctggacttcaaattgggattggatatcagatattttgttaatatacttgtttttaaattgtcatcagatttgtttttgtattattaaattatgtgtagattaatgaattcattcaacaagtacttattgagcatttgtgtcagatcctgttcttgttgctggtcatacagctgtgaataagacagatgagccttgtttagagagagaagtcagagatacttctctcaggaggtaacagttgagcagagagacttggatagcattcctctacgtcaaggcagggatcaagactgaggtccagtagagcaacagcaaggaggccagtgttgctagagtttggagaactaagggaaaagtcatcagggattagatactcccatcttatgcgatctgcctggttcttcctgacttcaatatataattcatggctgaagatttagtttaaattcttacgtgatttggttattgacatcttgggaacagaacttgcctactaatcatttccctaagtgcgacagaacttgcccgctgatcattccctgagtgaattagtcgtagaatgaagttgttacccttggggagccatcaaagtaagttttttgttatttttgtgattgttgtttttacttttctcatccatccctgtacctctgaaatgccatgaaatggttttattatctgagcttctttgcaagtagtaaaatctgtgatgggttttacagtgatgctttgtacagagcagtttttctaaaatttaaggatagcttctttattgatcagtatgagaatgatgtgattctgcggcatcatcagagactgttctaaatatactgaaagaggtgaatttaagcaatatactgaagtatactgaaaagagaggtgaacttaagcaaatttatgctgtgtgatttttaaagaatagtcatgaaaaaggcattgtgtaggaatgcaacagaaagactaaaaatggttaaattgctgatagttatattaatacccagtttgaatctctgtgttgcttgtgatctgatttatgcagttgttagaattaatacatagagaaatttgaacttgaaagctttgaagttctcagataattattttttagttgtgtctcagacttacgttttcaatttaatatttttttctcttcttttctgctttggaattactacctatttgtgagcttgtgagttgcaccaactttctaccttattctccagtcaagaaagtttctcctttataatatccacccagacatacagtgatgttaaatgtatgttaaaaggctttgctgcccagatgtaacttccttcctaatttatgtatagttcatttttgcagccattgttctccaaggttttgatatgcctggttgatgtacatagttaataaaattaggatcagtctatgtatcttttaagttaaacatcagatttctgttatatgcaagactaaattatgcagacggctagaatatttttatacagataatttcctatatatatatgttgtagagaaggatatgttttgataatcacatttcataagaatcatgggttagtgaaagtttttatagaagtaaaggccccagggagagtgctttgataatattttatgaaagtaagaattattcaaacttatagcaacagaaacccaggtatctttaaagttacaagtttgtatagttgggtttctggttaacttttgacttaggccatgaaatacgtttcacagtaaagattccagaggcccaagccatgaaattgttgatttgatagataacttttccaagtttggagcttttcccccaaatttgttgcttgggttctataatgtttaagaaacactaggttaggccaggcgcagtggctcatgcctgtaatcccagcactttgagaggccaaggtgggcagatcacttgaagccaggagttcaagaccagctcggttaacatggcaaaaccccatctactaaaaatacaaaaattagccaggatgtgatgacgtgtgcatgtaatcccagctactcccgaggctgaggcaggagaattgtttgaacccaggaggaggaggctgcagtgagccaggattatgccactgcactccagtctgggtgacagagtgagactctgtctcaaaaacaaacaaaaaaccccactagattaaacagattttgtggttcaggaatctcattgtttttaatgtatgagtatctaaattggaagaatattcagtctttctcaagcttatttaaccccctgagtttgcccctaccctaacacctagggaatattctttgaaaggactagtgtttcatagaatcaggttaagtaaagctatctcagaattatgtgttagaagtagaaaccattcagtgggggaaataacaatatattttcatggtttcattttgtgatagggtcatattagacaaagaatgtcacttgataaagtttattgtatagtaaataagaggatataatgaaggtctgtttttgttagtttgcaaggaaccaatttatggttccactggagaaataatcagatggtgatcacagttcactcttattagtgaggatttggtagttgccttgagaacaacttcattttaacctgtctagcctgttcatatttaactggaagggttacagactctaacctctatttgttcttagtgagtatcattgactcttgattacctttactgtcttcatttttgcggaagcatctcacaccctgcaattatagagattaaaagctttcctttaagatctttgcttgaatttattccaacagtcatcatagttcttacactaagtgtgttttggggaacgattttttttgacagtaagtaaacttaggtagctttatataatttgttagaggtgtgataatatcaccatcaattctcaggaggatccagaatctcagtctgtcaaccaggttagattcttaaaagcaggaacacatacatagcactctccccaccccaccactgttttataaagcttccttcattcccatttggttattgattaatttgttgttcatctctgcttgaagtgttacgggagtgctatagtagcagtaatgttctggagttgagtgtagagttcagctctgcagataatggagactctcttaaaagctgttttccttggggttctatttccttttcttcctctttcctttagcaaatatttgttgagtgcatgctgtgtgcctggcagtgtgctgagtgctgggacatcaaagatgaacaaaaccagacgtgttcatacggactttatgatctgattggggagggacacattagtcacactataaaattgtgactatgacaagtgttaaaggtacgttgtgcaacaagagcctaaaattgggggatttgttgcaggagtcagaatacttcatttaggaggtaattcttgaataagatcagaagtttatgtaggatttaacttggtgatgatgacaggaaaacacattttaggagcagtgaacaaaaagcagtagtaaaagccctgtgatggggagagagtggggagtagaaagatttgaaagaagactggttattgtatatattttaaggatgcttgtaggaaagtttgtttttcttcttcctgcctgttcgtaaatgttagtggattattacattacattgcactaatgtttatgaacagtcaggaagaagaagatggtaaggtagatcatatgtctcttttagcatgcttctgatggagtcattcattgtgccaatctaaatgtggccacagatatgttttattaggcatccattataatttaagtttttatcttattcaccaccatttaaaaattagagcttgtcacataaacagtctggatttccagcttccttaaaatctatctggcatgactgcgtactgggtctgtagtctcacatggcaacagccacatccacctgagcaggagctacctcctttagataagaggttttctctagattgccacaggcctcattactctgttatcttttatttagccttctttacttatttctgctacatctatagactgttttggccgtctagtttgaaatccctgctctagaggcagcaccagtttgttaaagataagttaatcagttggaaatacaacaaatataaggctttgaagtcagtgctggctttgattttcagttctaccattcattctcctgcttgtgaagttgaggaggttatttaacctttctatcagtgattttgtttttattttataatatatataatagaacttacatcatagtattgttgaagattaaaggagacactgtataaaatgcttagtacaaagaggcttaacaaatggtagctacttgtattattaatttatgattctgtaaacttaattagatgtatgtgtaaatgtaggcaactatatagctttattgtacttataatttattatatttattaatatatgtatttagtattgttaatgatataattttcattcaaagttataaagactagtttatataaatattatgatagtctttttctttcaagtaattggggtgtttttgcaacagctatgtatgtttatcttatagcagagatcttttgcatttgagagaaagtagctgcaaataagttgtttaaagagggtaataactaggttggccttttccatccatctgttaggactcatacttagaaagaaatgtaatttcttttagttttaagttactgattttctggacaggcatggtggctcacagctataatcctagaactttgggaggctgaggcaggagggtagcttgaggccaggagtttgagaccagcctgtgcaaagcagcgagaccctgtctctaaaaataaaaaaaaaaattaagtaactttcatctgaaaattatataaagtgttcaggattttaatatgtagttacataattataagtaggaatattacttttataaaatgttttttctgtactctgtgtttagactggcatattattctatttgagaatattatattacactttaaacaattttcaaaacttgttgcttgtcttgatatttcaggaaacagagtggttctatcatgtgtccgcctagcagtataaaggtgtaccccttaaatgaaacactattttttatatatatgtaaaaactgtttacaaaatgtaaaaattaagatagtatgtatataatagtccattgtatcccttaagttttgaaagtttattttatatacttgttacctgttacatgaacatattatgtgttacggaacatatatccgtattaacatattatctgttgtatacagttttttgttagatatgcatttttcatagacttttctaagaagccatcacgtaagtgaataggcaatatttttttctcttttagcacaaagaagctcaacaaatggtacttgtaaaaaatcctttatatcccttttataataattttcccccttgtgattttttccaactttttttgacgggggcagataatgttctggttatagatttggaccaagtcttaatataagggagataaaagagagaactttatattatgatttgttggcctgtttgttacagcaaattaagcttcagttttctcatcagaaaggtggtataacttccttagggatttgttttgaggtttaactgtatccagttacaccttgtttagcattgcccttttcactgcttctttaaaagtttattttgtttttttattactgtttttgagatggagtttcactgtctcacccaggctggagtgcggtagcgtgatctcagctcagtgcaacatccgtctcctgggttcaggtgattctyctgcctcagcctcccaagtagctgggattacaggcgtgcaccaccatgcctggctaattttttgtatttttagtagagactgtattggccaggctggttgcgaactcctgacctcaagcgatctgcctgcgtcagcctcccaaagtgcttggattacaggcgtgagccaccgtgcccggcctcctttcactgctttttgattgyagtatggaattaattgtagttattgcataaatgtttttatattaaacatatataatattttgtaaacgttttatactgaataatacagatatactctttttctctaattggctagtatttagactgaacacttatttagatgggtaaatattaaatcatttcatgccttccttgtagtaagaggtgttagcatctgatttaaccttaatattttgccagcattattagcattttggtgctaatgtacttcaagaaaaatgaattacagcaacaacatattcatgtcagggaattttaatacatataaagcgaatattatttttatgtggtttagtttatgtatcttaactgagatttattgaaaatccattgcacactggttgatacattttgtgtaagcctgtacaattcaactcaatttagctttgcattttgttaaagaataactattagtttacccaaaacatattagaggttttagttaatatctgtaacataacttttaaaattattctgccgatgactatggagttaatgccacaatcacaaaacacttgagatttattttagaaagaaagaaaagttattgttgccacgtatatcagagtaatcttgaaatcaagattactaataatttttagtaataaatttaacatcactttgttttaaaatgctgtaatattgatcgttgtaagaataggaaacacagaaaccagtttggaaatatattttgttaaataacaaaaatttatactatgaaacatagttttggttacatatattctcttatagtttagtatataatgctgtagttatagatgactttcagaattgcacaaagattttagttttctttcagcttaatagagctttttattccactttctatttacctgcatcagtgtaactttaattcaattttaacaaaattattgtcagtgttaaacatattttataacttttaatttcctactactccttgtatttttagattaaccactgttctttaacatacaaatgcttttattttctgtatttctctttattattttgaacaaatattaatctttaatgtcccttttaactttatgacagatgttttaaatcaattggtttatatgaaaaaaacctagtatatttaataacatgctatatttgggtgtttgggtatgtccttgatgggaacttttccattggctattgctggctgaacattagtttgttggatcaatttctcggtctttgtaaattgatttagatttttgagtgactttttaatcttttatataattcctgcattcaaattttttaaattaattgtctcagtatttttgtcttagtattcattgaagtgtctagttagttcatcccctttcccctcccccatcctaccaaacctcatttgatctttaattctaagttttggtttcttttccaggtctttttcttgatggatgtttcttttagtgttgttcttcttgtctttcctgcttctcatgttcctctgtgagtgactgttcccatgttttttttaaatacctgtttttaaactcttacttgcttctggactggacaaatcttgctatttagaaactaagttcttatttgaaatttcagaatggtgctttgcactgaatccattgaagacatattcacttgaaatgcttagaaatgaaaaattttaagatcttacttttgttttaattagagacaaaagtcataccatagaactcagataactcactgttgaacttgtcatattttatgggtgtcattgaaaaagcttttatttttacatttagatttttgaaactatataagatcaaattagagttttattttgaaatcaagtcaatttaactttatttatacacacgcatatatatattattatataatatataatagataatatataatagataatatatattatatgatagataatatatattatataatatataatatattatatatctatcatataatataatatatattatattatattgtatataatatatattatattgtatatatattatattatattgtatatatattatattatattgtatataatatatattatattatattgtatataatatatattatattatattgtatataatatatattatattatattgtatataatatatatcatattatattgtatataatatatatcatattatattgtatataatatatatcatattatattgtatataatatatatcatattatattgtatataatatatatcatattatattgtatataatatatatcatattatattgtatatattgtatataatatatattatatattatctattatattgtatataatatatattatatattatctattatattgtatataatatatattatatatttattatattgtatataatatatattatatattatctattatattgtatataatatatattatatattatctattatattgtatataatataatatatattatctattatattgtatgtaatatataataaatatagtatatataatagataatatatagtatatatgatatattatatatactatatattatatatcatatatactatatactatmtattatatatacatatatattatatatagtgtatatatatatatacacatatgaagacagagtctcactctgtcgctcaggctggagtgcagtggcatgatctcagctcactgcagcctctgcctcccaggttcaagcaatcctcctgcctcagcctcctgagtagctgagactacaggcgtgcaccaccacggcctggcaattttttgtatttttagtagagatttcaccatgttggccatgcyggtctcgaactcctgacctcaagtaatctgcccasctcaggcttccaaagtgctgggattacaggcgtgagccaccacaccccgccagtttaacatttttacacattacaattaaaattgattcagtcttttatcatcctctacagtgaattctggacattatcaatcctgtaatcatttacctccccaaatttggtatttttggagagatgctccagtttttctacagtgtctttttgtcatttctgtcttatgtgtggtgccataaatattctggaattgaattcctaatatatttcattataccaaacttgagaactaaaataaagcagctttttgatctttcagaagttactgaattcttacttgtgttctatagatggcttttagaaaataacaccccattcagcttctgataggattataatattttagtaacttatctagctacacaaggtatttcacaatatccttaggaattactgagttttagagtgacagaataattaccaattattctgatagtaaatttgtaggtacattataattcatcaagaactttgtgggggtgtgtgtgtgtgtgtgtgtgtgtgggtgtgtgtgtatattttttttttccccctcctagaaaagttaacaggctgggcgcagtggctcatgcctgtaatccctgcactttgggaggctgaggcgggtggattccttgagcccagaagttcgagaccagcttgggcaatttggcaaaatcccgcctctacaaaaatattcaaaaattagccgagcgtagtggtatgtgcctgtagtctcaggtactcaggaggctgaggcaggtagattgattaagcccaggaggtcaaggctgtagtgagccatgattgcgccaccacactccagcgtgggcaacagaatgagaccctgcccgccccccaaaaaaagaagttactttaagaagaaacttcaagaacgtaactatttaaataacttgatattggaaaatatttttctttacctaggttaactgcagtagacataaatcatctaatactttctaataaattgataggtaccaattttggggcacctgtgatagacatttgtattatttctaactttctgagtcatcattaatatttttgaaaagtttgtataacttttaaagctttaaacatcagtgtaaaaaggctatagtatagtagatttttttgttttttgagatggagtctcactcttgtcacccaggctggagtgcagtggcgtgatctggatcaactgcaacctccgcttcccaggttcaagctgttctcctgcctcagtcttctgagtagctggtattacaggtgcccgccaccacacccagctaatttttgtactttttagtagatggggtttcgccatgttggccaggctggccttgaactcctgacctcaagtgatcggtggcctcccaaagtgctgggattgcaagcatgagccaccatgcccagcccagtatagtagattttacaaaactatgcttcattgtgtcatactggcagtattacatttacattttatattagaaacctcttgtagatcatcgaagactagtccatagtacatagtaactggttctaagtgactgaataatttcagtcaacatattttctgtgtaacagatcaaaggagaaataactgctggtgatgaacagcagtgtggaggttttgttgcctatggttgatcagctgcctgaatcctgagttgtctcatagggtggcattatgttagtaatttgctgtagcccagagaaaggctgagaaactaagtaatgttagyataccatgagaaactgattcattttaattaagcttatgagagtagcatttgaaatcaaatgctgatttattaatttgcagtgataaatgtaattaacaagggcactggattctcacctctagcacataacatgttctctgtgtaaagctacattggaaatcacagtgtactgtgcaatgagcatataataaattatatccttcaaatgtttagtggtattaaagtagtctgttatttttaactcttcattaaaaaaaaggacttgttgcaagtccagggtacctttccccttgggcactgcttagataggttttgatttgccattgtgatttctattccttgttgtgtctgactaatcccttgccagatggatatgatgtgttatttctttagatgtatagattactgagtcaactttaggactgtgtttcattccattctatttgatttgttaaaaagtgttggtgagggaactagctcttttgaatttgggatttataatgtagatatccaaaggatctgatttatcacaggagaggtgaggagcgatagactgacctttctgcacgtttgagctgtaaatttaggattagtcacatttagctttgttgatttggaaggggagagaagagcagggatttcctgctgggttttggaaatctttctttctttttaaagagatgaggtctcactacgttgcccaggttggacttgaactctgggctcaagccatcctcctgccttaagtacctgagattgcaggtgtatgccactttcctcagcatggaaatcactttctctacctttcacttattacaggttgatagtcaaattaatgaggctccttaaacctcaccctcccaattagtaatttcagtgctgcaaagacattacaatttaagtgtttcttagcattgtataaaagtacttaagattcagaatgcagtcaatatgagtaaaaaatcaaatatggttaaagtgcaaataaagtagtatcattgtaaagtacaaatagagaagtataaagaagactttatgtatcagtagataagtaataattatatgttgggatgaacgttttacacagtctcaggatggacacattaaaaaattctgctgtgacatatttgaaagacgtgaagatacatacagcataaatgcaaagcatgaaatatttttcataattggtggattgtgtaaaagttttgtttacattttactcatttgattgtatttacataaaatgtatttagtgaaattaccagaaccattttcagtaatagaagaaaataattagtctttttctctctttcacacatggatgcatgcacatgcattcgtatctctctctccctcccacatatgcataaaattgatcaaaatgtggttgaggtctccactggtacacttaagctgagcatgctaacatttggtctgtaaggaacaacctaccatttttatatgtgcccttatttacttacactgtattgatatttggtgtttgcccataaaaataagccagccatcctttcactatgagttttacatgtaagttctgttatgccttgtaattttaggttgactttgttaaaaaacaattatcaagttagtcataaaacctagtttccaaaaccagtgtttgttatctaagctgaactcttagaaactttaatgtgaaattatttttaatgataatataaaaatgaagagtcaggtatgagcaaaagtaagtaatatagcaggagtttgtatagtttaagtgcatttttttttctttctttctttttggaaacagggtcttgctctgtcacccaggctggaatgtagttgtacagttagagctcattgcagcctttatttcctgggctcaatcactgctcccacctcagctgggaccacaggcatgcactgcaatgcccagctaattttggtatattttgtagagacacggttcactgtgttgcccgggctggtctctaacgatcctcctgctttggcttctcaaagtgcagagattacaggtgtgagccactgcgcccagccttaagtgtgttttcattattgccttacattttttagtctacagtgatttaaaatggtttaaatgtaatgatttaagttggggattgacaaacctcttctttaaagggccagaaactaagtactttaggcttacaggccgatagacaaaaccacggaaattatgtaggtgcttatgtaacaagagataaatcaaattttcacactttttttctttttttttttttttgagaccgagttttgctcttgttgcccctggagtacagtggagctatcttggctcaccacaacctctgcataccaggttcaagcgattgtcctgcctcagccttcccgagtagctgggattacagttatgcgccaccacgcccggctattttgtatttttagcagagacggggtttctccgtgttggtcaggctggtcacaaatttttaatgacaagtacaatgcatgataataatgtgcaatactgatttgataatgagaataatggaatttctttttgggtgtgagggaacattttgcttaattgaagttccaagttagtgttctctatgaccaaaattgattgcaaattcatcaatgctggtttataatgagattttatgtattatttcaaaattcattaactatgtaattggggaacttccacataaccctcctttggcagtgataaatctgcaaataatcaagaaaatagtgtagtagaattcttagatggactaaatttgcccatctgagctgttttcagctccacacatagttttaactaccatttgtttggtagcatcagcatcttaatagattccccttcaggttgtacttcattagtgttttctgaactactttgaaattactcctgcctgtagtttttttatgtaggctactcatagaggctaattcctcagccacttcaaaacatgatttggactcctcgaataaaccataactgagtggtattagtaacatgttaacaagcgccaaagaaaaccactcagtcatttgccttgacttctgattgacaattgatgttgctacaccatgacctcaactcattaagcagtagtgaaaggctaatagtctaaaacaaatttatttcctctgaatacatttttgactgctttaatcaaatcaaatttaattaattaaccatagattaaccattttccttccctggctaacaaggaacctctcaaatttgcttcacagcctaattttaattttttaatttttgtaaagaaattttgtgttttctgaccattcctttcatctgagttgggaatgttgcaatgagggcttagtctggtaatatttatattgtattcttttagcacagttgtagtgtcattgcattaratggtaaacagtgctttgccatctgattttattgtacattaaagagcatactacttttcttgtgtttttttgttgtttttttgagatggaatctcactctgttgcccagtcttcagtacagtggtgcaatcttggcttactgcaacctctgcctcccgggttcaagcagttctcctgcctcagcctcctgagtagctgggattacagatgcctgccaccacgactggctaatttttgtatttttaatagagacagggtttcaccatgttggccaggctggtcccaaactcctgacctcaagtgatctgcccgcctccacctctgagtgctgggattacaggtgtgagccactgtgcctggcctctttttgttttaatgtgatgagtaggtaccagcctctttttgttttaatgtggtgtaggtaccagtaattaaaaaaataaaattcagatgtccttatgtgacaaaatgcttggcacacaaaatgctgtgttttgcattcatccaggaaatgtttgctgtgtgcctgctgtatgctaggcagtattgtaggccctggggatataaataggagggaggacaaacaaaatttagtgttacatgctttttggaggattaaagtaaggtaaagcaatataattgcattttttgtgatttgtattgtgccaactggcagtgctaactaaacctgagagtaccacataaggtttctgttgtccatgtttaactctgcctttttttttttttgagacagagtctctctctgtcacccagatggaatgcagtagcgcaatcttgcctcactgcaccctccatttcccgggttcaagcagttctctggcccagcctcctgagtagctgggattacaggcgcctgccaccatggctggctaatttttgtatttttagtagagacggggtttcaccaagttggccaggctggtctcaaaacacctgacgtcaggtgatccacccgcctcagcctcccaaagtgctgggattacacgcgtgagccacagcgtctggctgacctctgctgttttaaaggcagtcatcgacaataggtaaatgaatgagtttggttgcattacagtaaatctttatagatgctacaatttgaatttcgtgtaatttttacattttaaataatacttttgattatctagatttttttttcaaccatttaaagtgtaaaaaccagtcttggcctgtgtgccatacaaaaacaagtagcagcctggatttggctcactgctgtattttgcttactcttgacttaaatttttatcagtggatatggaggcaactgtttatttctaattcaagtaattagtacttgtctcattttatgtctttagaaattgatgtttagatgaattttaagaaggatgctatttaaacacacccatacctggcatatgcattaagtaaaaatatgaactttaacattaaatttgtgagaatgatgctgggtatggtggctcacacctgtaatcctagcacttggggaggccaaggccggtgtatcacttgaggccaggagttcgagaccagcctggccaacatggtgaaatcctgtctctactaaaaatacaaaaattagctgggcgtggtggcacatgcctatgatcccagctgctaaagaggctgaggtaggaggatcacttgagcccaggaaccagaggtcacagtgagccaagatcacatcactgcaccccagcctgggcgacatagcaagactctgtctcaaaaaaaaataaaaaataaatttgtaagaatggaggcagttgcataatggctgatgcctatgtactgtagataaaattactttcctgtttatcttatgagatgcaagaatattaaatgaaacttgttaatgatgaatttggattttataaagcaataagaggcaatgctgtaagatgtatttccaaatgagtttttgaaaataaaatcctgacaaatattttttcttagtgtgatcccttttgtaattttatttcttttttttttaacttttaagttcaggggtacatgtgcaggtttgttacacatgtaaacttgtgtcatgggggtttgttgtacagattatttcatcacccaggtattaagcctaatacccattagttattttttctgatcctctctctctgctctccaccctccgacaggccccagtatgtgtgattcccctctatgtatctgtgtattatcatcatttagctgccacttatacgtgagaacatgtggtatttgtttttttttcctgtgttagtttgctaaggataatggtctctagctccatccatgtccctgcaaaggatatgatctcattcttttttatcactgcatagtattccatggtgtatatgtaacattttctttatccagtctatcattgatgggtatttaggttgattccatgtctttgctactttgactagtgctgcagtgaatatacgcatgcatgtgtctttataatagaatgatttatattcctttgagtgtataaccagtaatgagattgctgggttcagtggtatttctctctttaggtctttgaggaatcaccacagtttctttcacaatagttgaattaatttacactttcatcaacaatgtgtaagcctacctttttctacacaactttgccagcatcttgttttttgatagccgttctgactggcgtgagatggtatctttactgtggttttgatttccatttctctaatgattagtgatgttgagcttgttttcatatgattgttggtgatgtatgtcttctttggaaaagtgatcatgccctttgcctactttttaatgatttttgttgttgttgttgtttatttgtttaagttccatatagatgctggatatttgacctttgttggatgcatagtttgcaaaaattttcccatattttgttggttttctttttactctgttgatagtttcttttgctgtgcagaatctcttttgcttagatcctatttgtcatcttttgcttttgttgagttacttttgatgtctaattatcccatcaagtaagtgctacaccctgaactggaggcaacatctttctaaaacacatctgtgagcaaagggggcacagccacattttgtgggagatgcatttcagcatcaggaggcagttaagtctgcacaggttatccaaggactatatggataactcacaagtgtttacccctccagagaaaagccctgtgtgataactgctgtctttcaactgtggagactgaggcacacactggcaagcaaattgctttaggaactattggcaaacaggatcaagaaagaattagcctctgctgaacactgcacatggttgagcctgtgtcccagctatcagggtatcaatctgtctaggtcccagcgatattcccagtacctggcagagttcttgggacaaagtagatacctctgttcattttctattgtcacagtaataaattactagaagtttggcagcttaaaacattctcttacagttctgtaaatccaaggttcaggtatatcgtggcttagggagaggcctccacttagagtctcatagactgaagtcaaggtgtcaacagcaatgtgttccttttgggaaacttaggggaaggacccacttccaagttccttcgggttgttgattgaattcagttccttgtgattttaagactgaggtccctgattgtttgctggatgtaaactgagggctagttcaaccttcaggaggccacttggttcatggcctccttcatcttgaaagtcagcattggtggatacagtccctctcatgctttgactctcccttgttcttcttctcttctgctgtgtttctctctaactcttctcccttcctcttaagggtccatgtgattatactgggccaatcaggaaaatctccctattttaaagttatctgcaaagtaactttgccatgtaatgttaaaatattcacaggttctgggggctagggcgaatggaaatctttggagaaccattgttctgcataccaccacactcaatcaatattttttaataaatgaaaaaaagatgtatttgttagtgttggaagaataaaaattttatgaatttttggttgcttaatgttaaacagagttgatttttgtttgttttgagacagagtctttctctgtcgcccaggctggagtgcagtggcatctcagctcactgcaacctctgtctcctggattcaagtgattttcctgcgtcagcctacccagtagctgggactacaggtgtgcgccaccacacctggctaatatttgtatttttagtttggatggggtttcaccgtgttggctaggttggtctcaaatgtctgacctcaagtgattcacccacctcggcctcccaaagtgttgggattacaggcgtgagccactgcgcctggctgatttttggtaccttttttttttttttttttaagaaaattacttaaaatgagtaatatttatgctaagatatccaactgatttataacagcatatgataaagttatgaggtttcttttttttgtattgatttgcagtggaaagataagcagttgattggtgagagactgctgagtttgatgacagattaggagagcaggacagtataaatagattagggaagaagagagaattagtgagccaaccttcctgcaggttatagagccttttatgygttcctaccttaaatatgctaagatccgagagatggatagttcatcccagttaacataaatgaagagttctctttcagttcttgtcatttttttgacaacccgggaaccatcttgtatggcccacttgcctaagtcaagcattccatcactcttccattcagacgttttgctttctatcagttgtgaagactacagttacctggcactgcatcctttttccctcttccttttgccatcctgtgttctgaattgtcaggtccacctaaatagaaggcctaaacttgattgttacttggtaacttaagactataagattattgttcctaaaccattgctgtatctaataccaagatgtaccagtttgatcaaagacttaattttctaggcccagacaactgacataatggatttaggtttattttttctttgaaatgagtgcatgagtgccttaagatagagtacatagtcaaaaaatatgaatactatagcaagttttagggattcttgcagtcttcctgagcacagtggtggagaaaagaggaaaatccctggttacattgcacactcatcaagtcaggcaacctggcctagggcaacataagcctagagaaaggagtcttgttctctggtttgctctctgcaggttgtgcttttttgtgatctttttcctttagagaggctccttattgtgaagcagctgttaaaagggtatgccttattctatttctttttcttggttttcttaattacttaattataaaacatttctaacgtaaatataatgagagaaaatagcacgtgatcttccatcttcccatcacacagattgtataattaccatttttaaaggctctccttatctgttccacctcttccttttttttctaaagtatttaaatgcaaaatctaaacactgtgattttgttcctgcacactttgcctctcttaaacatatggacatcttttacatagccacagtgccattgtatacaacaaaataaataatattgatgtaatcctaacacacagttcattttacagtttcgatttcctgaaaattgtctttttgtaattcgtttgttggaaataagacccaaacaagcaccataaattgcgtttagttgttaggaatctcaagtatcttttgctgtagttcataatttttttgtgccattggtgcatttggcagactggaaatcctatgaatcctctttctgaatatatttttaaggcataaaagaaaatacataagataaaaccaattgtatttaaagtaaaatcaagatattttttaaaaacacatttatgacatgatttgtgcttctttactaatgcattatgtaacatgatctagtggcaaatttgataaataccagattttagaagtctaatgagcatatgtaattttgggatatctttattctaatatgttatgaaaaaatctgatttttgttggtgrcaaagttgtaaccatttataataataatactgtggtttatctgcattcctgaagaaagtcttaatttcattaagagattaatgaaaataaaattgtaaatttttttcccattacgtttcttctgaattctatccacaattccatgctctaaaggggcagtacatattaagaaaggtcttggctacaagtcttctcggtggctttttctaagtttttcaacaacttgacaagttctttacctcttagcctttctccttccagttgtttgtctggaacattcttcctcttgctcttaataagactgattccttctcataattcagatctcagttcatcagcaactttttcaggaccctttttcttctagttatcttgttgttcatttgtttcctttgataatctttctttaaatatatgaatttgaaggtagaaactatgtctttcttgccttccactatatctccagtactgagaacagagtattttgcatgtaaatgttgcttgaaaagtattttcaaatgaatctgaagcctatgttatacattatatttttagttattttccatactttcatatgggtgtagagtggtaattgtaattcattattactgttaatgatgctttgtaatatataggccctcaagtgccacttgacaatcctttcatacattgcttggtgattctttattacattgttcctggcgaatcagattctttatacagtgttttctttctcagtaaatggcactgtcagtgttcaggccagtgttctaggcatcatccttgtcacttactcctctctcatctctagtatccagccatcatgaaggcctgtagaccttacttgctgacatctctggaattccttctctccatgtcactactaccctttctcactatagagaaaacttgatttgatactgtaaaacattttcctttaaatgaaatgaaaatgctttaaacgaaaagagtgagactgtttcattgagtcaagttgtaattcactattccttatccaggaattttttgtttttttcttttaaataagtctcgagggagagagaataatttacagtgagatagaaggtatgaatgggatcaaaagattgggtagagggattagctttagcaaggaagagaatcatttatgggccttgtagctggccaagggttttagggattttggtatatagtaccttgagaagccattgaagcagtgggatggcatgcctagctttgtgttttgaaagtaacattatggctgtaatattggcaacagattatgtggatatgaggaaactggctataaaggtattgcagtagttaaaaaatgagtgatgctgttttaaataggggcaagatgaagaaaagtagatggattccagtagggatccaagtaagtctttgggttaaatggatatgggcaatagcaagagaaagaagtggcaaaggtgatgatagaagataacttaggttttagttcatattaagtgtacatgacttacagacatacagacacagttggcacttcatatccgtgggttccacatccgtagatttaaccaactgccgatcgaaaatattaaaaacaaaaaacaaaaaaaccaaacccagaacgcctgtgctgaacatgtatagacttttgtgtgagttatttttttcttaaacaatacagcataacaactatttacatagcatttarattgtattaggtatcataagtaatctagagattacttaaagtatgcaggaggatgtgcatattttatatgcaaacagtatgccattttataaaagggacttgagcatctgtggattttggtgtctgcagagagtcctggagccaattccccacagatacagaggtataattgtactctaaattagaggttttgcttatgacctttgattaaaactttacttttgtaaaaatcaagtttacttgtcttttttttgctcagttattagctttctctctgaagtatataggagtcattctcttccctctcttgcatgaatctgttaggaagaagattgtagttatttttttttcattaaccttttcagaagacaaacagatccctgataagggaataaaattttaaacacatttttaaaacaaattttaaatgttaagcaaatgtgaaacattgggctagttttctttgttcattaatttctaggctcagacaacattttgcattgtatcaggcccaggcagtcagtttttgtggttacttttggggctgtgttggccctccctcatggtggtgtgaccctaggaacataggcccctaaaccgtttccctgatcttttcccagtaataaggcatttattgcaacatagcatcaactccattatgttgtatacacaagaactgttttgcttttttgaggcttggtcatggatactgattatgaacagacaaaaaatcttcagcatgtcctctttaggagaagttgtccttggatccatttgccaaggatttgtttaggtggcatagcagacagaggacattgtcttacagagcattaaagaatcatcataggagcagcaracaattttattactgtaaaatttggtggtagtgggttttctatcccattttagtatttaatatacatcatctgccttctgggattaatgtctaaatgatacattgaaattcttggagatgccttagaaatgtctgtcaataggaattttttttctactttttaaggctatgttaatctcatagtgaaatttcctagttaaacagtaaaaaatagaaaatttatccaaatagtctggatgaactggttttaccttctcatgacaaaatggtaggtgaccaaacagtaggatgggtaaatgcagttctacttttatctattaaaaattagcagttgttctttaaaaagaagcaaattttataatttctaagtgccacctgcctgctgtttgcatttgtgcctcagggcccaaagaagcaagagataagcagtaatgtgtatgttttgcaatggttcttgtcaccattaaacaacaactggaaagaagggaaaataattgggggatcagatatactctcttttctcttgtctttattgttcctaatatcaggtgcccctccagtgtgtgaaaatggtatgaagcctggaggcctggcaaaggatgaagaacagagaatgggaatataaagggacagaccatttttgctcagctctagactttttttttaaatcagctgtcatatgtgaaataatagcagaacagtgtaatgattaagaacatgatcctcggccgggcgcggtggctcaagcctgtaatcccagcactttgggaggccgaatcacgaggtcaggagatcgagaccgtcctggctaacacggtgaaaccccatctctactaaaaatacaaaaaaaaaaaaaaaaaaaaaatcagccgggcgcggtggcaggcacctgtagtcccagctattcgggaggctgaggcaggagaatggcgtgaacccgggaggcggagcttgcagtgagccgagatcgggccactgcactccagcctgggcgacagagcaagactctgtctaaaaaaaaaaaaaaaaaaagaacatgatccttgaaatggaaatctgctgctttactagctgtgtgatcttaggtatttaacctcttacacgagtccttcctgtcttagtgttgttcctgagggttgtatgagatcatgtatgtaaagtgctttaacacagtaccaagcatactgcttgtacaatcagtaaatagtttctactgctgttactggtattatttttgtagaatttgctggaaatagcacattaataaaattgcagttcagattatatgtgattatgctgtatacaaagaggtgtgaggagaaatctcaattatttggttgaattagaatttcaccacttatatacttgatcaaaataaataagtattctaagtattgaaagttttggtgttttcatcttcttaagtacctattaacactttgaacataaagattagttatttgtgtaccctttgaccaaaagcaaagctgtcatttaaaattatatttttatgtatataaaaatcacatagtgtcgggatgaagaagacacagttaacaagtggtgagatgtttatatacactatcagcttattttgcttaagaaaacgacttgagtattgttgcggaaaagtcaaaagtaaattaatagaatatttattttaaagtaaggattttcaacagtacaaagacactttactgtttgatccagtcgcctttgagagctcacagtgtctgatatcagattactatcgtttttcaagataatgttaggaatatagaaatttacatagattttataaattttatagattttaaattgaaacttgagataggaagaatttaggtgtctgttatctgtttttcatgagtcattttttaaaaaactttttccagatggaaattactatcttttaaagatcctgcaaaatagtcataatttggacaaatagaacttgagttctctttctatgtacacacctgtgtatgcacacacacacactgtttttaaaacttttgaagcataaatcagcattattctacactgagggaaggattccttttgtcttctgtcaaacatgctgatctgatttggtattatccccttatgtgtgacttttattaagtaattctggtatttctgtagtcatatagaataaattaagtgaaaaacagacttgatccaagagctggggtgtgttacatagatcagctctcagaatcacttgatttagagtagaacacttaggctactgatttgaaatggagataagcacttaaacagttttagtgttttcaagtttcacaaatgttacaattctcttctggtgatttatcccttaataatagaataagaggtaaaaatgattgttattagaattaagaaacattctgactaaattaagattgacagatttacatacttgtatggaataaaaacactattttagttagtaggttggtatttcttgattttaaaattcatgatggagtcaaacaaaattattgtgaaaatacttataacactcagtaaagttttttgttttcctttatttttaaaaacttcataaaagtgcattgtatacattgttcatcctagaattgtgtttgtcaaacgtttgtagttttccccatccctcccaaaaaggtttttaattggtgattcagaatatttgtcatctaccaaattaaaaactgcaggtttgcaaacttggcactccaagaaagaaataggkgccataaaatgattaagtgttggcatgtgtacacctgctgtcaggaaataaacttcccgtatgttgcattttggcagacatgcatcttaaaaatgtgttgaatgaaactgcacctgcactctttatctttttcaacagtacatcctatttgtgcctttaagtgattacttttgcttcgattatctttacagatatattcgaagttagatatacatgaaattaaatggtggtgctgtttaagagtgcagtaattggtctaatccaataactcattgaaataggagtttggttcttaacatcaatgaggaaacaaaacttgtctattttgaaacatttaataactataaaaacttgagcctgagacacattagtttttcacattttaccacgtcatgtcaaaataattttcccccatatattaataaaagaaagtattaataaaagaaatttaaaataatatctcagttatttttaaaaagtaaatactttcgtgagaactgcattgatgaaacatctgaactttataatgtgtttgtggaataactcaactaaatcttattgcatttagaaccctaaaataggtcaaaaaatttatcctttgcacaattaaaaagtttccttaaaattgatagtgatgttttatttacattaaattatatattaaaatgaaaagcttaatctaaaatgaaggatcttttgactgtcatttcttgaattaaaatttatgtggaaaacatatgcagatacattttattggcccctaacagaagacttgaaccattgatttatgcatgcttgttattgcrtgttaatacacagaatctccttatacagttttttaaatagattgttttgggaaaccttttttgttatataatgttatagttttaagaattaacttcttcagaaattaaaaaaatacttcttgaatttctttatgtgatgagttttaactaaaacttgtcctacggatgtaatcagttctaactatacatgcttttagcaatatttacaaattgcacatttgaaaaaaaattgtcttttctaatgtagtttacggtggcgatacctgcctgccttttcttttgctgcgttggcacaggcattgtgcttattttgttgtaaatggttccagtattttatcagttcactaggctggaactgatgagaggtaattaggtggctgtatttacagctcgaataagagactcgccagtgattgaacacaaactcattgggagggggtacaggatcaattctcaacttggcaagacagatccctacatatacatcttccaagtgcaaacggcggatacctaaagaaactttaaaaatcttttctgccagatctccagaaaaaacataaccagttccagaacagaagacaggataacgctcacttgggtagaggtctggtggcatgtaccacttgctatctttgtttcgattgggtgcatatcctcgcattaggtaaccagtgaaatagttatgtctgggaggcagatctggcttcagtaacttattgattaaatattcagtgttgacaaacatgtcactgtcagttttcataacatatggaatatgtggacagtatgttgcaacccagttcatgcccattagtgttttaatggtcaaattatagtacgtatctaagtattcctgttgaattatatcatgataytgtctgctttcttccagtattgcacgttgaaggtagccatttagcttaatacttaagcccaacaaaaatattcttgtgatttgaataccaggtgctagactttcattgccccaagtttgccgaatagctcttctagcttctatttgtccaggctctgcrgctattagtagtattaaaaaaggacttttctcttggcatttttcaggctcattaataatatatttgaaatggtaagaatttggatgtccagtacctttttcattgtaaatacttccattggcactaagtgtattctccaggcctgtaactccttgtggtgacaggtctgtgttattagagttagttgctgtttgaggcctcagggtttgagggactgtttctttccaaatgttccgaagggagctgtggtttgtctcactttttgttgaccgaaatcctcggaaagtgtatgtcacagggttttctttgaatccagctctgcctggcagccagtcatgatgattgaaaaacaaaaacatagcaaaaagaaacactagagaaagtactccaataagatgagtgcggaacagagaccttttggcattccaggtcatctttgcaaagcagcagtgtcttctcctccactgaagcatgttgtaaatatccagtagtggtatatgagagattggtgaccaaaaatgttttcttctccttaatactattctttggcaatcattttctaattcagtcacattgtctctcttgtagtcattctataaaaatgaagcacaaaagtttacagaactgcctgaaagggactttgggtactaatatgatcagggcaaataggaatgtcttaagctgtgaaaatataacccaggaacgaagcttgtaatttatttccccttggcaacataacatcactgagaacaagattaatttatttaaaaatatacctttgtagcacagtgagcattttaaagagatgaggtgatggattcatttcattgtcttgttacactggtcatttgtacttttgacccaagttaaagatttaaaagttgaatgtattcgagaaaaatgttactagatttctgagaagggttgtgtaaaaacgccttaagagcagatggaaaatttattggcattaattaaaattgatttgacatactattggtggtatggtgcacagtcagaggccttttttgtaaaatggtcatgtatcagttgtgggacagacggtgcaaggttgattatggcagagttctgttagtcacagtacactgcttggcatgtttccattggcccctactgtgttgagaaagtcaatgagaagatgcacctgtcaaaattaattttcagggtctagtaacttcagtgtaggatttttagacagtaataaatgattaacactttcaaaaattttaacttttctttgtaaatatgaagtattcatgatataattgttcttagacttaagattaattttaaaatacagcatgtaagtgtctttgattatctatggctttggcagaacactgttacatatcttggttgagtctccatgttagaattaaaagagctactttgaaaccaactgtttaaaattctgaatttcacacaatatatttttaaatatccttgagttgtgctttattctaaatttacatgcagataatttgttaaacttttagaacttgtcattagcacagttagagccctatattttaaaaaggttatgagatggcaatatgtgaggttcatgatggcatatattaagaactggttatgttatcttgcaacaaggttttcagtgcatagcacagatttgttcacatttgttcttagtgtttttgttgttgtttttagtttttggggaccaatatgtcgagggagtagaggtgggcaaagaggtatagtttgaattccattaaaacaggagaaaactttttgacaaggagtgatgaatatgtaattttaatttttccaactttttattatgaaaattacttctttaagcaaaagaaatcaattaaaaagttttaatacaggagcatttatttgaaattacagtgtatgcataaatacatgtatgtatttagcctgtgataatgagagagtcatggttaatattaaatttgtttaaccttggcataaatttaattacttctaggaaatagaatttacatggaaatcctcatgtaattgaatagttataaagtaaaattcacatacataacgttaagtactttgaaaatattgattgaaagtgttagaygtaaatgaatgaaagtgctattatagtagcagccactaggaggagcaagtaggtgggaatttgaacaaatatctaaggtccaaccatataggcaccagcgtttgaaatttctagtttctgagattacagagtacttttagaagttataatatttctaaaatgtaaaaaattaagcattttgaaagatgtgaacaatttttttaagtttggaattttaaaagcaaatcatctagtatgctatttgttagaatttgtttatatgaatttaaactcagcattactgtaatgaaaaccaaggctattcactgtaccaacaaaacatagttctgctgtaagctaagctgaaaataatagagctgagcattctgatttagaaactcagtgttttccttcttgtacttctaaatagctggccattctttttagaccagggaactatttttaagcttttatttccaaatgacatatttggtaaataataatgactctccgctccacttcataaggatatcagtagatataagggttatgtatgtaaattcaaaagaaacaaaagttgcttttaaaatttatttgataatctgttctaagtgttacaaagataagttatctgttttctgctgatatgataatacttggaatctggttgaagtccaattatacagattttttttaaagtgtaaatttgatggtgtaagaaggagtaaacaataaggtcagatgtttgaatggatgtttgagttaaaggactgagtaaataaatgatggaaaataatcataatttatgttgcttttataagaacaatatacctgaagatgtctctaaagtattttagtattacagaaaacagcaaattattgcatattgtaatgtagcataaatacatagttttggtcctaatatgattttgtaacagtatgtgatagagatgcatcttaatttagacttcatggtatttgtatgttttagatgttaagctgttgagatattaaatccatatataactataaatctcccattgataaatgaagtgcatgtgtctagcctttaaaaaattccttattaaaagattctcaggtcttataaatttttttgttaaaaagaatataaaattaaaataaccatgcctgctttttattaaatgataaaattattctccagttattgcctgttgtattttaattcttaaaaagagagagcaaaacaagaaagttcagtagtatgcaaaatagttctgcacttttacatttttagaagagaaatagctttggtttatctcttcttttttgatatcttcacattattaatgtgtatttatagcttgtggatgaagttcatggggagaatgttactgtaaaatgcygttcagtacacactcagtttttatcatttggcttttaaaagtgttgatctctttagtctgttggtgatggtttaatagaaaaacttacacttttgttttgagatgtatagcttataaaactgcttaattggtgacttcaatattgagagattaaggtaccaagagggacttgaaatttttacaaccatattttttagtactatttattattagtctttattagaataaaaattcatgggtgagagtgatgttgaggtgtaatagagtctggtaaacttgtttaatcttcattttggaatgcagtacttacatatttttaaaaaatgtttgccttttgtgattattagataattactgagttgtgttgtgaaattgaggaaaaatcaggatctttgatagatttgtagaattttagaaatatctttaagttcttgagccctgagttgctgttctatgattgttgctaaaatagtttatttggtttatctgtgccctgcacacacatatagtggcggtagttcattactgcatattaatatagcctggaagcatagtagctacatttatatttaattttttgaccttgtattgccatttgtggatatttttgtatcaaagtatttccatattatgtttttgaatttcacttctgaaatgataatcagagacaacgttaaatttgatcatttggaatcagtcttttacataaaatgtaagctatttaaaatagttaatttttaaagccactattgatgtccctttgtttaaagttctattcatggtcactataataacacgaggctctattgtggggttatgcataaactcaaactaccttatgtgatcttatgttaatgctttccttttagtatcttcttgtagcttggtaatatttaaaatttgttgatactctctttggttgtgttcattatcttcatttagggagatgttggggaagattttgttactaaaagctgttacatattaaggttttgttttaaaaggactttgaaaaaaaaactcttaaggttttccttgctactatttaatgaaatttcactgcattgtgtcttttgatagccatttttaagagagcatttaatttactagataaggattcagtttgacctaatttgatagaatattgctgtgttttttgtaaagggctacagatttttttttaagtttaatttcttaaggaatcctttaaacacatcttcttcttatttgccttttccctctgatgtctattacccagaattactccaagctacatatttagctgcataaagcagtgacagcttgtcttctaaacaatgacaaattttaaaatcagatattaagaaaccttttcatagtttcaagggcagtgagctgtatgaacttgcttatcaggtattagtgcctccagggctataaaaaggtaacacatttaaatgactatcatacacaagatattgacataccttccttggtcaggccatttatgtgaagaggattatgcccactgaaaatacttttggcacgccatcacttcagcaaaaaagatgctatcgaacatgcgcacatcccccaacagtctgcctcctgcgattgcttttcacagtatccaaagtgtccatctgtctgcttgtcttcgagttaccctccttgttcatatgggtcctagtcttctgaaattttccctttctttcattttctctctttcgttaaacaaaagagctgtagttgcccgttctgcttgtagcactgttgactcttcccgacagttgatgcattgaagctttttacatctgctattttcctggctggacaatgcagtgctgtgttctcgtctcagtatccrtatttctactaataacactgagctgcaatgtaaagcagccagagctaaaatgtagtgcttcagttgtattggaaaagaataggatttacctctcttctttcgttgttgcctggcagctgcaggaaggattttgagcagttttaatggggttttagtctataatatgaaatccacggttcctcagctgctgcacaggcaggcagcagtttaaatgtgggcttgacagatgctctctctgacagagcagaatttaacgtcactgcttggctgaatcccacgtgattgtttgcattcattttgactaaaaacctaaggtagggagaagcttagagattttgcttttatgtgataaattatatatgttgaatgcaagtgtagtgatgagtgaataatttgaaaatgtgatgattatgaaatggttatgattttattttttccagcttacttccttttttaactttattcttaagtacaggctttctaagtgttttctgtgttagatgttggttttcatgtttcttacatgcttttgtagggtgtaagcagtataagcttttgtgtgtaagttggtgtaatttaaccccttcagtgcattctcttcttgaagttttttttctctgctttcaaattgctcttgattttttactaatatgtagttaagacctatggtttctattgaaaccatgtatctttgtaattcccccccccccccccgttttctggggtttgtataaataagctgtcttggattactttactaatgcatgatgtgatacagcccacttcttttttgctcttatgtggtttttggtgttcttgatggcagaaaactttattttaaatcactttttaatgttgtcatttattttttatttatttttccttccctttaaaattacatgtatcgtagaattcagtaaaatgatgtaatagatatagcacacttgtacaggatctgggggtaatgagattttactaattatgtttacttattctaatgtttcagaaagatttaataacttgccatgaggcagattttattaacactacacactcactgagatttttctaatatggttagtttctggggctggcaccttcttttcttactgcagagcagtagggaaggtttttttaaattttttgttgtagtaaaaagcctttattatcagtttttcctctgtgactctagggacagtaattcagtcctagaaagttatagttttggagcttaagctaaaggttaacagttatatacatattcttcatctcactgcctccaccattaatatatgctatttcaaatgaatatgaatttgttttctctgatattaaaaaaaattttgtccacatatttttgagctttgctgatgaaatgtgctttgtagttttaagaaccccactgtattagaaatgttagaaggatcgttaaagaaaaaaaagaattttataaataggaaacctaaagcctagactgagctttgacttttcctagttaagtttgaaggagaggactaaaacccaacttccttgtagtctatatccacccatactgcaattctcactcactaccgttttgtttttaaaattagtttactagttaacagagtaatgcttaagaacttacttaaaataacttattttccagaagtacagatgtgtttttgtagatcagtatttatttatcagtgattctttacataggatttgactatgaagctagccacaatgaccatttatggagtatttactgaaaatcagattgcgtgctaagcttacttgagctgttatgcaaatggctcttttctaataattttattattgtaatacccacttaaaagatgcagaaccagtgcctggagttgtaaaatagtccaaatgtcagataaatactgataagaatagaggccaagctgggaattgaagcaagattatctaaattcttatcctctgtgtttttgttttctttttaaatctatctagtactatcattattctctgttcttaaactttttattacatggcactgctagagaaattgtgggattttttttttttctgaacactggcgcagcatacccaggaatcattaatagaataataaatgaatgtttatattttcactttttcaacaggtacatattgattaactactgtgtaccaacatgtgcatttaggcatagcttattaagtataggggatacaaagttgatttagagacattccctacccctttctccaggaaaggactaaataattattattcttttgccagttcttttgattggatttttttaatgtctccctggattattatagattttgattattaagagagttatatgggtaacgtattcattagtgggtccctccagtatcggattgagtccctgaatttcctgtgggacccccccgccccgaactgcttgttatgggacaagtatttaaacagcaagaaacttccaaatattactaacaaaaggtgcctgtgtacttaactggaatttacttcatactttaaaagtacagctgcaacctctttctttctgtctgtctgtttttttttttttttggagacagagttttgctctattgcccaggctggggtacagtggcacgatcttgtctcactgcaacctctgcttcccaggttcaagagattctcgtgcttcagcctgccgagtacctgggattacaggcgtgtgccaccacacccggctaattgttgtatttttactagaagtgaggttttactatgttgcccaggccagtctcaaactcctgacctcaggtgatccacctgccttggcctcccaaagtgctaggattacagacgtgagccacagtgcccggccaacctgtttgttaaatttaagttaagctagttaagaactttacgtaaagttcaggaaaacagggcagatgtgagataaaagttcctttagtaactttttgtagcaacctacatgtttccagtcaagagaaactgtaaaaatcttatgacaggagagcttgtagaagttcttcctttagtctagtttcttttaacatctgaattctatggttaaactaattcagtaaatgtgacaggtttctttttcagattcagcaaactggcagctattttgttaagttttatagttataaatggcttgtaattgtcacttgcataagtctatttttaatcctacaacacatccgtgatggcaaaataggtggccgttactatgtgcatcatggccagagctgtccaggccggttttagcattttcctgggcatgtctagtatagacttcaaggagtcagaatttaaagacaggaattgtaatgcctcctaattgtcagtttttactgggtataggaataattatttttgtattcatgtagttaatggttttgaatgattattacatgttgaatcagatgtaaatctgctgttcaagtggctactaaatagtaactcatggagttacatcatctgtttatctatgtatgtacattcaacaatatgtccttggtaaaaagattaaaagagaaaggtagggggagagcacttcaaccagggtggatgattttcatctaatgggaatgagcaaaatccttgagtaacattagaagggagacatgaatctggtcttcttatattggtctcctttcctgtttgtgctttattatgagtggttggtccctgaattcaaggaattaatttcagctaggacttaccagaaataccagctattttttcccatgttggacaaaaatcttaatgttttagatcaggtataatttccaccataccactctgaaaactgtcacttgacacaattatttagagaccaattttagttttattgagatgactagacaattttgcatgatgtttgcttggagtttatttctcttgactgtttttatttataatcagatgcagtctttttcattacataagggatttggacaaatggcttgtttttggttatttaatattagtataggtagtttcccctttttgaagagaagtcaaatgtttrttaaaagcttgtaattttcctctaaagtcagtggatgatttatgaaccagctttactttccttgaactcacaaagcaagaattagcctgattgcaaataagcaatctcagaatgaccacaagtgtcagtgtttgcctgccttatttttctccttcagttttcttgtgcagcagataggcatgttgtttaagaatttcttttgacttgaaaacaaagctaaatttaagtgtctctttcagaactaattatagacacctttatctgttttaattcatgcaaactattaacaatgagcatttacaatcagcagtgatttggcaaatactttattatgcttgtgtattccttggtttttctgaggcacagctgtttcagtcaggaataatactcttagagctgtggttctcaagggggcagtggtaggggtagtactgatttctacgaggtgttctagaagtttgtgaggatgtttctagttaacagaatgatttttaagggcattttagggccagggtaggtagtagtccagtagtgtgtgggacagtctttgtaaacagcaaagactagctctgtgttctgcaggacttctgagtgtttcattggctatctgtgtaggtgaaacacttttttataattaagtaaatttaaaacattgttggaacataaagtatattttgttcagttttaacgtgcactgaattatctagaaatgtaactacagtgtacagtgagggaagcttgtactttgctttgttytaaacttggccaatggttcaccatatcaaaaaatgaaattgtgttcatggcatttgagtcaccaatataccagtctatgggcatttgtaattgttacattcactatgactttatgtataggtattagcatctggttagtatatcttctggtataatcatgtctgagacttacatactgaaatgcatatttttatcataaatctctctttttgtttgttttttgagacagtctcgctctgttgcccaggctggagtgcagtggcgtgatcttggctcactgcaacttccacctcccagtttcaagtgattctccttcgtcagccacccgagtagctgggattacaggcgtgtgccaccacacttggctaatttttgtatttttagtagagtcgcggtttcgtcatgttgcaggctggtctcaaactcctaacctcaagtgatctgcccacctcgtcctcccaaagtgcgggggattataggcctgagccaccacacctgacctctatcattaatgtctttaaaaattttatttgtattagtgtattaatttttaaaatatatatgtagattggttgtattacctgtgcatttcatttcaggtagttaagaggggtcattgtaaagtatttcttatataaatacttgttccatgtaaagtaaatataaagggcatgtgttgaatttgatagaactgtgacatccactgggtcagcacctttgaataaattatttcaggcagcttactctccattctctgcaaacccagcatattcttgatatttaaaattattaacactattaatttatttaaagtataacaaacaatttgtaaattcaagtatatgtaaaatatcgaaacttaaaattctactaaaactttgcaaagaggcatagttaccctaatataaattattagtatcagaaagtatttattttaatggctgtagtagatacgaatagaaagcaagtgttgggagccaagcatggtagctcatgcctgtaattccagcactttgggaggccgagatgagcgaatcacctgagattgtgagttcaagaccagcctggctgacatggcaaaaccccatctctactaaaaatacaaaaatcagccagacgtggtggtacatgcctgtaatcccagctacctgggaggctgaggcacgagaatcacttggacctgggaggcggaaattgcagtgagccgagatcgcgccactgcactccagcctgggcgacagagtgagacactgtctcataaaagacaaaacaagaaagcaagtgttggaagtaagtaaatagaatttttttttcctaaagggcttttttgaagaaagaagggaacattgaacatrcttgattcatgtagccatcttcagtatgattggttatggcccgattagaaatagggacttcagtgtaaaggaactttgcgaagtgccggggtctgacctacagaaccaggctgcacgatggatgaataacgtactcagacactgatattcagtgaaagagcagggggccactcacagaaggagttgtggcagccacgtgccaactaactggccttgccggcatttattcagcacagatttaatgacaaaggcattgagtcaacacgtgtgtggttaattaatctggtcgccctccgctggagagagcagtcctatgaatgatcaaaagccagtcttaggaccacatgtgtaaacaagctctttagataaactcccttacattcctttttacctactctgagctgttaactcaaggtaagagaattaggctgctttcagccataaccctatccagaggcttttgcaaaaccttccggccttccaagaaggtttgcttttttcctgtaattttataatttctcccaccaccctgaccaagcccctacagcaaacccttacagcaaagcagacaagagacatgccaagtttataggattacagaccaagagataatgtttgacttttagggtttgattctgtgccctgcccccaacttcttaggctgtataaggggtttgctaacctttggcaaatacattaagcattttttatatgcaagctacaaggggttgtgagatgcatcaataggttcctttctttgaagaaactgatagccttgatggatacatagatcattataaagatagcaagataattggaaataagtggtatttaaattttgtctttcatatataaactcttaattgaaattcatatggtgtcactcattttcactgtgttttgatacttttgtgttcccaattgaacttggtttgtattatgttgttattcttttgatttctcatgcatttcctgtattttcacccattttaaataagatgtggtctcatagaaaatagaattgctgagttttagtgagccaaaaaaagaaaaatgtagtatttctgtttatatcctccatttatccttaattatttgctaatgaacatattgtatatttctttttcactgattttctctcacctttgagttttatatacccttttctaacttttcacagaatttattactgtctccagaatttataacgttccagaacatttcagctaactgtcttacttgtaktgtgtgtgtgtgtgtgtgtgtgtgtgtgtgtgtgtgtgtgtgttgtggggcagtgatgggtttcaggtagttaagtatacatacagatttgtttcagtgtagcttcctcagtcagtttattgaatcatactaaatgttttcttttaaagcttgtaatgttgttacttatctttctacatgtatgccagtaactataattctgtgattcccaaaacagctaaactaataactgattacaaagatataccctgtgatagaaggaactaggcaggagaatatgttttaatttacatggaacaaaagaagagcaaatttatatggtataccattcttctacctttgaagaaacccattttgcattatgtcttcaaacttaaatcagttaattgcacattcaaggttgtactacagtggcattgtttctagtgaaaaggtattatttacattagaaaaatgaaatttcagagcagaattggacctttgaggtcatctaaaaatttatttttctcactttataggtgaagtaactaagaccctgagaggcagtgattttctcaaagttcctcactttgtggcaagtcaaagctggaacatagctcttaagacttacagatcaacttttttcacgctgattaacacttctggttatttggtatattcttttagttcatggacccatatgttacacaaatgattatgtgtaccatctaccttatccatgtttctctgccactataaaaataattctgccagttttaaatgaacatagtggttttattaaacctcagagagacttatgacagaatcattcatctgtgccctaagatatgagatcattatagactttgatattaatccaagcattatagacatgcttggatttttgctaattgcagttctgtgataaaacatttcaactacattcacatggatgtcattttttaatcagtaggtacgtaaatgaaaaaagtttttctaatatgcaagagtaccccttttaaagattttgtgatttgtatcaccttttatctcttttgattccaatttgaattgctatattagtctgggttctctagagaaatgaagccaatagaatctgtttctatatctgtttataatttgtgaaataaatctctatatgtgtatgtacatatacacacatatagatttagtatattagttattagtatttattttactggtgrtttaacacacaaaacataagcacacatatgtatatatggagattgttacaatgaattgactcacacaggtatggagtctaagaagtctcaggatctgtgtcagccagctgagagtgcattctcttctaactctgcccttttgtaatattcagaccatcattgaatttgatgaagcctactcacattaggaatgggaatctgctttactcaatcttcctattcaaacattaatctcatccagaaacaccgtcacaaacccacacagaattttttttttgtccagcctatttcgtttagcgtaatgttttcaaggttcatttgtgttgtagcacgtattacaattccattcctttttaaggctaaatgacatcccattgtgtatatatataatttatctgttcatgtgttgacgttcattagagttattcctactttttgcctattgtgaataatgctgctatgaacttgggtgtaaaaatatctgtttaagtccgtgatttcaaatttttttggatatatatactcaaacagaattgttggatcatatgttaattctttgtttaatttttggagtaccatcatacacttttcacaatagctgtgccattttatattcctgccagtcatatgtaagaattccaatttctccatcttctcatttatacttgttactttcttattttgttactggattttgataataaccattcaaatgtatttgaagtaatgtcttatggtatttgatttgctgttccctaacgattagtgatgtctggtgtattttcatgcacttattagccatctgtatctctggagaaatacctattcaaatcctttgcccatatttaaattggctggtttgtgttttgttgttgttgagttgcaggagttctttatatagtctggatattaatttcttatatgtgtgacttgcaaatattttttcccttcctgtaggttgccttttcactgtgttgatatcctttgcacaaaagttttaaattttgatggaatccagtttgtttctttttccgttgtctgtacttttggtttcatatccaagacatcagtgctaaattcagtttcatgaagcttttcctctgttttcttctaagagttttatagttttcactcttaagtttagtcttttgatcctttttgagttaaatttgtatatagtttaaagtaatggtccaacttcgtccttttgcgtgtggctatccagtttccccagcaccatttgttgaaaaggctgtcctttccttattgaatggtctggacacccttgtcaaaaattagttgaccatatacgtgtgaggttatttctgggtattctagtccattaatctgtatgtctgtctttatgcctcttctgtttactgttgctttgcagtaagttttgaaatctggaagtttgagtcctccaactttgatctttttcacaatgagtttggctaagtatttgaggtcccgtgagattccatgtgacttttaggatgagtttttctatttctgcaaaaatgttgagttttgatagggattgtgttgtgcatctgatagtatagaaatcttaatatttttctagtccctgaatacaaatgtctttccatttgtttgtgtctttaattcttttagcaatattttatagtttcagtgtacaagtcttttgtttccttggttaagtttattcctaagtatttcattctttttaatgctattgtaagtggaattgttttcttaatttactttttggaccatctattgttagtgtatagaaacacaactaatttttgtgtgttgattttgtattctgcaactttgcagaacttgtctattattaatataacttttttggtgtcatttctaggttatttaacatacaaatcttgtcatctgcaaacatattttacctcttcctttccaatttgaatgccttctgtttttcttgcctaatttctctggctggaactttcagtattatgttgaatagaagtgatgaaagtgggcatccttgtcttgttcctgatcttagggacaaagctttgtcttttaccattgagtaagatgttagctgtgggtttttcatatgtatctttattatgtggaggacattgccttccattcctagttgaatttttaaatgttttaatgaaagagtattaatttttgtcttttttttctacatcatttgagatgaccatgagggtttttcacctttatctgttaatgtggtgtattattaaatattaatacattgatttttcatatgttgaaccacctttgcattccaagaatgaatcccattaggtcatggtatataatacttttaatttgctgctgaattcagtttgctaggtcgtgacttatccttacataaagagtgttaaaagaaaattgtttaacagttattagtccaactttattttgggcagtgagctgaaaatacacagacagaaacacatatgcatattgcaagtaactaaatacatatgtaattgtattaataattttttcatttcatgtatttattatcgagctccttcattagattgcaagcaccgtgagggtagggacctcgtgctcttgtttatatttctgcatttctgttttcttatctggcacttactatgctttcagtaagtgtatgtagaggccaggtgcggtggctcgtgcctgtaatcccagcactttgggaggctgaggtgggtggatcacttgaggtcaggagttcaagaccagcccggccaacatggtgaaaccccgtctctactaaaaatagaaaaattagccaggtttgatggtgcacgcctgcactcccagctactcaggaggctgaggcacaagaatcgcttgaactgggaggtggaggttgcagtgagctgagattgcgccactgcactccagcytgggcaacaaagtgagataccatctcaccaaaaaaaaaaaaaaaaaaaagtgtatgtgcaaagaatgaatgttgtttaattctcttaataatcctgtgtgacagttatttttgccatattcatttaatagataaagcagtttttactcaatgtaatactcatgaatcagtaatcctaaggcaaatatatttgttttaattagtcagtgtatagtgattaaacacctgccatgcacctggctgtatcaagattggaggagtagtagtttctgatgggaagtaaagtaccttgcagtctgattgggggaagcagacaaataattagggaattatatagtataatgaggtgttatggtctgaatgcctcccaaaatttgtgtgttgaaaattaatccccactgtggtgatattaagaagtaggaccatttggaaagtgattaagtcatgagggcatggtctttacaaatgaattaatgccctgtaaaagggctggagggaattagcttaaattcttttttgcccttccaccttccaccatgtgaagacactgtctgtcccctccagaggatgcaacaataagacatcattttggaagcagagagacacaaaacctgcaggtgccttgatcttggattttccagccttcagaattttgagaaatatgtttctgttatttacaaattgcccagtgtgtggtattttggtatagtagcacaaatgtcctaagacatgataaaggtatccagaaaatgccaaaaggtcaaaacaagggaacattggaattaagggaagagagagaatgaggaaagagagaaaaagtttgtgaagggaagtcttcaaatcagaggttacaaggtattagtagttagaaagcataggctttggattcaaaaaggcccagatctgttctgcttactaggcatgtgacctgggcaagtaactggtttttgcttgtttgtttgttgtagtttaattttctcatcgtacaatagatacaacatctaccttaatcagtttgtttagaggttgggtgatgagagagaacatgtctcagccgtttaagtggttacttctctggagagagtttctgggcttagggaaagaaagataaatttatttttaaattttatagccctttatctgtatatttaaagggagggaagtactatgctttataagtatgttaattgttttctatgttagcaacatatcgtatacatatacctcaaggttataagaagtcttaaaaaaattgtgcttattatttatgttgaaatgttttgcttctaaaatcctttatgttttttagcctcattgtaatttgtccccagaattgctgtttcctttttctacaacaggtttctcaaaacactcttttaaaagactagctggacatggtggctctctcctgcaatcccagcgctttaggaggccaaggcaggaggtttgcttgaagtttgagaccaacttgtgcaacaaaatgaggcctgatcccttaaaaaaaagactcattcaatgtgtttagaagttcagtccgggcacgatggctcatgcctgtaatcccagcactttgggaggcagaggcgggtgggtcacttgaggtcaggaatttgagaccagcctggccaacatggtgaaactctgtttctactaaaaatacaaacattagccggacattgatggtgcgcacctgtagccccagctacttgagtggctcaagcaggagactctcgagcttgggaggcagaggttgcagtgagccgagatcacaccactgcactccagcctgggtgacagagcaagactccatctcaaaaaaaaaaaaaaagaaattcacacacatatttaaacattctaatctttgggaattctaattatccagaattcataggaataagttactttttaaaataaaggtaaaagcattcaagggtatgactattatttaaataatttttaaaacatatgtgacttttgcccttattaatacaacagaaaagtagataggaaactcctggagtctgcatatatgttctatatatgttttcttcataaaaactttcaggccaagcgtggtggtacacacctgtaatcctagcactttgggagacttgagctcaggagtttgataccagcctgggcaacatggcgaaaccctgtctccaccaaaaaaaaaaaaacaaaaaacaaaaactagcctggcatggtggtgcgtgcctggaggctgaggtgagaaaactgcttaagccccagaggtcaaggctgcagtgagccaagattgcaccactgcactgcaacctgggtgagatcctgtttttttaaaaaaaagttttcaatatttcactgtttcaggtaacattttaaaattaaatataatgtatatagtgtgttctttttcacttgcaacaaatatttttttctgatggtattatatattacgatatctgttccacttgtttaagcagcacatactggtactttgcaaatatcagaagattttagatgatctcatttgctaaaataatgaaagcaaggattgcttgtaaacagcatactttgttttgtatttttattcttcgcaaatgtggttctctcactgtttttcccttctgtgttaattcagttattacttttctagaatgcctcaagtcttggtgaaattataatgcttctgacttttcaagagaaagcaggttttcctctccacttagcacaacttgtcagctcttttgtttttgtgccgatacctttcttttccccgctgggtagtgttttttcttccaatccaaatctttaaaaatatagaattgtcagtctgttccatattccagattattttttctgtttcttaatacattccgtgtgtgtgtgtgtgtgcgcgcgtgcgtatagcctttgaaaaatgacttcacctttgtctcttcatctttagggtggagggtggtggggttgatttctgcattccgttatgcagtgactactccacctttacttaaaaataatggaaatcagagtagaatgtgcttttagcctcttgggtggtgttggctggggagtcctagaaatggctataaattcatgacatgatttgcaaagaacttcccagttttgttccaagaaggtcatattctactgttttgtcattagtctgttgtgtgtcacaactgtataactctttgtatgtgtattggcggggtgggtgtgtataccaactcaaaaattaaagttgtactgtactgaccttggcaactgaaattttcagtaagccttgagaagacaaaattaggtaacattttttttctattgcaacagacaggactttgattcaactgaggcaaatgaaagtgtgtgtggggtttgtagagtgctgagatgggagatttgactcatgtaatcaagaatggttaagggtaaagtaggtcttgcaggccactagaaatagatagtagatattataaagtgtattatattctacctcttttcttgcgttatagcttaattctctctttctgccaatgcattttctccatgagtcaagggtcatcatcatcagtgattttaggcttatttccttgtagctagtggttttaacagctagctctagtctataaaaaataatcccagagaaggacttttgattgatgtagtctaggatataaacctttcctagtgaccaggggatagagcttattgccaaaagggagtgattgggtcatcaaacaaggattattactagggaaacagaaaatacccattattgrtatttaaaaggatcaagttttgagcttattcaaaaatagacaaaaattcctaagggttacaatttatagtggaaaaggtttttttttccatattatttacatatgcttataccttttgcctgacccatgttgtaaaattcgtactctttgttatataatacaggtgtacaactaattcagtagttaattggatcactttcggtttgtgtagttatctttatatgcacataatttttattctggtgattttgaacttaggccactctattccaaaaaaaaagaagggctttgatttgaatctagccagactcatggttaaatgtggacagaagatgtctgcatatatgcctgctcattgtttttctgtctcattttctatgtttttcctcttaaatcacatccccacgagtcagtatttacatactagaataggtaagtaatatgattagtttactcttattatataatgtctagttgattctttatataggggctaatgttccttttaatggattcctatttaatgattatccgctggcttctgatttttttaaaaatctaggtgcagttcagttcaactagctgcagtgcccagagcctattatgctccaggtactggaattacaaagaataataaaaacagttatgtcccctaacatgaacttagagacaaatataatcagaaggttcccccacatcataatgatgttaaatatttgatatgctctccaccttatgactcacttttttttttacatttaaagttttacctgaatgtaatataattggaggaaaaccatatcataagtatgcttgataaatttttacaaacaatacatctatgaaaccagcacccagaatgactcagtagtaaatacaccaatatatattaataactaaatgcgcaatagtgagaatgttggaaaaaggatattttgctgtcctcaggtgtctttttttttttttttttttccttcttggagtttttgctacctacctgctcctgcggctgttgtttcttgtaataaagaatggtttctgtgatgttctaactgaatgctaggaataccactgtattgaagtgaaagtcttttttctcctgtactcatttttatagtcatttatttttttaaaaatgccatgggatagcctgctatttcaaacagttttaccacgtttaccatctcaaattttgaagaaaatgtaatgtaattataattagtatttagcagtatttctttggaaatgttttttgtgatgctaatattgattttaatttttatatatttatgtacctcccctgataatttgtcaaatttccttctgttatgtaccactagtgtaaagtctttatgaattcatagttatgaaatttacacttgcaactttctataaagaaaaatgtattatgaaatatcactgtgaatatgattgaaacttgcactaaaaacagacattttaagaatcttaagcatttcagaggcatctatccttgagtatataattgatatacttcaacacttaccatatttccatgtacatcttacattttcagtaattattgagatttgttatttagtttttaagatactctcatctgctcttaattcaaatgtaacatctcttctttataaatgtgatttttcctgaatattttaaaggcatttaattatttgaaatgtttgttttttaaatacattccaatataacatattttaggtttttccaacaggagggtatatatcatttatttattttgagattgtctagagaaaaaaagattgacttgattttagaacaggcagtgacatttctgagaatattaaaattgtcagcagttaagcaaatcatttaaaaatattacatgcttacagtaactactctgtagtaactaagtttattttatgctaaagatgtttattatgatctcatgacttaatagcataaaagatcaggagagttttcatttttatttttttcttaaactgtaggtcataacatgttcagtggagtaaccaactgagtgagaaaaacagaacaagagacagagagatatgagatttctttggaataattaaagtgtttattatgtaaagaaactttgatcttatatatcaattcttattcttttaaaggagggtgcatctgcccggaagactcagactcctgcagcccagccagtaccaagaccaggtagaaatatagaactttgctttttgttttctttcaaaagatcgtaacagtgcaagtttttagtatgcgtataatgctttgaacaaacttaaattttacttaaaatacattgcaaagtcatgtttctttgaagactgtcgatactgtttaagcagatctcaaaactgtgataatatacataaaatgcttgctaaacttcagtcagcatcattagtaaatcttcatgtttttagcagaaagacataaataaagtgaaagcatagtaaattatttattttcctatagtgtattaagcagctgaactggattttgttttttatatatatatatacacacacacacatatatatacgtgtatatatatgtatatatatgtatatatacacgtatatatatgtgtatgtgtgtgtgtgtgtgtgtgtgtgtatatatatattttttttttttctttttttgagacagagtccttgctctgtcacccaggctggagtacactggcgccatctcatctcactgcaagctccgcctcctgggttcatgccattctcctgcctcagcctcccaagtagctgggactacaggcgcctgccaccacgcccggctaattttttgtatttttagtagagacggggtttcactgtgttagccaggatggtcttgatctcctgacctcatgatccgcccgcctcggcctcccaaagtgctgggattacaggcttgagccactgtgcccggctgatattctttaccgaagtaatgttttccccaatttgattcaaaggtcattgataaaataggttataaaacactgtttttcaataatggatttatactatagaacatttacttgaataaataggtatagagaagagttaaagaaaatttttaagaaaatgttttcattttggttaagattttagaaacatgttttaaaacatttttaaaagtttaaaagctatttatgtatatccatcctttcatcagttctctcatagttccgtggtagtatgtacagatgtgaatttttttcctgcagcagcacagaattataattttaatagaatcatattcagctttgatgcttagaacttgagatatctgtgttgaacacctaaaattctgtatcatttttttttaaaatgtgttaagcaaagctggtattgaagttattttagaaaaattcttccccctattcctagtaactaaaaagactgatttttatagatcatttagataccaaccctgtatttatttttggtcttttgggtttgtttytggtgtttggtgtttgttttatttttacatttatttagcataatttcagtgctaggctataccacctgtccccccccccccytttttttttaaactcatcagtgctgttgaaagtgagtatgaagaaagaaaataaaggattggaaaggcacaggcaagaacttaactgaatcttctgcatgaatttcacagtatcaatagtgcagatttggatatcctcattcatagtatgtacacaggctaattctaaaattatgtagattatgaatattaaatattttctggaggcacatcaaaagtatggtacatggggcttatattgggatgtttttgcagtgtgatttccctgtgtcttgtattcatactcctcttagatgtggctagtatttcctttttttgtttttgttttttgtttgacagtaggtttgtttgaaatttttgtcattgctgttattaagtaggtgtggaaaagaggagtgctctgtcagccttgttatacttagactagattggatgtagttaagatgacatgactaattttcagtagggatgatcataccagaatccatcgtgagagcataagaagaacaattaaattcaacaaatattatttgaatttctatataataggctcttgtccagaaactaagagaagctaaaggagctttttacaggaaggaagaaaaaagtgaaggaaatagggatggacagatggggttgggcccaaagaatactaaacatgaagtataggaatattgtggaggcagttgaaccacagataagagaattgtttgtttttctttgtaaggtagggatgggaggttatggtatgtcagaaatggtattatataaaaggggaaaagccaccacctgaggattgtaacttagtatctgtgatgtaaaattttttctattttgcattttcataaaagaagttagtatgtaaggaaagggctgggagaggcactgatacctaaacaaaccattttgttcatatgtgtcttgtgataaaattaaagggactggattttactagccaggtatgtggctaggggaagatcatatgtgtaaagtaaggggttctaagtctttcacctcttaatgttctagcttactttttagctaaagtgccctggggattaaaccaatggaaattactctgaatgagtgtctcatcatacctcagatattctaatgctcatccatgtgaactttctgctttctacttccacttaactgcttcacacccatacatccacatttcctacccatcattctaaaataattaaggtttttgctctcattcagcaataagacttgattggaatggatagtagtagtttgaagtctttatttgtcctaattagtgtatttttattttgctgccaaaactgttaaatgcatctgcttatggggtgtagcccagttttgaagggatattgtttaatatctgacatgtacactagtattatttctttaaaatctgaaaaatgtgaatgcccaaaatatatatggccagtgtaagaagggggattatagaagtataactgttatttgttgggtagagtttgcataatttggaaatgagagactgtctcacctattctctctttgagtgagatacctcaagggtggagttctgttttttgagcattcacaaatttttatttctcattkcatcaaatatttatttagtgctgttgtgccaggcaagtctctgggtaaatttaatgttttaaagtgtttacagttaaacactttaaacctataaagctctaaaaatttccaacctctcaaaattcatttagggaatataactaacaagaggcacatgttttccagtggattcataaatacaggcagttgaaagtatcgggggaaccagcccccaatatttaaataggttctttttattttccctaagtgtcagcctgtctgagaaataaaaagagtacaaagagaggaattttacagctgggcctccaggggtaacatcacatattggtaggtctgtgatgtcccctgagccacaaagccagcaagtttttattagggattttaaaaagggaggggtttttattagggattttaaaaggggtatacgaacagggagtaggtcacaaagatcacatgcttcaaagggcaataaagatcacaaggcaaaggcaagattagaattactgatgagggtctatgtccctctctgcacatattgtcatgacaaacatcttaacagaaaacagggttcgagagcagagaaccaatctgaccaaaatttaccaggctggaatttcccaatcatagtaagcttgagggtactgcaggagwccagggcgtatttcagtccttatctcaaccacataagacagacactcccagagcagccctttatagacctccccccagaaatgcattccttccccggggtattccttgctgggaaaagaattcagcgatatctctcttacttgcatgcccatttttaggctctctgcaagaagaaaaatatggctgtattctgcctgaccccacaggcaggcagaccttatggttatcttcccttgttccctgaaaatcgttgttattctcttctttttcaaggtgcactgatttcatattgttcaaacacacatgttttacaatcaatttgtacaatagtggtcctgaggtgacatacattctcagtttacgaagataatgggattaagagattaaagtaaagacaggcataagaaattataagagtattattagggaaggagtacttctcctcctatcccatagttttaaatctatgtgctgatgatttccaaatttgttatctccaattcaaacctctggtatcttatattaactgtctgtgtaacatttggatttgccgtaggcattttaaaactaattaagataaatttttccctgctattttccccaaggtctcttactctatagtcttctgctttttcatagagtgacaccacaatcaactttgtttcttaaatcaaaaacttggaagttattctttattcatcacatttccttactccttttctgttggtgggttctgtcagatgtgccttttctgtattccaaatttatctatttttctttatctccactaccacaactcaagtagaaaccatcatcatctctctagaccagtgggtctcagtgtggtcggttgcctggtgtcaacctttttatttccggtggcacctttttatttctggtgccaacaaaatagacatagaaattgagggtaaaatagtgtcatagcatctgagtacataaccatctttctagaaattcattgctattatattttattcagttggctttgaattggaatttaaaacaaaaactcaaccacacatagtttgagtagcaccattgttgactgttgtaatagtcctaactgagctttctgccttcacacttgtactcttttcgatcctttgtccaaatccattgttttttttcttccagacttgtgacatgaaaataaaatcttttcactttctggcttaatagttataggacttgccagtgtcacttaaatgtaaacttaatattgcttaaaaagccctacatgaattggtctctgcatatatttgtaacctcatctcctgccattcttcctttcttctctgtggtctacacatttgttttgttcagttccccaagcgcagcagtttcttcccgcctatggtatttgcccgtattcctacctcttatctgaactgttcgcctacttgttcttggcaagttggcttgttttcatctttcaaatttcagcttaaatgccactttctttgagaagctgtttgcattatatctaaaggacacttttctgccagtatacactcattttgttcccttagtatgtgttccaattagattatgtgtttggttgcatttttgtttatggtctgggctcccgtactctgctgaaagctctttgagggcaggaattacttctgttttatttgcaatttaataataacttagcagtgatgcttgtacataggctccaaataaatgtttcttaagaatctaatttatttgaaatcaaacagagcaacagtaatttttcttatggtttattctcagcttgtaaattggcaattagcacacttgcttgagtagcggtagtagtagaagtggcagcagttagcatctactgtagttgcaggattcagtaaatggtaagtatgtgctaacacctaattaaggactttagcatgcattattattttttaaattctcacagcagtatcaagatatagaaactattatctcttttacgattgaggaaactgaggccgagcaaagttaatcagcttgcctagacagtggcaaaataaggatatgaactaaaataatctgagtacagacctttgctgttgatcactctgtcatacaaactccttatgtttctctccccctcccccgttaagatcaagcttctcattgacatgttcatcacagtgtctcagtctgggtccttacatactagggaacttgtttatattcttttgcagttatcttttttaactaaacctctaaactttatttttaacatttgtgagtttttttattttgcctttttcttatattgggtcttctcagccttgagtttagtaaatgtttgcctaaattcctgagggcatttgtggatttccttaccaaatccaacagtacttcagtcagagatttctcccttgctctctctttcttcttccctctcttcctctcccccctctctgccttccttccatctttgtttttttgtagttccctttagtcataatagcaactcctgtttcctgtttatccatcctgttacccctttatctctccaacaaatgccaaatatttaccgagactatattatattccacatgacactatgtagccaatgagatttatccatgacccttcatttctcaaattgatttaagaaaattctagtattttttctcagcaagaagaaagatgagaaaactgtaatagtaaaggcatatgtctcagtatgtgtttgtgtatatagttatctgctttctgtggctgggaaggtcatactactgaatcctatgacagtttatcacaatgagagagctatataaaggattacaaagaattagtgaaaatgtagcattttgttgctttttaaatagaacattttctgaaagtgtgtgtgctgtgttattcactttaaagatggtatccatttttaagaactgacattgaattagaattttaagtctcctaaatttttctttatttttgtcatttaaaaaacaaaactcaagcacagcttgtagcacattgagttattgtatggtcaaatactgaaaatagaacttgcagcactttttatcctaagatgtattcatcttgtgttaggttattattaccattatgtcaacaaatatttctaagcattaaaagttcattgtatataaacaaaatacaaacatatgggccaggctcagtggctcacctgtgtaatcccagcactttgggaggctgaggtgggaggatagcttgagctcaggagttcgagatcaaccctgggtgacattgcgagaccctgtttttgttaaaaagaaagataggaagatttgtgtatgtataacatgatcacaatcaatcatatggtcattttcagataatatagaccttcacatatacatgactgattacctgtaatgctgtatttctcacctaaaaagagacaagaaacaatttttaaaagaaagaaaaaaaaataaaaggaatcttttagccttagatctcaataacttctttccttttcttccaaaatggttaagcgtattcgcacttcgcacagtagtatttgctcgtatgctctcttttcacagttattacagtggtaatcagcttattatgaaattatttcttgtctcgctcttctcttttttgctagacctgaacatccatgaatgtaagatactcagtgcctggcattgtaatacagtagtccccacttactagcagggcatacattccaagaccccccagcggatacctgaaaccagggagggatagtaccaaaccagattcggtcaaccagaacatgtttctcttatgtctcccataaatttaatgccttttccatcttaacactatcactcactgtggctgaaacttttgcagtttgaggtacaaaggcaaaagtagcacgaatttctttttcttcttcgcagttacacggatggtagattcagtatttttatcgtagatgttagcaacctcgggatgtgattttatttttttctcttcaacttagtagtagagattttcttgtctacttagtagtagagattttcaccttttcacctaagggaaacacttaatgtcttttctttggtagtggcatatccaaattgtcagccttatcactcttacactttgaggccattcgcaagtaaaacaagggctacttgaaacaagcactgtgataacagtgagggagatgactactgagtgactaaagggtgggtagtgtatagaatgtggatatgctggacaaagagcattcacatcctgggtggggcagtgtgagatttcattatgctcctgagaaaaatgtgcagtttcagtcttgtgaattgtttgtttctggaattttctatttaatattttcagaccacagtggactgtggttaactgaaactgcagaaaacagaactatggatgttgtatattcactttccttttgactacagattgttgaataatgcattttaatatttttgtcaaacagtgttgagaagatagttgtaaaaaaagtcttctgatttacagttagtcatatgggaatacacataatttaaaaaatatcccttatttgtaagtttgaaaataagaatatggtttttatgacacagagttgtgattttttttctttttcacagtttctcaagcaagacctcccccaaatcagaagaaaggtgaggttgtgcatatgattttaaacttaactttaaaaagtaaatgattgcaaaaccaggcctgataattttcttgtgcagctgtatcacatgtttgtgcttggtatccattctgatttattagtgcccaagccacactgattattaaatattttttaatatccactggcttaaaatatttkttagatcaaaagttaaagttayaatttataatcttttaacttttagtagagaaagtaagtataatttctaataatatattttctacctgtaaattttgtctttataggatctcgaacacccattatcataattcctgcagctaccacctctttaataaccatgcttaatgcaaaagaccttctacaggaccygaagtaagtaatttattaaactatcctgtacgtaggatattgagataccattggaaaatagtagttactgaatcagtattacttatttggaaaaaacaaaatttcggtttctgtgctataggccttacacatagtatgaagcatacattttcaaaacagaatatattcttttatatttggatcctttagggaaagttacagaaacttctggctaaagtcctaatgaaaaaaggtactatcgtattaacttttaatatgaattgttttcttttgatgattttctctgagagagcttgaggaagttctaaagcaaattcaggttctctctgaatattagatgttataccctagtgggagtaagtgggcgggtaggtgggggcatagttatttaacctagatagcagtgaaagttaaagaagtgaaaatgaaacctataaatgatgataaaatttccaaatgcttaacttttcaaaaattttaatgtctattttccttcctcatttccttattaaaatgaatacagtcacacttgtacccagtttgttctaataaacatgcatcacggttattgggcacaaaataaatctcttccatccccaaccactttcagatttaaaatttaagtagtttacgtatattttcccatagcatttcttctattaatgaatatgagtagacataccacttttaaatattgtgactatttttaaatctgtatactacttcttggattggctatagtttacagaagaaagatggcaatataaaaattgttttaaataatcttcaatgatatagacattaacaaggtttaaaatgagccatgtttaagtgattttcagaatgctatcaagttttttagacacagtgttgcaaattttttcctcagtagatttttttttttttagtcatactcattgttaaaatgggtaaatattttatatattcagctaaataccattgcctgatgtgggattttaagatagttccttctgtcagaatgcgttttatgaaataggggatagaaaatggaggaattcaaaaattgtaatacatactctttcagaggataagagagatgttgtgatcactagttggagcgaaggtggttaactgtattctgctttaatattttcgtagtgtttgttgcattctcatggtacttcttattaaacagaagctgtcaaattgtcctgttgtgttacatacatacctgattatttaattttggtatttgttaggaatttggactgttgctcactaatcttaatatggtattatttgaagtgctactggcttgaagttacgtccttccagagtgattttgtgattgctttgccaggtgcttcaagaatatctcaagccttgagttgatttttgtgttaaattcttaacataaggatttctagtccatctgggtagtataaattcaaatttgaatcagacctgagtgacattggaacctggctgacaaattatccaggagccccttttcttcccctgctccagaggtagagcaagatggatatgcttccccgacatttgattggaaacagtttttccctctactttaaccttttgttgatcatgtgactcttctgtggctctagttccagttcctctgtgtcctttccctatgtagttggtaaaagccaattcttagtactgcctacactttcctcatgggcaacaccagtgcactttattggtcgtcagcattttcttcatttgtagccgatgactattttctttctagctcagcatttcaggtatatgttacattgtatttagcatttccaggtgtttatgtataaagttcccgttccaataatgcagtgtaccagatagtataacccattttagtaggaacttattagtctgccaaatgtagcaaatttcttaattcatgtttcataattgtttgagttgtacctgaggggaattaaaaatgcagattattggctgggcacggtggctcacgcctgtgatcacagcactttgggaggccgaggtgggtggatcatgaggtcaggagatcaagaccatcctggctaacacagtgaaaccccgtctctactaaaaatacaaaaaaaattagccgggcatggtggcaggtgcctgtagtcccagctacatgggaggctgaggcaggagaatggcgtgaacctgggaggcggagcttgcagtgagctgagatgccgccactgcactccagcctgggcgacagagcgagactcctcagaaaataagaaaaaaatagattattttataagctatttggccacttagattgtttgcagttgggatacacttgacattagaaataagttttaatgtttttctaatcagtgatgttgatgccttaactatgagacagattcagatgaatttagtgataactctcatttggggagattgatgtgtatattgggtttgttgtttcaactaacatctacagagcaataactaaaaagtaaattactctagatgaatatacaacacgcccaaccttctaggagctcacatgagagtggtactggtttgtcactagttgcagctgctgagaaatgtgtttagcacttggtgtaaaactcagtttcaatgccttattctaagtacagtgaaaaatatactgtcttttgactctctgcaaacttgaatcacattctgaagataggttcagaaacaaattagacctcaacagttagcctttaaaagctttatctagcttctctcaaattatgtgctgttagtgagaatgtatataatagtgatttttcatagtatataaacaacttgaaatgtattgttttctacaacttgagacctaaaaatgatatacagtatatctagtttgacccactcttattcctaaacaaaaatactgatatataaaagaaacttaaagtctattttagccttttacctctgccatttagttgcagagcaggaaatacaaccagatctcctgatgatcaatttagtagtcttattatttgtactgtggagatacctaacaaacattcagattaagaaattaagtttttatacagttacatagaaattaaacagcctggtcctaaatcgcttttgggcaaagaatgaaattaacacaggtttttttttttttttgagacagggtctttctctgtcacacaggctggagtgcagtggtgtgatctcggctctctgcaacctctgcctcctgggctcaagcaatcctcttgcctcagccttctgagtagctgggactacaggtgtgcactaccacacctggcaaatttttgtattttttgtagagactgggcttagccatgttgcccaggctggtctcgaactcctgggcccaagtgagctgcctgccttggcctcccgaagggctgggattacagggatgagccaccatgcccagcctcaaaaaattctttgaaacaaatgaaaacaaagatacaatgtaccggaatccctgggacatagctaaagcagtattaagaggaaagttcatagtgctaaatgcctatatcacgaagttagatctcaaattaaccacctaacgtcacacctgtaagaactagaagaacaagagcaaaccagtcccaaaggtagcagaagaaaataaccaaaatcagagctgaactaaattgatatgtgaaaatccatgcaaaagatcaataaaaccaaaatttggttctttgaaataatacgattaatagactgctagctagattaatagagaaaaacagagaaaagatcccaataaacacaatcagaaatgacaaagggacattaccaccaactccacagaaatacagaaaaccctcagagactatgaacacccctgtgcacacaaactagaatacctaaaagaaatggataaactcctagaaacatataatctctcaagattgatttaggaaggaattgaaatccttaacagaccaataatgagttccgaatttgaatcagtagaaaagaatcctaccaaccggaagccccccaaccccaaaccagacagattaacagctgaattctaccagatgtataaaggagagctggtaccagtcctactgaaatcgccccaaaaaatcaaggaggaggggcttccctaactcattctgtgaagccagcatcattctaataccaaaacctggcagagagacaattaaaaaaagaaaaaacctgctggccagtatccctgatgagcacagatgcaaaaatcaacaaagtattagaaaatcgaatccagcagcacatcaaaaaactaaaacaccctcatcaaataggctttatccctgggatgcagggttcgttcaacaaatgcaaatcagtaaacatgattcgtcacataaacagaactaaaaaaattacatggtcatctcagtagatgcagaaaaggctttcagtaaatcctaaaatcccttcatgttaaccctcaacaaactacccatcaaaggaacatacctcaaactaatgagagccgtctatgacagtcctacagccaacatcatactgaataggcaaaagctggaagcattccccctgagaaccagaacaaaccaaggatgtccactctcaccacccctattcaacgtagtactgaaacaggaaatgttcctttgtctccctcccagggcttgcggtgggggtgtggcttgcttcttcaatacccagctgctgctgaaacctctaggggagcacaccgacgggcaggctgtggagctcagactccacggcattgtctaggggtgaatgtttacagctgaagccccagtggacgtgtgttacagggtgctcttttggtttaccctataggcggcttgtgttaaccagctcagaccctctaccttatcacaaggacaagatactctgctctatcgcagagtttcttgtcttggtgtactggaagaatcggatcacatgtaggcttggagaatgagtgcaaggttttattgagtagaagtaggggagccagaaaggggatggttttcccctggagtccagccgctgtggccagaccctgcgtcattctgatggcctgtcagcctgctggtgcctgttggtgtgctcttgaccaccaagagcttgcttgctgtgtcttcttccgccaatgtgttcctcacatccagctgcttgtgtcttcttctgctgatatgctccttttgacgtctggccacctgtgtgtgtgcccactagggtcttgggtttttataggccctgggtgggggcatggcgagctagggtggtcttggaaaatggaacatttgggcttgaaagcagaagtgcctgtcctcacgtaggttcatgagggtggagccctagccagggaccaggccctcctctacccagcacttgccttcccccattccatatcatttaaagggaccatgctcttgccttcccagtactcctgtatcagtactggaagtactagccaggggactcaggcaagacaaagaaagaaataaaaggcatccaaatagagatgccttctatctttgtagacaatatgattccatacctagaaaaccccatagtctctacctaaagattcctagcactgataaacaagtttagtgaaatttcagatacaaaatcactgtacaaaaataagtagaatttctatacactaataatgtccaagctgagaaccaactcaagaattcagtcctattcacagtagccacacactcacacatgcacacacaaaacacctgggaatacagctaaaccagggaggtgaaagatctctacaatgagaattacaaaacactgtgaaagaaattagagaagacacaaacaaatcgaaaaacatttcatgtgcatggataggaagaatcaatattgttaaagtggccataactgcccaaaacaacttacagattcactgctattcctagcaaactaccagatttcatttttctcagaaattcgaacaaactattctaaaatccatatggaaccaaaaaggaggcagaatagccaaagcatcctaagcaaaaagaccaaagttggaggcatcacactacacaatttcaaactatacaacaagactagagtaaccaaaactgtagtactggtacaaaaacaggcacacagaccaatggaacaagttagagaatccacaaataaagctgcccagcagcaaccatctgctttttgacaaagtcgacaggaacaagcagtggggaaagtgctcattattcagtgatgctgggataactggctagccaaatgcagaagattgaaaccgaaccccttcctttcaccatatgcaaaaatcaactcaagatggattaaaagacttaattgtaggacctgaaactataaaaaccctaggaaaaaaacagggcatgccattctggacataggccttggtaaacattttatgacaaagtcttcaaaagcaaatgcagcaaaaacaaaaatagacaaatgggagctaaaccaaaaagcttctgcccagcaaaagacattgtcaacagagtaaacagacaacatacagaatgggagagaatatttgcaaggtatgcatctgacaaagatctaatacccagaatgtataaggaccttaagcataaaacaaacagtcctgagcaaaggacacgaacagacacttctcaaaagaagatatacacatggccaacaaacataggaaagaaatgtttaacatcactaatcattagagaaatgcaaatcaaaactgcaatgagatatcatctcacatcacaccagtcaaaatggctattatgaaaacatcagaaaataatagatcttggtgaggttgtggagaaaagggaatgcttatgtgctcctggtgggaatgtaatttagttcagccaccatggaaagcagtttgcagatttctcaaaaaacttaaaacagaactaccatctgacccagcaatctgattactggatatatacctagaggaatataaatctttctaccaaaaagacacatgcactctttaagttcattgtggcacgttttacaatattaaagacatggaatcaaccaaaatttccatcagtggtggattggataaagaaatctggtacatacatgccacggaatactatgcagccataaaaaacaaaaccatgtcctttgcagcaacatggatgcagctggaagccattatcctaacaaattaacagagaaacagaaatccaaataccacatgttctacgtgggagctagacatcgagtacatgttggacacaaagagggaaacaaaagacaccagggcctacttgagggtggaagctgggaagagggagaggatcaaaaatacctgttgtgtactgtgcatattaccctgggtcatgaaataatttgtacaccataccccagtgacatgcaatatacccatgtaacaaacctgcacgtgtacctcttgaccataaaaggaaagaacagcaaaataaagaaattgggttttattctggtcttgatagtagtgtgataataatccagaacaaagcaaagtcttctacaagagtcaaggcctaagtcagtgttagaataattatattttgtaatctgaatgctctaatgttgaaaatttcctgttaaaaattttactgatcactgggaaacagttttattcagcaacataataaatacccagaaggggaatgtgaatgctctggcttctttctcagtaaagtaacaatgataactttttttttttttttttttttttttttgagacggagtctcgccgtgtcacccaggctggagtgcagtggtgcgatcttggctcactgtaacctccacctcccgggttcaagcgattctccttcagcctcctgagtagctgggattacaggcgtgcggcacaacacctggttaatttttgtatttttagtagagacggggtttcaccatgttggtcaggctggtctcaaactctgcctgcctcggcctcccaaactgctgagattacagacatgagccactgtgcctggcctaatgataacttttaaagaaaagccccttcacatctaaaaaaaccatactgcttttaactgattcaaagtgagaagccaatttgcaatatatgtggatttcaggtttcactaaatgtagaattgaattttaagtgcctccaacttaagtagctttctttacaaaatctaggtatcccggcacatacaagtatattcatacctgaattctttttttaaaaaatttttagtacttttgaatgacaaaatattcattgagctgttttttcattaatagtgtggcttttatagtaaagttttagtattctggcagatgtgagttttttgattgcatatgtcatctgatgagattcctcaagtaatttacaattgtgtgaacaagatatacttttggtccttgaaatagatatgataatataacagaaactgtcagactcacagaaatggatcacattaactgcttctaaaaattgtttagtttttgtatgagctttccaccttttagtcaatatatatggcttttcatgatttataatctgaaatacatgtattttttggtgatagtttctgtgtcttgcagtctgtctgtagtctttccaactaaattatgatttcttcagagacaagggcttgttattttattgttatttgtagctacattgtttaaaacagtgttagccaaataatgagtactaagtaaataaagaaaaagaaaaggatgagggagcacattgagaagagaagattggaggatgggggacttgtatacctgaaatttaaagtttgattttatgtatgtgtgtttgtgcaacccgtgaattaatttattgcatttatctccaaattgaaataccttttttgatacatagtagtcatatccacrcctgggactcgattttagttcccatgatgcttcattacacttggtattgtgttgtttttttgttttttgttttttttggcatttactgtatttttttaaccaattttatgatttgtgaatttggtgttatccaatctcacaaattttagtaattgacaacttttaaaaaaataaatatatctaactggttatacaaaatttacagtaagtttgtggaatgttaaaaaaaagaaattgtcttttcattctccactctcaagaacctttgcagtgttcatctgaatgtattacaaatctaatacttaaacactgttttatagcagaaaatagtgaatagtgaaagaaatcacaaagtaaattttagtgtcattctctttagtcttgtttactacagagaaaccagacaattaaacagaccacattcttaggatagaccatgcctaatgtttcttccaagtttaaaacactcccttcattgtttaacacctcattgcaactgacatctcccctacagtttgagtcagctggaggctttgctatgtaattaatgcataattgaaacctcctccacacaattatggtactggctgtaactcatagctcaagttggatagaaatatccaacttgcaaatagcatagattctatttagttttatgtacaactgaggattctttagttttgtatatcccttcaataagtaaatgaaacaaaraaaaataataaaaccctttaacatgctaacaaacaaaattgagattgtattatggaagtattttaaaaaatacactttacatctataaacatgatcatgaaagttgtttattggaactgtaaggttatttaaaataaacgattgggtgtaacttcctgattttggccatgttggcagccacatggggccgagttccaaagaggaaagattgtgcgcagaaggagctcagacgctatgtagagggttctccttacatccgccaaatactattcagcacatgtatgtgagaaaactacatgaggcctgggaaaaagtcaccgggaaagaaacaggcagaaaaattaccagagcgtagactggactgagaatagtacttgttcccaacagccccaggcaatgcaaaatgatctagccactttggaaaataatatgggagtttatttttttcccatcacattgaaaatactactctactgtcttctagcttcctttgttttgatgataagttagttgttagtgtgataatcagtcctatgagggaaatctgttccgtgtggttattttaaagatcattttaaatttatctgctgtagctagatgcggatttcttttttatataccccacttggaatttgtcagaattaaatctgcgtattggtgtttttcatcagttctcaaagtcttggtcgttttgataatccatgaaataagctttttttttttttttttgcatatgttctgttccccatccccccttttttctcacctctttttggaacttaaatgagacatactttagaccttctcattctatcttccatgtttcttaaatgattccattttctgtctcattttctctgttgcctgcatttttcattatttcgttacttttaatttatagttgtccatttctttggccacaccttaatctgatcttaagcctatccattgcaccttaaacttcagatattttatatttcagtttttatggttctgtttagttatttttcaaaccattatctgtctttgtaattcttttttactgtacatatttgcaagcttgttttattttctaagccttggtttttggtaattgtagcatttggagtccttagtcatcttcctttgaatgttgtttcatacatgataacttgttttcttgtgggtttagttttttactgttcattttatttttttttattttgttaatttaccaatttactgttcattttccttggaattattttctgtagaaattctttgatctccaagtgaatatgacagaactccagagaagatgtgcatctgtgtctgttaagcacctgggagcattaccaatctagcataactttaaattaaattctctattggaggttttaaatatctagatactgttgttcttgctgcaaattcaaatgaggtcagttttaccatttgagatatttgattttccttgcagttgtcaaaataagggtagggttagggttggggttgttggggaagagggtgaacagtgagtttatttctagtttaccattatgttgaacttaacccctgagtctcagctttataagggaaggaactcttattagattttctaccttgagcagaatttggacttattttctatttcaggagcccagtgaaatatagtgaaaaaccaggcttaactttaattggtttgcaaatccaatgaatagcagtctgcagtgttgttcttacttctttgggttcctctcttttcacttggtctttggtctaagtattttttataccttgcgctagctcagataggcttttaagattttttttcttttttcctttttttttttgtattgatacgtaatagacccacatattttgaggtacatgtaatattttgacacatttttataatatgtaataaatcagggtaattaagatatatattaccttaaacatttatctttatgttggaaatattcaaattattctttgatagctattttgaaatatactgtaaattattgtttactgtagtcactctgctgatttattgaaaactaggtcttatttcttgtacctgtatttctgtacccattaatcaacttctatctcctccactcccccacccttcctggtctctgataactaccagactactcacttcatgagatttactgtttacttgtttttttttgggaattattgttgcagttacttaggggatctgtcatattatacgagaaacagcataaagtcatagtttttaagggtcataatttgttagtgtttactcaatgccattgttccatgtatatatatatatatgaaatatgcattcacatatacacatatatgaaatatgcattcacatatacacatatgaaatatgcattcacatatacacatatgaaatatgcattcacatatgcacatactaaatttatgcattcacatatacacatatatgaaatatgcattcacatatacacatatatgaaatatgcattcacatatacacatgtgaaatatgcattcacatatacacatatatgaaatatgcattcacatgtacacatatatgaaatatgcattcacatacacacatatatgaaatcattcgcatatacacatatatgaaatatgcattcatatatgtacatatatgagtacaagtgccataatttccaaatggtggtctcagagcacttagaaatcttacatggttttatcaaaataattatttcagaccaattttttagctcaaccaatgtttgaggatgctgaatgtgttttctttttttttctattgttttaaagatttattatgttgcctaaatttatcttcttaccttttgtctttaaaaaaaaatttatttccacaggtttttggggaacaggtggtatttggttacatgactaagtagtttgtgagattttggtgtgcccatcacccgaaccgtatatgctgaacctgatttgtagtcttttatccctcacccccctcccacagtttccccctgcatccccaaagtcaatttcgtcattctcatgcctttgcatcctcatagcttagctcccacttacaaatgagatcattcgatgtttggttttccattcctgagttacttcacttaggctgatagtctccagttccatccagattgcagcaaatggcattaatgccttcccttttatggctgagtagtattccatgatatatatatatatatatatatccacatactacggtttctttatccgctagttgattaatgggcatttaggttggttccacatttttgcaattgcgaattgtgctgctgtaaacatgcgtgtgcaggtatcttttttgtatcatgacttcttttcttctgggtagatactcagtagtgggattgctgaatcaaatggcagttcttcttttagttttttaaggaatctccacactgttttccatagtggttgtactagtttacattcccactagcaatgtagaagtgttcccttttcacttcatcaatgccaacatctattgttttttgattttttgactagggccattcttgcagaagtaaggcagtattgcattttggttttgatttgcatttccctgatcattagtgatgttgagcatttttttcatatttcttggccatttgtttatcttcctttgagaattgtcttttcctgcccttagcccactttttcatgggattgtttgtttttttcttgctaatttgagtttgaggtagattctggatattagtcctttgtcagaggtatagattatgaagatttttctcccactctgtgagttgactgtttactctgctgactgttccttttgccgtgcaaaagctctttagtttaattaggtctcagccatttatatttgtttttactgcatctgctttttggttcgtggtcatgaaatccttgcctaagccggtgtctagaagggtttttcctgtgttatcttctagaatttttctagtttcaggtctttgtccttgatgtgtttcaggacttaagtccttgacccatcttgagttgatttttgtataaggtgagagatgatccagtttcattctcctacatgtgacttgccaattatcccagcaccatatgttgaataggttgtcctttccccactttatgtttttgtttgttttgccaaagatcagttggcaaaatacttacagttggctgtaagtatttgggtttatttctggattctctattctgttccgttggtccttgtgcctattttataccagtgccatgctgttttggtgactgtgtccttatagtgaagagaagagaatgaaatgaagagagtggatatctttgtcttgttccagttttcagacagaacgctttaaacttttccccattcagaactacgttagctgtgggtttgtcatagatgacttttattgcattgaggtatgtctcttgtctgccaattttgctgagagtttgaatcataaagggatgctagatgttgtcagatgctttttctacatctattgagatgatcatgtgatttttgtttttaattctgtttatgtagtgtatcacatttattgacttgtgtatgttaaaccatccctgcatccttggtatgaaacccatttgatcatggtggattatctttttgatatgttgttggatttggttagatgtattttgttaagaatctttgcatctgtgttcatcagggatgttggtctgtagttttcttttttggttatatcctttcctggttttggtcttagggtattacaggcttcatagaatgatttagggaggattctctttctctatcttgtggaatagcgtcaaaaggattggtaccaattcttcttccaatgtctgatacaattcagctgtgaatccttctggttctgaacttttttttgttggtaatttttaaattaccattttaatcttgctgcttgttattggtctgtttagggtatccagttcttcctgatttaagctaggaggtttgaatcttcccaggaatttatccatatattctaggttttctagtttttgcatgtaaagttgttcatagtagccttgaatgatattttgtctttcggtggtgtcaggtgtaatagctcccattttgtttatcttttcaaagaaccagctttttttgtttcatttatcttttctatttttttatttttgtttcaatttcatttagttctgctctgatgagaatgctacatgtaaagcagcacactggttggtgtgccatatatctgagcgattggctttgccttcaagaaaactgttgtccaggtctggcgtggtgcctcatgtctgtaatctcagcactttgggaggctgaggtgggaagattgcttgagcccaggagtttgaagtttgaaaccagcctaggcactacagcaagacctcgtttcaaaaaaaaaagaaagaaaagttacaagaatggaaacctgaagtctgttagggagataacagactttgtagattatcataataataattttaaaagcccactgtaaaattgtagaaaattgaattctactttgaataaaaaaggtaaattcatagtgaaatacatatggcttaactttagaattaaataaatgcctaaatatatccatagagatgtatttaaagttctataggctaggaagcaaaaattataacattcgtcatatttgaatttcagatgcmtttttacctttgggatgctaccttatggacaactgtattattatatattgataggccagaggtgatttgttcaaatttcttgtgcaagaggaggcatagaaataaagtactgttgtttgttatttaaggcttaagtctgggtagtacttgataggcttaaattttgccctctttaacatcctaagttgtattccatctggtcattgctgccattagctgatgcttctaagctgagagtggagttgtagtggaacaggatacatttgacagttgacctagggtagctgaattgatagtgctgtaatatatagcactttggtcacattctttgttaagtttaattagctctagagtattatatactttactaattccaatatatacagttatttttcatgatttaatatctctgaaattgtaatatgtcatataattgatggtatcttagagttgctgtggctaggtggcagtcctgacatagtttttattactggcacatgcacaaaatagtgatggcaattcctrgtttcatcagttctgtgagatatgtgcatagatggtactatatatgttgaatttaaatgtagtgcaaaatatcttcaaaaaagatacggtgcaatttagcattgaaacagttattackgaggaacaaagagagaggactcacactacctgatttcaagacttactatcaagttgcaataatccacacaatgtactaacgatgtaaagatagatagatgaatgaaaataatggagattgcttaaatggggctatactattttcgacaaagacatcaatgcaattcaattaagaaacaaatgccttagcaataaatggtactggaacaattggataaatatatgggtggagaggaatgactgtcagccattacctaacaccatacacaaacattttttaaggtagattgtacacacaaacttaaaagctgaaactgtaaggcttctagaataaagcataatagaatgtttttgtgactttgaaatagttttttttttgaagggtgaaccataaaaagaaattttaaaacttctgttcatcaaaagacaccattaagaaaataaaaaggccagccacatgctgggagaaaatcttttcattgcacatttgtaacagaaaatttgtatctagaatcctgtgtgtcagtatttttaaaaatcctattaaaaataagcaagagatgttgacactccacaaaacaaggtatacaaatggccaatcagcgcatgaaaaaaattctcagtatcatcagttgttgaggaagtaaaaattaaaatgatgttgagatactatttcacatacccattagaaagactaaaattcaaaagactagaagtctcatacatttttagtggaagtataaaatggttcaactgctttggaaaacttcctggcagtttcttataaagttatacataccccatgattcacttggaggtatttacataagagaaatgaaagcatgtgttcacaaaaacacttatacaggaattatttatgttagctttacttgtacgaacccagaccttgaaactaccctgctgtatactgaacatttgtgtcccacaaaatttatatgttgaaacttagtcactaatgccccagggtatttgtgaagtaattaggtcataagggctctgccctcacaaataggataagcacccttatgaaagtgatcccagagagcttccttgctccttctgtgataggaggacgcagcaataatacggtttacaaaccaggaagtgggacctcactagacaccagacttgccaatatcttggtcttggcttcgtagcctccagaacagtgataaagaaattcctgttgtttacaagccaccccagtctgtgctatttctcttactgtatcctgaacgtactaagacacaccgaaatgtccactagcaggagaatggtattttcttacaatagaattctacttaacaataaaaaataatgaactactgatacatcccacagcaggtatgattatcagaaacattacattgaatgaaagaagccaggtacaaaataatacatctggtatatgagtgtgtctatataaattcccaaaacaggaaaaactaatggaaagcagaagagtggttgcttgttaggaagggaatggcatttgactgaaaggtatataaggaaactttctggttgacacagatgttctttatcttgattggaatggtgcttatacttagtatacgttcttcaaaactcatctatttatgcatttcactgtatgtaaattttatgtcaataaaaatgttgtatattcaaaaatacactaaaatgaagcagtggagtgcagatttgatgtttgaattcttccgcattagaggaatgacattcccattcttttttttttttttttttctcctgaggcagagtctcactctgtcccccaggctggagggcagtggtgtgatctcggcttgctgcaacctctgccttctgagatcaagtgattttcctgcctcagcttccagagtagctgggattacaagcgcacgccaccacacctagccaatttttgtatatttagtagagacgggatttcaccatgttggccagacgtcttgaacccctgacctcaaatgatccacccaccttggccccccaaagtgctgggattacaggcataagccactgcacctcgccctaatcccgtattttttttttttttttttttttttttttgcaaagcaacaaccaggagctttatggaacctaaaaatggaagatagcaatagtagatgaacctattttgcctgagatacatatgaaacaattgcctatcacacacccagcagtgcagcccaagccagaagaaataaccagttttctggagggatgatgactgtgatttatgtagaatatcatagtttaattggcagtagttttttcctttcatagtggtacaatataatggtgtagctcacaatcattgtgtcttagatttgatgaactgcagtagggtgaacaggtaaaattatattgactctgtggaatactaatctttttagtagacttaactttagggaagaggtcataagatctatccttatgttttcaaatgagatccttgctgaaaagcgttttgaaataaagccttttttattgctaatagagatgactaattctaagaaaatacgtagatataatcagaaattaacatgctacagcatctaaaaattctaggacggtggttaattgtaaaaaccacgttaatgtttctgagcttttataaaacatatcaaccaatgtgtagacctgcaaaagttgaaataggtgtataatagactttttattagtttggtattgtaatagatcactcatttgtatgtattttgcattctagtcatatgattataagtaattttgtttataagtttataagtaattttgtacaagtaaatttaaactttaacaccatgttaaaatttcagaagccagaaaagagggagatgcagtcttatatttaacaacttaaaacagtttaaatcccatgtagttatagactgagataaaacaaagcatttctcttggcagtagaatccctttgttctgtgtgtgtggaacataagttcaagagggcagggactatgttttgtacaactatgtatattataaaacttatagcacaatgtattgcacatactattaaaacatttttgttgtggctttttattagaatgcaatttcaaacaatgcacacatattaaattttctaaataatgtgtttcattattcaaagtattagtactgtctggcattttctaagtgagcttgattaataaataaaccaaatgccataggaagcaaatgattatctgggggaaatttttaaatgatatagaaatcttaactttttaaccaaatgtaaaatggatgtgagaacaatcagctcagaagcaaagttcagtatcatcattatcaccatgaactaaaaactttctagacaataaaattagtattatgtgatgaatccaatatgtgtaattgaagtttttcagagaactctaattagtgcaagttctcctgtgctttttggtcctttcaccctttcatctcttttaaactttagaagcagaatgatactctcaatatattgattgtattccctccattttattggagagactagatcatagttaataaaatatgttattggactgttaggattatgtatatatttagaaaataagacttttaaaatactttgtgaacactagcaaattttacaggtggtaatagctatccagattgctaagttatttttaagaatatctgtcttgagaatggatccacataagtaagttgataaatgccactagttgataataatagcaggttatcagcatgcactgatttaattttcatactttaaaattttcaaggctactctgaagtttgatggtatttttgtaattttgctgaagcataaaatcttaaaaaaaaaaaagttttatgaagctcctggataggctaagtcgtaaagaagcctactagccacaacaactttttcatttcaaatgaccttttgatttctaataaaattcctctttatcatgaagttttcctctaatagaatttgagaaattaagtattagtgtggaaaatgctaagtgctagttgaatgaatataaattgtgtggtgttacacacacatacacacacacacacacacccaacttagggtctgagtgagcttgagttctatttggtatacagaggaaagacctatacactccatgatctgtacttgcagagcaggtttatttaaaaacaaacatctttagtttaaaactaattaatgtttaaaaattatttcagaccgggcgtggtggctcatgcctgtaatctcagcactttgggaggccgaggcgggtggatcacaaggtcagcagttcgagaccagcctgaccaacgtggtgaaaccccatctctactaaaaatacaaaaaaattagctgggcgtggtggcggtcacctgtaatctcagcaacttgggaggctgaggcaggagaatcgcttgaaaccagaaggtggaggttgcagtgagccaagattgcaccactgcactgtagcctgggcaataagaaaaaactctgtctcaaaaaaaaaaaatatttcaaattatagtttatcttcccattttcatcacgtggaatacattgactttttctcatctctgttttttcaaagatttgtcccatcagatgaaaagaagaaacaaggttgtcaacgagaaaatgaaactctaatacaaagaagaaaagaccagatgcaaccagggggcactgcaattagtgttacagtaccttatagagtagtagaccagccccttaaacttatgcctcaagactggtaagatagtctctatatatatatcttttcacaggtgttgaacccaagagaatgaatgttgttattgccgttgatgacgttgctttttaagagatggggtctcactatgttgcctaggcagaacttgaactcctgggctctgtcagtcctcctgcctcaggctcccaaatagctaggactacaggtgcatgccactgcacctggcagcctatattttttaaatattcgtttgttttctgtatattgttggttgttttttctcatgtgagcaattatcaaattttatcatgggttctaaatagaaactgtctttgaaaagtgtgttgatgtatatttactttggtcatcaataatgttaacattctaataattcctcaataactttatattttggataagtaaacttgattttacttataagaagaaacattccaacttctggaaaacccagtgtaaaaaattctttccacttgttcatttgttccggatcagcttgtagaacccagcaaattaggctaatgtaaggtattctatgtttagatttttggtttggagaatttcaattttctggtaagaaaaaaatgaaggcatattttattgtaagggaataatgtaataaaaataggaatagctcttttatcatggtttaacacttttattgaatttaaatgtcctttaacaaaatattaagctgtttataatataaagtgcctataaatttagacacacaaattaccttatttctttaacygggagtaaaagttgagtatatatccgtgatacagagaacgcaacacatggcacattagatgaatttacctttgaagtacttgttagttttcaggcattaagaagtcaaggcattgagaatattaatattaaaaattttcttaagaaaattgcaaccagggggcactgcaattaattagtgtcacagtatcttatagagtagtagaccagccccttaaacttatgcctcaagactggtaggataattctctctctctctctctctctctctcacacacacacacacacacacacacacacacatatatatatttaaaatttatatatttatttatatatataatttaattataatatatataatttattatatatattatatatataatatatataatatatataatatacatattatatatataatataatttaaaatatatatatatttaaaacacacacataaatatatatatatatatttaaaattataattcttctctggtacctaatagatactttgagtaatatagaaaatgagtaagatgagaatttcagatatcaagcttaaaaccaagtaggaaagttatatcacttgtattttatgtttgcagtgtatttgcagaaataatacagtgtatacaaatctcatcactatgctgtaaaatactgcttgtgtgtattagttagggtctccagccattgaagcctccagcattttccctacttccttattttccttttcctttaattgtccttccaagaattcatggggagtaacatttttattctgcttccgtgctgatgctatgagacccagtagaatataagtgacctctgtccagcaaattccctttgctttggcaggcatcttgggctttcaactgttgtaagttacatcataaaactgaaagattatttaatagtgtgctgcattgccaaagatgattttgacagtttgaggcatgtatcccatgaaaggggaaattttttaacttaagatttaattttagtctcagagattttttttaatttttttattttattattactatactttaagttttagggagattttgagcaggttgagaactttaagctggcagtttttaatagttgtaggtctttgcttgaatagaaggtaaccctggtttaatgtttttttgtatgtctgcagtcgtcattaattgcagtggttatcaaagtgtggtctgcagacctcaggtcattcctaagaccctttcacagagttgcaaggtgaaaactattttcataataatactgagatggctattctcatgatttatctgcccttaaataggaacagtagcatacccagtgccctagcatagtaatttattctcctccttctcttcttctcttcttccttttctctgtacttctaccttcctcctttctcttctccaacatgcccatgcacttgtttcttcatttatacaatgaggtttctaatacagtgaggtcattggattgttttgaagattaaatgtgttaacatcataagtaacgcataaagtccttaaaatggcacttgacacatagtaaatgctcaataaatgctactaatgttaaccattattgctgataatgttgttgttttgttcccaccgctttagttattggctttaactgtttatggcagtacttcttataatttctcaattcaattaagtattttataaaataatgaaatttgagggcctacaaagaagtttgttctttctaggaaaactgggttgtttggttgggaaaaaaatgctttaaaaactacttataaatttagggtgaatgaaacagttgtaaaacaattgcaaaaattataaaagtctaaatggtttctatactcagattacttcctaagtaatcacaagaactcagataaggccctgggacctcgtaaaatggttgatgagttcctataatgtaatatttttagttaaagtaaaatatttaagatgtgtttgaattttaaatgattttttaaacaacttttttgattaatagttatcaaccactattccctattacattggaaaagtgggccactactctaattaacagaagggaacagaaagggcaaacaagattacatacgagtattgtccattgaattatgtttaaaagacttaggtgtaaaaaccagatacatgagaagtatagcaatcattaatacattctaatggcaatatcatattgaaaaggtggtaagtactgtatttgcttcatggaaggattgataagactctwtcacatgaatgtttatgggactgttgcctaagggatttatagtagctaaagctcaagtttgaaataatctccgtctgtcccctacctccccccacccacttttctacttgtagggaccgcgttgtagccgtttttgtgcagggtcctgcatggcagttcaaaggttggccatggcttttgcctgatggatcaccagttgatatatttgctaaaagtaagattctctttgtatttactgtatccagtatagaaatgttctcactttatttaagagaaacagtcatatagttctgcgcatatgatgtgtatgtcaaaagattgctgttaagtaacatatgttaatgtttaagcatctgtgacatatttttaaaagctttgtatattaatactttctgtgtaggtatatctgaaagtgaatattgcctatcccacaacattactaattatttttagatcacttaaaaatcattggccagacacagtggctcacacctgtaatctcagcactttgggaagctgaggcaggtggatcaccttaggtcgggaggtcgagaccagcctaaccaacatgatgaaaccctgtctctactaaaaatacaaaattagccgggcatggtggtgcacacctgtaatcccagctactcgggagactgaggcaggagaatcgcttgaacccgggaggcggaggttgcagtgagccgagatcacttcagcctgggcaacaagagcgaaactccgtctcaataggaaaaaaaaattaatactgttgcatgtccatagattttgattaaaattgatgccagtttttttttttttttttagacggagtctggctctgtcgcccaggctggattgcagtggcgcgatctcagctcactgcaagctccgcctcccgggttcacgccattctcctgcctcaacctcctgagtagctaggactacaggcgtccgccaccacgcccggctaattttttgtatttttagtagagagggggcttcacaaggtctcaatctcctgaccttgtgatccacccattagttattatgaatgtcaattgtacaattctgaaatgtcttatgtttttagcagccccagtttttgttagtggtaccatcatttttccttagaaaatacccaagcttgaaagttttagtcatttgttcttctgttaccttcattcatttaaaaaaaaagaattctaatattactgactgtaggaaattggtcagggtggtgggagaaatagaaaaaagatgcaaaccttcttggaaggctgggaggttttgcaaaagctttgaaagataatttggctgaagtcaactggattctcttacccggagcctgatagcaaagattagataacctggggatgtaaagaaattgatctagataagttagtttacttaggcctcccagaacgtggcctttaatcaactgcaggagtcgggaggtaggggtggcgggttggaggtggtgtggtggggtggcgaggcagtggtgaccacgttaattacccacaagtgtgttgactcaaagcctttgtcattaaatctgtaataaaaagatgctggcatgtcagggctgcggctgctgtgactctttacggcatcctcctcgacgtctgtgagtggcccagtcccctagctgcacgtccaggaaaaaacctgtgtctgcgtacattttccttctgtcgttcggccaggatctgcaggttgggcccggcaactgacattatgatagctttttatgttatttctgaaacttgagtgatacacagagttggtaaatgggaagttaaataaaaagggaatgagaattttaatgaaagtaaaatgtcaacgagaattcttttttacctacttgcttgccttgttgaataatgtttcaacaaaaaatgattaggatgtctttaagatataaatgttgtatgaaattcattaagaatataaagttttaatttttgttcaaatttagtcttctgaaatttagataagaatttagagaattttaacaatcatcagtgatttactttcatgaactgttctttctctttcacctgttccttctatactgactcctttttctcagcgtttaagaatactctttccccttccttcttaaacaacaaaacaaaacccttaccgttgacctcaccctttcccctagcttcttctttttccttttatagctgcactttggaaagaattgtctctaccaactcattttctgttcatatcccctgtagtctggctcttgctctgtactaaagctgttttcactgaagtcaccagtgactcaaatattggatactgttaacttaccagaatttgattctgttgactcctttactcctttttaagttactttccaagtacctgttacactttgtctcagattttcttgctacttttcctctggttatcaactggaatggacccttcaatatcatgcagttgaaaactcccatataacgtttgacttatcccaaacatacatactaatagcctactgttgactggatgccttaactgataacataaacagtcgattaacaaatattttacatgttagcattgtatactgtattcttatgataaagtaagtagagaaaaagaaaacgttaagaaaatcgtaagaaagagaaaatacatttactgttcattaagtgggagtgggttatcataaaggtcttcatcttcattgtcttcacattgagtaggttgaggaggaggaagggttagtcttgctgtcccaggtggcagaggcggaagaaaatccatgtataaatgaacccactcaattggaacttgtattgttcaaggatcaaatgtatatggttatgtccctatttctcttctcccataattttaaataccctctcaagaagatctcatagctttcaattaccatttatattccctcattctaaaaattatgtctttagctcaatattctggacctatatacctcactcactatgagataacttctctgtgatatctcattggtacatcaaactcaaccttttccaaatggaattgatggttttactctcttccttattcctcaaactatttcttattatctgttagtccttttcagtaatttgcctaagccagaaacttgggagtatattatcttagctcttggttgatctttctgctttcactcttctggcttccagttgttttctccatcagattacactgtacagcattgggggaaaactgagggtatttgggagcatctctgtgggccttgatagaaaattatattatattttgttaatgttgcataattataatgaaatacatcgtttgagagaagattaaatactgatttgcataaaattgccaaataaaatctttacaaatttagaataagtttaagctgatatctggatatattttagatatgttatacttgacgtggctatatttatttgttggttgacatttaaaatttttttttgttgatacataatatttgtacatatttatggtgtacatgtgatattttgttacatggatagawtgtgtaatgatcaagtcagtatttagggtatgtatcaccttgagtgtttattatttctgtgttttgggaacatttcaagtcatctcttctagctgtttagaaatatataatacattattgttaagtatagcctcctactctgcttttgaacattagaatttattcctttgtgcagctgttcaccatggcatatgtttaactgtgtaacagtcctgcacatgtaccccagaacttaaaagttagaaattaaaaaaagaatttatttcttctacctgtatgtttgtacacattaatcaaccacctttcatccctctccttccctcctgccacacacatacacacacccttccaaccctctagtatcttatcattttactgtctacctccatgagatcaacttttaacgttcccacataaaagtgagaacataggaaaatttgtctttctgtgcctggtttctttcacttaatagaatgaccttccagttctgtccatgtcgccttgccacagatgacaggatttcattcttttttatggccacacagtatttcagtgtgtatatatactacattttctttattcatctgttgatggatttaggttgattccagatcttgactgttgtgaatagtgctacagtaaacaaggggtgcaagtatccctttgataaactgattttctttccttttgaaaaatacccagtagtaggactgctggatcatccagtagttctgtttttagttttgagaaatcttcatactgtttgccatagtggctctactaacttatatttccaccaacagtgtaggagttcccttttctctgcatccttgccagcatctgttaytctgtttttagtaataacccttctaattggggtaagatgatatttcatcgtggttttgatctgcacttccctgatggttagtgatgttgaacattttttcatatatttgtttgccatttatttgtatgttaccttttgagaaatttctgttcatgtcctttgcccactttttaatgggatttttttttaattgttgagtttcttgcatattagtcccttgttggaagaatagtttgcagatattttctcccattcaacaggttgttcttcacattgtttattgtttccattgctgtacagaaactttttactttaatataatcccatctatttttgttgcctgtgcttttgaggtcttagccataaagtccttgcctcgaccagtgtcctgaagcagttctccagtgtttttctgtgttctcttgtattccactcagtttctgtgacatcattattttgaattctttttctgatatttcctaagtttatttttcattgggatctgtagctggagaattattctgtttttcttttttttggaggtatcataatttcttactttttctgtttcttgtgtcctatgttgatatctgcacatctggtataaacattgcttcttctagttttttgaatttgcttttttaggggaggacttttccccgaagatgtacctatgattttgattgggtggggcactttggctttggttcttcatactggctgtgtaatttctaacctataaacagcgtcagtggtgtctgtggtttcctcagtggcttaaggtttgcttgttagtggagggtgtggtgaagttttgctggggtcagtgacatcaggcaggctattccttgggccccagtggtggcagcagcaggctgagcctgcctgtttttgagtcccaaggccacgtatgctggcacctgtgctagtaagtccagacatcatcttgggtgccagcagtggcagtggtgagcctggagggtgagcaggtcaagtttctgggcagtgggcaatggcagtagcagtgaaggggcaacctctggctccccagaggtccacactgttaccaattgtggctttgatgggctggacaggacagtgcgcaggcccacagggggtgtgtgcgggtgggtaacagttgtggtggtagtggcaggttggttgggcgtgtcttctgcccctgggaaaagtgctcaggtgccaacagtggaggatgttgcagggccaccctcaggccccaaaatgtgtgctcaggcactgctagggcggcagaaggggaggacagagcccagccaagttggcctgtcctcaggcctccaggtcgcaggcaggggtggggtgttcttcaggtccttggcagtgtgctaccagcacttgggtcctgctgctggggagagcagcgttgttttcagtggcaacggccagtaagcaggcatctggggcatgtgagcttccgccagttggtggctgtgattgggagaatctgtcctcagggtgcttttaaatacgtgactgttggagttgtggggtcactgccagtggcttgcacttagrtatcatcattgtctgcaggtttgcaggggttggggggctgtcttcaggtgcttcccccaccccgacttagggtgtaaggactcttgggccccagggtaggatgcagtctggtgggggccgagccctcaaaatggcgctgtgctgcatgcagctgcttagggcatgtgtaggacccaagcatgaacctcctatctggagcatcttgtggtctctaggcagctttctgtgttggtgtcaggacccctgagggtcatgtggctctcccctggctaggattgcaggagtctgaggtgggaatgtggaccattaggggtctctcacccttatctcactggtgagcccatcctggcttcccttctccttccttgccttaggtgtttctgctcactttatctgttgaattccagtgcactctcttagatcatctattcaaagtgtgattatctactcactgttttggttctttttgtttgttgaccctcctggtaacttacagaaggtggttcttctttttggaggaggcaggtgccagatgcctctagttagctatcttgaagcccctctcaagatatttttaatgataaatgtcttcaaattattgctagctaccattgaaaaaatatttttatttaataatcttctgtattatccctttatcatttgtcatgcgatcagtatatctaaatattaaaagggcacctctttgatctcttttgctttgttgctttccccaaaaaatgttggcagcattcatgaagtttgcaaaaacaagcaattctgagttgtgtgaaatattttgcagttgtaattcattgtgctgcggtaaaactggcttcttacaaaagaactttatttctttttcttcttcttcttcttcttttttttttttttggagatggagtcttgctctgttgcccaggctggagtgcagtggtgcaatcttggctccctgcaacccccaggttcaagcagttcccctgcctcagcctcctgagtagctgggattacaggtgcacgccaccatgcctggctaatttttctatttgtagtagagacggggtttcatcatgttggtctggtctcaaactcctgacctcaggatccgctctccttggcctcccaaagtgctgggattacaggcgtgagccaccgtgcccagcttacttcttgtttttaacttccagaggcttaaaaacttttaatactttttctgaataggaaagattttttttaatgataatatgttggtgtaagtttgtttcgcatcattgcttcatgcgaataaagtatgagtgaaactttatatgtttttaaaaattagtgacttacactttttggactctagtatcctagctttaaatttaaaagttgtctattctggtggaaaaataaatatcaataaagatgaaatctgttgaaattattaaagaagactgtaggccattatggcttcagtttgatcattttaaaaaatgtaacttagatgcattctgaagaatgattagcaaatagttgaacaagttagaaaagcaacacctaagcagaatggaaatgattaaaatgttgatttacactgaatgcatgagttttaaattttttttaattgacaaatttattttacacatgaatactactttgaaagtaagtttcttgaatgttattacatgtagcccctttaatgaatttgattaaattcaaaatgaataatttatgtctgatgaagakacttttatttataaaagcaaataaattagaaataagtttatttttctgggyacaaattattcattttaaatgtttattaagaattgaatcttgattagttgttaacatcaaaagccaatatgctagcaagcaatatgaaacaagcaatccataaaatagctatcagaaaaaactttaaaagtcaattgttttctctttaaaacctcttataccaggttgatactgatcataatcatatgctagtgaaaaagtaaaaaattggggggaaaaagcttaacatttgtacatgcacatgcaaaacaaaagctcccttgataataaagggattgcagatataatgataaactagctgggatgattcaacttgattattaaggagagaaaaagattgtaaatcattattttataacctacctgtttttagtacaactagttgggaaattttgccctagattatatcacctgccgaacaatccagagttgtcttttaaaaatggcaatcatataatttcaccttcttcttgtaaactttccagtggcttactatcacatgtggaataaaaatcagattttttacactgtagctgagaatgtatatataggctattgcctacaaagaaagttaaactgaagctggttgtggtggtatgtgcctgcagtcccagctgctggagaggttgggccaggagggtcacttgagcccagaagtttgaggccctggcctacatagtgagaccctgtctcaaactgaacaaccaaccaamcaaacaaagtagcaagtgtaacgttttttaacattttttaaaaaaattattcttcaacataggacattccatgcttgcttccatcttggaatctttgtgtcagctgttccttctgcctaaaatcttcctctcccaaatctttgcaagacttgttttttcaattacctgcttctagataatcttgagaacccctctctaaatactattgacaaaaaccttccacacgtgtattatgtccttattctgccttatttttcctcagtagcatttatactacctgagtgttgtatatttatctgttaaactgttgactcttagaatataaactcccttagggtggagactttgtcttggtcactatgtgtctttagtgcctacaataatgcataatgtgtagtagacaatgtatgttagatatatctttgattataattttttagtttaactttttaaattgccatataattgtacatatttatggggtacatagtgatattttgatacatacaatgtatagttatcaggttatcataattagcatagctatcatctcaaatgtttatcattctttgttttgggaatagtcagtttcctccttctagctatttgaaactatgtattattgttaactataatcctatagtggtgtggaacactcgaacttatttcttctatccagtcataacaaatctctctgtattccccctaccccctactcttcccagccaatagtattttctgttgcactttttacttctatgagttcaacttttttttagcttctacatatgagagagaacttgtggtgtttaactttatgtttctggcttgtttcacttaacataatgtcctccatttccatctatgttgccacaaatgacaggatttcatttttttatggctgaatagtattttattgtgtacatgtatgccacattttctttatccatttatctgttgttggacccttaggttgattacatatctttgctgttgttaataggactgtgaatagaatgcattaaacatgggggtgcagatatctcttcagtatactcatttcctttcatttggataaatgcccattaatgaggttgctggatcatatggtagttctcttggtagttttttgagaactctagactattctccatagtggctctactagtttatattcccaccaacaatgtataagagttgccctttctccacatcctctggagcatttggtattttcttgtcttttgtataatagccatcctaactggagtgagatgatacctcattgtggttttgatttggatttcctgacgattagtgacattgagcatattttaatatatttgttgactatttttgtgtcttcttttgagaaatgtctgtttagatcatttccacattataaaatctgattttttatgctttgaaatttttaagtttctagtatattctgattattaatcccctgtcagatgagtaatttgcagatattttctcccattctttaggttgtcttttcactctgttggttgtttcctttactgtgcagaagctttttagtttgatataatctcatttgtttatttttgtttttgttgtcagtgcttttattcataaagccttttcccagaccagtgtcctgaagtgttttctctatgttttcttctagtaattttataatttggggtcttatatttaggtcttgagttgattttgtatggggtgagaggtaggaatctagtttcattcttctgtatatagagatatacagttttccctgcatcatttattgaagactgtcttttccccagtggaagttaaattgttcttgtttgcagatgccatgatcttatatttagaaaaacctgaagactttaccaaaaatactcttagaactggtaaatgaattcagtaaaattgcaggatacaaaatcatcatacaaaaaccactagcactgtggtacatgaacagtgaactagctgaaaaagaaatcaagaaggcaatcccatttatagtagctatcaaaaaaaccaccaaaattcctagcagtttttttctcttcatcatttcttaccaaattttgttagttttcattccccacttttctcttgccacccatatatattctgttctattgaagaaaaatctctttatcctctagcttaataaactataattattctctactaaatactttgcagtgattgtccatgtcacttaaatattataaaaactacttaatatggcctgcaagcctaacatttttctgaacctctgtgctgtatatatcccttccctacattattttgcacgatgcagttctattaactttctctagtttctagactaatccattttctctttcagcatgatcagcttattcactaggtcacttttgttctgtgctcgcttaattcgtacttggcctttagatcttaggttagacatcagtgcctttgcaaggtttttgactgaatttgtgcgtgtaaggtacaaggcatagcttgttttgtgctttgctttatcaggctttgcagaatttttttttgtgaacaaattggtttgtggcaaccttgtgtgttgataagtctattggcaccaattgtccaacagtgtgtgtccctttcgtattggtgatttttacaatatttcaaactttcattatttttgtatctgttatggtgatatgggactagtgatctttgatgttactattaaaattgttttgggcaccacaaaccacacccatataagatggcaaacttagattgataactgttgttctgactgccccactgaccaattagtccctcatctctctctctctctctcttcaggcctctctttttcctgagacacagcagtattgaaattaagcctattaataaccctacagtgacctccaagtgtttaaatgaaaggaagagttgcacatctctcattttaaaccaaaagttagacatgattaagcttagtaaggaaggcatgtcaaaagctgagacaggccaaaagctaggtctattatgccaaacagctaagttgtgaatgcaaaagaaaacttcttcagggaagttaaaagtgctactccagtcgacacacaaataataagaaagcaaaacaaccttattgctgatatggggaaagcttgattggtatggaaagcagatcaaaccagccataatattctgctaagccagagcctgatcctgagcagtgccctaactctcttcagttctgtgaaggctgagagaggagagaattctgcagaagaaaagttggaaggtagcagtagatggttcatggatttaaggaagtaagccatctctataaaataaaagtgtaaggtgaagcagcaagtgctgataaagaagctgcagcaagttatccagaagatacagtgaatattattgatgaagttgactacactaaacaacacattttcatcgtagatgaaacagcctgttattggaagaagatccatctggtacttttatagttgcagagaaggctgtgctttggctccaaaacttcagaggacagactgactcttttgttaggggctaatacagatggggactttgagttgcaaccagtggtcacttaacattctaaatatcctagggccgctaggaattatgctaagtctactctgcctgtgctttagaaattgaacaaaaaagcgtgaatgacaacactgtttacagcagggttcagtgaatattttaaggccactgttgagacctactgctcagaaataaagattcctttcaaaatattagtgctgattgacaatgtacctagtcatgcaagagctttgatgaaggtgttcaaggagatgaatgttgttttcatgattactaacacatctattcctcagcccatagatcaaggagtgatttagacttttcaagatttattatttaagaaataagttttgtaaggctttagctgctatagatagtgattcctctgatggatcagggaacagtaaattgaaactttttaatttaataagatttaccattctagatgccattaagaacatttgtgattaataggaggaagtcaaaatattaacataaccagaagtttagaagaagttgattcctaccttcatggttcatagatgactttgaggggttcaagacttcagtggaggaaataaagatagggtgtggaaatagcaagtgaactagcattagaagtggagcttgaagatgtgactgaattgctgcacactcatgctggaacttgaatggatgaggagttccttcttacagatgagcaaagaaagtggtttttttgagatagaattcactccagtgagcactttcgtgaagatgccataaacgttgttgaaatgacaacaaaggatttagaacatgacataaatatagtaaagcggcagagtttgagaggattaactccaattttaaaggaagttcttctgtaagtaaaatgctgtcaaatattatcacatactgtagagaaatcttctgtgaaaggcagagtcaatcagtgcagcaaacttcattgttgtcttattttcagaaatcgctacagccaccctaaccttcatcaaccaccacaccctgttcagtcaacagccatcaacattgaggcataatcctacaccagcaaaaaaaattaggacttgctaaaggctcagatgattgttagcattttttagcaagaaagtacattttaattaggggatgtacactgttttttagacataatgctattgcacacgtaatatagactgtgatacagtgttaacgtaactacgtaacttttataaaaatgcaatgaggtaccaggaaatatgcgtaactcattttattatgatactttattgcggtggtctggaactgaacccacaatatctccaaggtatggttgcactcttatgtttctgtgataacgtaccaaccttatagtctttcttactgtccttcactagactatatgcattttatcttaccttattcctcattttagtgtccagtggctggcgtgtmtaaaccctgaatgtttttaaagataatattttaaaagatcactttagttataatacggcttcagttggtggaakaaagaaatttttttctttttttttattttgagtaaaaatgataacttctstccaccctctctatagktaaagccttccatctgaagtatgatgaagttcgtctggatccaaatgttcagaaatgggatgtaacagtattagaactcagctatcacaaacgtcatttggatagaccagtgttcttacggttttgggaaacattggacaggtaattccgattctaaaatatgcttgtgtgtgttttattgtaatttttctgtctcagttaaattttaagttccatagagttgtcagtcttattccctaattcccttctttcaacattaacttgatgcttatcttcagtacataattaacaattttttattgtataattactttagttggagaatttagcctgatagaagtaacactaaactgagtcagaagacttagactttagtcttggttttgtaatctgtctctaattatctgtgtgacctttttgaaccttattttctatccaaggaactttggattaagagaaccctgtgttttttgcaagtactgaaagatctatgattctggatttatttgtgttacggatggttcacaaaaggaaatggttttttaaaatttattttaattactagtatagtgttcataaagccctttacattaataacagttttgtaatcggcaaatttaagaacagcctataatcacagtaaataccactgaatcggttctctttgaggtatgctccttaaaatctgtaacatttttggtgcaagtctctcatatctgtgaaacatatattattttagctagaagctcttagattatattacttaataagaggagtgttatttctagcttattccagagtctttatatttccagttttctagaaaacagcattttattctgttgattttaagttttaagaaatgtcaacttgtttttacatgcattattctaaaaattctaaaattcctatagtcattataacctaccataatatttttttcaggtacatggtaaagcataaatcgcacttgagattctgaattatttggctcctccatttctggaaattgagactcaagctttatgaatttatcaagaacttaaaaatgaagaaggtcacagattgatcttttataagaccttatttgatgctttgtgcttcaaggagatgatacctgtcatccatataagcaaactttttggcttacaactatttttttaatattagccttctagtctgtaatggaaattgtatattttgatagaagttttttctccattggttaaattagcattacttaaaatttgtttctttagaaaataaatgcaggttataaatgtgtgtatatttagagattataaggctctctgagccatcttctgatttttcattgctctataattctttttactgaaaatactatgttatgaatggtattaaattttagtctctggaacatccaaaaccaagcaaagggatgtgactattttgaatgaatcagaatgtcaacttgtatgtacactatatctacacttactcattatttaaaaagaataatgaaaaatctagatcaattcttcaatttgattgaactgttcagccttttcaagatttctttatttacaaatgattacatttaaatgaatgtacattcttctcactgactttggtgattttgaaacctagaatgatgtgtttctatctgtaatatctttccatttgaaaaaaatctcaaaacacagattaaaaccacaataggctgtagtattttttattttgggagccagagtatgatttgggggaagaatatgtatcagccctattgcagtataactttaagctccttttctctttagtccacttttgattgtaatttttatggtataggattttgaatcttctattttaggcttgtcagtcttggagttcttatcttccattatccctaaatattgataaactcccaggcaccaaagaaaacatttgcttaattgtctgaaaagaaacaagagaaaaacactggtatttttatgtctgtattcaatatggtataaaatataaaaactatattttaacttagtgaaatattttactatttctctacttcagacaaaatgttgcatccaaggtacatcaagtgaccatttgccttgaaccttgatttcactttgttttttttttttccttaaaggcaactaggaagctttactttcctaaagtgtttttgccattggaatttttgctgatcacagtcttatgtcatttttttctctgtttttattcccagcaattttctcctaggttaacatatttttggtgaacgtttaggcctttcataggtattaagctgacattatctagcttcttaatgaaatttaacactgtcacaaaaatgagaagttattattttttaagtgatcacatagttcataccactagtaactagaaaagatatttattcacatgatatttacaaggctcttcagaagggaacagtcagcattttaaattactagattttagcatacttaacaaggtttgaacagattctacccctattttcctccctttttagcgtcttctttccttaaagataaaagaaaactcaaatttgtttacattaggctttcttagcatataaatatatttccaaaataaattacatgttgtgtaaactttctccatgatgaaatagtcaaggaccagaatctgtaatatttttatgtaagattacttgtcaagactactacaagtcagtatgaactaccttcccataaagatttttggtatttgtacttatttatgaactttacttgagacagaatatggttaaaattaggaacatctactttgaatgaggtttatttttctattttgaatttgccttatgtatattcaaaggcttatggaaatactgtaaaggaacattaggaaaaggacaaataggctataaccatctatcttaaaatcagacccttagtataagcacctctttttcttttcctctttgacaatttagtctcttatttaggtccatgtaattaatttcattccattattttttagctgtttattctaaaaaacaaaaattttcagccactcccatttattctcccatgacatggtcctatatagcagtacttaacacagtgccttgcacatagtaggcattcagtaaatacttacatgcatgaatgaataatgtattttcagtgtaacaaatttattataaaagtgtagttcgactcttcttggtcttggagtttgagagtacagaattacagggaatgaagagaggtataagtagatattttaatggaaatgaagtataaattaataacttgacttacccctccataagttactgctaactggagatacccttgtatgcccaacctgtaaaggaaaaagttctatttctatatttataggacattcttctcagtcaaggaacagtaagaaatatgtaggtttcaatcagttgctctcaaccctgactgcattttagaatcatttggagagtttttaaaaatatccatgcctgaatcttgattcccattttcatgtaatttgagacaagacctggtcatcagtattttttttaaagttctccaggtaatttgaatgtgcaggaaggattcagaatcactggtttaatttgttattgaaaacagtaccagtattaaatgtgtttcctcttccttcttttctgtatgtatgtgtggtttttgattttttgttgttgttgttgttttgtggccaccctttgcactagaccatcccttttattggtggtattggcctatattcccattgacaaatgcaatttttaattatttatttaatataggagtattttactgtttaatatttaaacaatgtttaatgtatttcattattaactagtattatagtttgtttttttcccatgtctccataacttttactaacatttgtttttagcagcacaacagtaatccatataaaaacaactaattcataatgaggaaaatctcataatttttaaggcagaaagaagtattaatttttgatctgccatgtagaatgagacaaatacagtttgcttatgaaaggaaagtggcatacttttaaattggtctacacagaaaagtaaaagtaaactattcatttaaataagattcattatctaataaatattgagggaatatttttcctaaataaaaatttttctgactgctaacaaaaattaaagtgattacattgttcttttttggaggggtggggaggaatatttgttgaactaaagtatataaaattttttgagactagcagtatattttataatattacaaatacaacaattatttataaaagctagtcaaattaatggcttagaaagtagctgtaaactttgtgttttgaaattgcttgtttaaatgcaaaattatgagtaagataagtctttttaaattttttatttttaatttttttggaagtttattaaagcccttcatatacacatactttttaaaaaaagattcttaataaagaaattattggtttgtctggttaaagtccatatagaatgctgagaaataatttataaaataagaactatagaaatttgttctcagctgaaaagttggcagctgctctgtttctttaaaaaagtacaacatgaaaatttaattacattagccttaatattacttgactgaatttctactatttattcacttgtgtttgagattcacccagctattctaatgatagaaataaaaagtggagaaatgactaaagttgacttaagttaagaattggagtgggaattttgaaatgccatgtcctatatattctggcatatttgttggcacatttgcaagtatgttgatcccagcattgtttatatctgttggaataataactaaggaaaaattgaaaatgtataatagatgtataaagatttatatttagttagtatataatagataatacttgcaggttttttatgtgttttgggtttctgtgtattattttaggtaatctttataagggcatcttggaagttataaatatgtgccatttactgaaaagtgggaagcatttttatatgagtaaagctaatgaaataaaactagttttattgccaaaattcaaaaagtggggttcatgctatgtcgaatttaagcaaatgatctgtctgaggattttgtttgccattgaattccatttctgtccactttaaatttactaaaagctatttaacctgagtttgattataatgcttcataagtaatgcagttcatgtacatagagtaagtgctgtaagtgattttttaaccaccagttggtgctgtttctcaaagtggttcttaattagagtttaagtttgggtgccatgtgaactcataaaatattctactcattctttttgtttttctttgttttgttttctttgttttatttttcattctgtttgtttttctttgtttgtttttgagatggagtctcactctgtcacccaggctggagtgcagtgctgcgatcttggctcactgcagcctccacctcctgggttcatgcagttctcctgcctcagcctcccgagtagctgggattatgggtgcgcaccaccacacctggctatatttgtattttttagtggagacagagtttcaccatgttagccaggctggtcttgaactcctgacctcaggtgatccacctgcctcggcttcccaaaatgttgggattacaggcgtgagccaccatgcctggcctgttctgttcattctgattccagtttggtgggctcttaaattttaggttcaattgtaaataaaacatgttgccctattttgttttaagagcactagggacatttccattctccctttgtcctcaatcccccaaaaacattcatacgaagaagttagaagctgtattgtgggctggaatgctatctttacatgaaaagattattgggatttgtcaggcatagtatttctctgaggaataaatgaaatataaatttcactttggaaactaatgagttaaaaccatttacagtttctgttaacgagttaaataatgtatagaatcatagttcgtaatggtagcaagttcatgctctgctgaacttactgtttgattatggtcaaattttctatgttattattatagtagaattaagagtgtgtcctggtaaattacattaccttcacagtttgagcattctgattttaacattttgtagtttcaaaacaaactgtactcatataatcagagcattaacagcagcatcatgtcagtggtaccaataattgtgaatcttctgcaacaaaatttctttaatgatgagtttaatgggctatattcaaacctaatttttattcaattcataagtgcccactaaatatgtattttatttctgctgttctgttcctttgattatctgcttttcagtgagcatctgcatagctaaaatagatatagcatgtgttgtaaatgctgttgaatttttttaaggctcaaaggtgctagtatataaataacagcacattgccaaataagcattttttctttcattttctgaagtactttcatatttactcatgtaattatcagcatttatggtgagttggaataatttttcctctttattttcttaaatgaccctagaaaacaatgtaaagtagctctgaagaaggctttgttgttgaatctgtctcataattacttgtggatcctttgacacagaattatttatagtttataattcaccctcatctagagaatgatgatttctattacataagtaatgtaaatagagctgagaccatagtgaagcagaagacatttgggagatacttttgattacatttggatattttattggactatgattattttgccaacaaagtacaagtcaaaacattgggttatacaacatattcactttaataaaatatagtaatggatactcacagaagaactgccttcatggagttcacaatgttaatactctaagtgtaatggccatctatttctctctttttaataatacaaacatttttctttaaaatggaatagtttgaaagtgtttatcgagtcagtgtaaatggggggagatcaagtgaacttccttgtggctcattcagttgttttagcacaattaagcatcactaatgtttttaaagggcttgactatatcacaattttaaaatatttatatttttagataatatatttttattccataatgcactactgaggacaaaaaggaagtgtaagggtcactgatgatgaaataaatttgagatgcattaaagtagtttaaggctaaagcagtttgatgtaggaatttgaggagaagacgacttcagcttaatgggaaaatactaatttggacagcgttatatgcttctggggttgtcatgaatttaagaaaagctaggcaaacctagtgtgatttttctccagtgacatttagttgcttgatttcaggtatagagaattgcagttagatttttaagctattttgatggcagtagaagcaggccagggagttggagatattttcaaggtaataattgtagtactgaaacatggaatctaagctgttcaaggaatacatgatagagggaaggtggtgaatggtgagaaagtggtgctgtcctgtgaactgataacaacaatgaagtgagcctgaaagatagggggaggtggtcagaggatgggatgtgtgaagtcaagacttcagaggtgatctgatattgatgagaaaaagtcaagaccttggaagtaactgagatagagagggtgaggtattcattaaaatgaggagtcaaggatctatggggctgcaattactcgtgtaagtgttgaaatgagaatgacaagcataggagtgagaagaaagatggcaacaaggagaaggtaaccggtgactggttggcattagctttacaggatccatgctttaaaaactttgattagatatttaaagatgaatatttaaagatgaaaatatatttaaagatgaattaataaaatgttaaaggtatagatcatttcagtgcctttctccaacatccaaattgttaaagaattacatacttgtcccattagcccagatgatgaggacttttactaagacactattgacagccttcccaccctctgagtcttgttttctaagtttgctctcatgtgaggctagttcttgtattctttgctacttttgtcgcttaatgatactgaaagtggttaaaacctttgttggaaaatctgagctatgccctctaaggtttcattaagtgctggggtcacttgccccagttggggggtcacttcccccagttgtatgtgcaattcattactaagagagaatatcctgagcagttcccaatggtgggtggctggctaaaaggaatccctggagattttagtgtggtaggaaagcattttcattcttgaggatttttctttgacttttctatgggctggctgatttcctcagtttgctttgttctgggttttaggggagaattcttgggaggttgtgaattttctttgcctacagtgagatggttagatgctattctgaactttatctagatcttacccaaatccatttcca

SEQ ID NO: 98196 - DNA, 15965 bp, Homo sapiens
gggatgtgaggaaaatggcttttcctgcagggaggtgaagggagcaggcatggggatgggcaagctttgatcttagggaacacaaggaggaagtaatgtaggagtggctgagaagcctcccatctttacacctaccccaaatagcttggattccagcctcagccaccttcattcttcctccttcctgccccctccatcacctcccttagttcacccacattcccattctctcccctctccacctttcctcttcccttctccccttcccaactcccccacctggattgacatcgctagatttcccattactgttgctgaatccagagagcagcatgagttcctgaaatgcagttcaatggtgttcagcagacggtggatgcggaaaatcttcatttttcccatccccatgctgcccacaaagggtctttcccagaaacagaaaaataaccctgtacctttcctgcgccacatatgtaaccactacctctaccaacttccttctcctttttgcggaccaatcaccaagcttaaagtcaaacccaaaccccgagtggtcagggggccacacaagaggtaaataaaattcaggttgggtggaaaggagagggagcatggagttactcggctgtggccagggagggagggggtccaggaggcctttgtggctgaaagagctgaccaagaggaggagcagcagcagctcttagaaatcaccttccagggcatttactgaagtgttacgcaagactggtccttaccttggtctcaggaatgatgcttgtcctaggatttgttttttcactcactgactacctcgttccacatgtttacttatcttcccctgctgagttccaggagacaacatggtgcttttctctttcagacgccatacttgcgtctcctgtaagaggttacatttgcctaaaggatcagtgttcccaaatcaaatgctttatttgattagttgttaaaaataagtgctaccagcttactcgagatggagggaaactcagcgtcccctttggaacctttaccaggaatgcagtcagattgacagcccctgcctctctggctcattttccacaattaggctcccagttccctaattttcctcctgggctcctttagaactcgaagtgggaagcttccaacccctgtaattacatctaacttgtcttcaaaaggcagtttgcacattaaaagtctccctgataacttcaagagggactgaagtatcgataattcatccctttctcccctcctgttctcaacaagttctagtctcacccagtggtcccctcatagccctcattccccagcttctctggtggtttcaaaggatctcagaaatttggggatgttcttgtagtgcccttctagcttagggtcatctttgcccaacatggccacactctagccttccctgacctgcacattaaagtacacactgccatttttattttgttcattgtagacaacgggaatgaggatgtttagaagatagatgtatttttcctgtgatgggctccttgacttttactttcagccaaacaggactgtgggagagtgcctgatctcttagatcttcaggatccatttatcctgagcttccaaaggtattctgtaaagtctccaggcttcctttgtctgttttgtgtataaacttttcctcctcctgtgtcttcctagccaatggcttcaagtcatcatattccatccttcctctgacatcaagtgatagggcacattattgcaataatgcatgactacatcagcctcacaggcccgttccaccagcaccagacctcattttcttccctttctctgcgggcagagtgtacttcactctggcacgtgcctcactgcagcctctcattctactggtatcgataaagaagtccccccattctctcaaacatctcggcagcatttccaagccttagcatctatagttcagtcccattatcctattcagatggctttgggacactgttacgttgaaattgcagaagcatggactgcctttttaaagacttacacagcacaggtcctgggatgtctttgccattttgttgttcacatccatctcctttctctggtcatttattccctcaaactttgacctgtcctgcatttatacatcttcattcttgcatatgccagtcccagtttttcttgcgtctacctgctggtctgttcttgctgcatctgcccctcctaatctgtcctgcagagtctctggcctctgcggagctatggagatgggagacttccttagtcctttgcatcctgactcattcagttattccagtctcagcatcacagaaggacttgctcgccctggcttttcaggcttcctgtgtcagccactccctcctggccatttcttccaactggaaagtcctggtttccccttccctgaggccttagcctcagcctcctttagggccagcagcctgaaaccacttggaacagtttcttccaggcaagtcgagactagccatccttctcttaaggttgttctactgcaggaggtccccaaggcccctcctatctgggtagttgaggctccctcagcctggaaactcagcaatccccatgtatctcccgagggaaacatggaagggggaagaagaggagataaatggtcacaaaagggtggggggcatggtggaggcatgaagtgggaggatgtttgtggggccaagaggcaggagcattgttttaccctactgcacctcactcctgtccccctaggctgctagcccaacggcagcaacactcctttggtctgcatggggtggcgtgcgtgggcacggaggcccacctctccctctgttccctggagttctatcgtgccaatgacaccgccaggtgccctggggggggccctgcagtggtgagctgtgtgccaggccctgtctacgcggcatccagtggccagaagaagcaacaacagtcgaagcctcagggggaggtgtgtgagacagtgattatgacctttcccaccccaggtggagaacccctagcctggcaaccccagactaagcacagccctgacctttgaggacagagaggagccttccagggggtgggccacagacctgataccacccactcccttccaccaaagtctcactcatctcccaggtctgcttagccctccgtgcagatgttgccatttgcctctgttgggcacttctctcttctataggcccgtgtccgtctaaagggcggcgcccaccctggagagggccgggtagaagtcctgaaggccagcacatggggcacagtctgtgaccgcaagtgggacctgcatgcagccagcgtggtgtgtcgggagctgggcttcgggagtgctcgagaagctctgagtggcgctcgcatggggcagggtgaggtggcatggaggtgggagggagagggaaggaggtacatgctcctggggggcatattccttcggaaggttaggtgtcccctgggcagacaatatatgcttaattacaacttcctgatctttgccatctggccctaggcatgggtgctatccacctgagtgaagttcgctgctctggacaggagctctccctctggaagtgcccccacaagaacatcacagctgaggattgttcacatagccaggatgccggggtccggtgcaacctaccttacactggggcagagaccagggtcagtcatcctctctaccttggttgaggtctctttcatcctatccaggtctggtctccaatctacagtccaatggcccccagcccattgccccaggcccctgccctcctgcagctcccacctgacccatcacttgctagcccattatgtgcctgagtcacgcttcagccacatctgttagagactcccactacctcaccccaaagctttctccagcgcttccattctgtgtcactacagatccgactcagtgggggccgcagccaacatgaggggcgagtcgaggtgcaaatagggggacctgggccccttcgctggggcctcatctgtggggatgactgggggaccctggaggccatggtggcctgtaggcaactgggtctgggctacgccaaccacggcctgcaggtgagtgggaaggaaaggggagccgaggctgttgtctcaaagcctgtgttttgggcagagggctgaggaatgagtcccttggcccaagatgctggatcctgggccttacagaaacatctgcatatgtccccaggagacctggtactgggactctgggaatataacagaggtggtgatgagtggagtgcgctgcacagggactgagctgtccctggatcagtgtgcccatcatggcacccacatcacctgcaagaggacagggacccgcttcactgctggagtcatctgttctgagagtgagtgaaggagggggtgatgcatgccagggaagggagtgtctgggccacccgtttgcagggaaagggggctgtaatctggaggggcacttcttccccataaaagagccagtttcgccgggtgcagtggctcacgcctgtaatcccagcactttaggaggccaaggcggatggatcacgaggtcaggaattcaagaccagcctgaccaagatggtgaaaccctgtctctactaaaactacaaaaattagccaggcgcagtggcaggcgcctataatcccagctactcgggaggctgaggcaggagaatcacttgaacccaggtggcagaggttgcagtgagccaagatcacgccgctgcattccagcctcggcaacagagtgagactccatctcaaacaaacaaacaaacaaaaacaaaaacaaaaaactagtcttacacactagggagggatggaagcacccctctctgtgaagtcagcagtgacttctaacacccccttcctttcttggtgcagctgcatcagatctgttgctgcactcagcactggtgcaggagaccgcctacatcgaagaccggcccctgcatatgttgtactgtgctgcggaagagaactgcctggccagctcagcccgctcagccaactggccctatggtcaccggcgtctgctccgattctcctcccagatccacaacctgggacgagctgacttcaggcccaaggctgggcgccactcctgggtgtggcacgagtgccatgggtgagagggtagggagtcaagtagaagggcaagaccacgggggatggggcaaaccttctgggggcagagaaggaaacagaagttcccttctccccacaggcattaccacagcatggacatcttcactcactatgatatcctcaccccaaatggcaccaaggtggctgagggccacaaagctagtttctgtctcgaagacactgagtgtcaggagggtgagttggggactgaagtgaaccacatggtatccattgcacagcctttccttacactgacatatgccaatccctccagatgtctccaagcggtatgagtgtgccaactttggagagcaaggcatcactgtgggttgctgggatctctaccggcatgacattgactgtcagtggattgacatcacggatgtgaagccaggaaactacattctccaggtacctggagtctggggcttccagatgggtgagtggggggagcgttaaagacacctttgaattcgaggattgtcgctgggttaagtggcctttttctcactcacaggttgtcatcaacccaaactttgaagtagcagagagtgactttaccaacaatgcaatgaaatgtaactgcaaatatgatggacatagaatctgggtgcacaactgccacattggtatttgatgggaagagcaacccaggaagattaggggatgggagggaaagacgttcattctcttttccatagcttgtttctccatcttcccaccttcctgtagagctctcagtccctccacttctacccacccttctccacagtgcatctatctccctccctctgtgcagggcgcctcccaaattgcctgtccactctgcaggtgatgccttcagtgaagaggccaacaggaggtttgaacgctaccctggccagaccagcaaccagattatctaagtgccactgccctctgcaaaccaccactggcccctaatggcaggggtctgaggctgccattacctcaggagcttaccaagaaacccatgtcagcaaccgcactcatcagaccatgcactatggatgtggaactgtcaagcagaagttttcaccctccttcagaggccagctgtcagtatctgtagccaagcatgggaatctttgctcccaggcccagcaccgagcagaacagaccagagcccaccacaccacaaagagcagcacctgactaactgcccacaaaagatggcagcagctcattttctttaataggaggtcaggatggtcagctccagtatctcccctaagtttagggggatacagctttacctctagccttttggtgggggaaaagatccagccctcccacctcattttttactataatatgttgctaggtataattttattttatataaaaagtgtttctgtgattcttcagagcccaggagtcagtgctggtggttggagggacctgcccccactgrttcatttaaccctctgtctcggtgccctcagaacctcagccagaaaggcaaggaggaaatcagagcaggagcctcatactcttggtgatctattcattctgtgacctcaggggtcacatataaggtcagtgtttctcgtccccgccggatctgcactgccaactgggattgggttcgaacagcttcataaacatcttcagcattttgtaccatctgctccccaatggccaaaatcacatcaccaggccgcagaccagccctatagagaaaaatggacagagagaaargaaggagtacaaagcctagttcaaggacacatrcacaccttgcccatccccatatcacactgcagcctctccctcaccggtgtgcaggggagcccaggatgactttatggatgagtacaccatgctgaacatcgggaaagcttggttctcgaagctgtagttcagcaaggatgctgaaagtacacagatcaccctrttagccaaacccaggcattctccccatcctgagttccacctcaagtctctcatcaacacattgataaatatatggacaggacatgggctaggtactacaaaatacaatggcaactcactttctgtcttctagcaataaagtgcaacatgtacataaaagatgtacaccacatgagggcaccaaatgacaaacagtgttaaatcaatagcactaatgtcattctagaatactaagagaagctttaaggggaaagaacttaagttgagcctaaaaggatggatctgatattaaccatataaaacaagaacagcataaataaaaaacatgggagtaggaaatcaggttggctgagtattcatataggaaggtattacagccaggtctagaaagttgatttacagacagatggaaaatggcccttaaatgccaagttaatggattgaaggcttgaaatcaaagcagtaacaggatgaaatcaatctggtgacaggtgtacaaagtggagtgggataagaaagtcaagatgatgaagggagacagctcttgtgattatttcaagtgtgacacagttcatcttagataaagacagaaatgagaacaaagctcaatagaggtgcccccctctgattacactggtcacattacatgtcactgtccctaaagctcatacctgggactcagggtcagcatcatcaccccaatgtagcgccgctgggacccactgattccggaggaggaatctgtgacagagggacaaatgagccccacccagctacatccttccttccytgccctcttctcccagtagaccaccctccaggaagtcccactgaatgcccttcccctatttccaccacattaaaggaacccgtttccccataaggcaggctcactcttcttttccccacgatgcagaaactctcgaagacgatcagaagggatggcaaaggagattccagctgtgaccttcatggtgttcactccaatcacctccccatcctgcagggatacagcccccagttccctagcctaaacaaatagtaggggatgggggcayccgaacaaaagtaccagcaagtgttggggagatctggttggatattgagagatagccaacaaagaactgctcagaaacttgaccaaacatccttgaattaggggaaacctacccttcccacactgacctggggcagggattcttggaaggaaggatgtctcactcaccaggttaaccaggggacctccagagtttccaaactgtaggacaaggagaaaacatgaaagagatctggggattctaagtctrggggcataccaggatgtaggtactttctccaaattctcttctttctcagcccatgaataagtggccacatttttgcagcctaagctctatataggctcatccaccatayatcagttggtgcttgtaccacacagcctctcccccctcccccatcatttgtcatttctctcctatcaggacgcacatcaatagctgcatcagtttgaatgtattccacattggtttgggggagtcccaggtctctggctggacgctgagcagagctaacaatgccggatgtgatcgtgttctgcagtgcaaagggacttcccatggcaacaacaaactccccttgccggacatcagctgagcgtcccagaggcagcgtggggagaggctcctaagggagaatgggtaaaagagacctgtcatctgaagatgcgagcaaataagcagctccaaccagacctggcctaccccagcccccaccttagtctgaatcctcagcgttgcgatgtctgccacgggatccacagctgtgaccacggcctcatacgtgtcgccgcttagcagtctcacacggactctgcgccgatcagccaccacatgggcgttggtgacaatgagcccatcggcagccaccacgaatcctgagccgttcgagatagggacctcgcggcccaagaaagggtgcctgaaatggagggaaagcacagataagaggaggctctgacccctcctacccgccygccctccagcctgtggcttcagtgcctcccggtctacccccaccattaccggtccaggatctcgatatagaccacsgcaggtgctgtcttctccaccacatctgcgatgaagttgtactgactccggggagaagcgggcggcgggctagggacggcggcgaggacggccggaggaccccgacccccgccccacaacaacaacagcactgcccccccagcgcccagcgccaccgccagccacgcgcgcgaacgggttccagagttctctgaggcctcccgggtcctggtatctggggtcaccgcagtcagttgtgcccggggacccggggtcccagacgtcaggcatgctcggggttcagtgaccccaacagacaaccgggcccagagactgggggtcccataagtcactcgggcccgggggtcagaagttcctgacgtcagcagggcccggaggtcaggggtcaaacggggtctcctcccccagcgaatgccccccaaagcccgccatgcccgaaggctccagcctgcaccccgccccgccctcggcrcagccatcagctccgccttggctgcctcctcgcccgccctactcagaggcggcacccaggacgcgagcaggcggacagtaggacgcggggcacgccggtacctgaagtccttcagaagtgcacgccgggaccaggattccgggaggccgactcctccctgccccacgaatgccgggaattgtggtctccgccggacgcgagttgtgagacggcccaaggggccgcggggtatgctgggaccgctagcccttccggcgcgcctcaggacttcgggtcccctcaccccgggcggatgcccaaagactccgccttcccaagagcccctgcggccgggcgcgaaaatggcggcggcggcgacggccgggcgctcctgaagcagcagttatggagcttccctcagggccggggccggagcggctctttgactcgcaccggtaagagacccggcgggaagagaccgatccccgcgtgctctcggccttcggcgcctgaccacttcgcctctcgcccccaggcttccgggtgactgcttcctactgctcgtgctgctgctctacgcgccagtcgggttctgcctcctcgtcctgcgcctctttctcgggatccacgtcttcctggtcagctgcgcgctgccagacagcgtccttcgcaggttccgacgcgggcgttcggggagtgtcagagctgggtctggcccgaggccacacagtcaccacctcctgtgtccccagattcgtagtgcggaccatgtgtgcggtgctagggctcgtggcccggcaggaggactccggactccgggatcacagtgtcagggtcctcatttccaaccatgtgacacctttcgaccacaacatagtcaatttgcttaccacctgtagcaccgtgagtgagagcgaggccgagagcgccacggggcggttccctggggcccagctgaaggcccccctgtccccactcgcgttccccatggaggatactgagccttacccctaaccccgatcctctacccaacatgtcagttttttttttcattttcctcaatatttttcttcttgctttctcttctcctggttcccagcctctactcaatagtccccccagctttgtgtgctggtctcggggcttcatggagatgaatgggcggggggagttggtggagtcactcaagagattctgtgcttccacgaggcttccccccactcctctgctgctattccctgaggaagaggccaccaatggccgggaggggctcctgcgcttcaggtgggtttagcacaggtatggggcgccagctgggtaggtggtcaagcttgtgggcccttgagtttttacaactttcttcggcccttagaccccatcatctccagttcatttcctttctgtccactttaagttctttctcctgaatcccttcattcttcaattatgtgcttgtagagtttgacagttgcctgttataaggcaggtgtgagctgctgactaggctggctggattcccatcctactttctccttcctcttctagttcctggccattttctatccaagatgtggtacaacctcttaccctgcaagttcagagacccctggtctctgtggtgagtgtgtgttgaacagggaatctctggggcttgaaggggaaatttcccatccctggccctggcttaggcctcatctcatgccctcccctcagacggtgtcagatgcctcctgggtctcagaactgctgtggtcacttttcgtccctttcacggtgtatcaagtaaggtattaactgtcctcacattttggtcgctggggagaggctcacctcaaggtcaaggaattagtggcctctgccctgtccatttgtagatctttatatcaaggttctaccacagaggcaacacaaagtatttacagtatttactattttcccacccaccatgcaaagaggtaccaaagtggggaatggtgacagcctctaccctgggtgcccacaacatagccctggattgtttctttgcaggtggcttcgtcctgttcatcgccaactaggggaagcgaatgaggagtttgcactccgtgtacaacaggtggtcgggtgcacagacagggtggaggcggggtccctgcttaggaggagagggaggaaagcttgagatcttgacacttccagtcttccaattctccctagctggtggccaaggaattgggccagacagggacacggctcactccagctgacaaagcagagcacatgaagcgacaaagacaccccagattgcgcccccagtcaggtatgtggtctctatacattacagcttttggggtttttttttttcggcctactgtgattcctcccctatttctgtgctagttagcctctccttctagttctctacttaccagaatttcttttttctttttttcctttttccacagcccagtcttctttccctccctcccctggtccttctcctgatgtgcaactggcaactctggctcagagagtcaaggaagttttgccccatgtgccattgggtgtcatccagagagacctgggtatgggaaagggtggccccacactgggagatgggcacagggaggaaaagtgggttgtgaaggaagaaagtaagtagggagtggactcccttctcttttctccccagccaagactggctgtgtagacttgactatcactaatctgcttgagggggccgtagctttcatgcctgaagacatcaccaagggaactcagtccctacccacagcctctgcctccaaggtgagacccaggaaatggtcagatccaagtgttggggtgagttgggggcaggctatgtactcccttatccctgacctttcttttttgatcctgagaccctagcatagtgcctctcttgcaaagtaggcattcgatgcgtgtttaatgatgatgactccgcaagccctctgacattgtgatcacctcagtttcccagctctggcccggtgacccctcagccaacagccctaacatttgccaagtcttcctgggcccggcaggagagcctgcaggagcgcaagcaagcactatatgaatacgcaagaaggtgagggggttagaggacaattaataggatgtggcaaattggagaatggaattatggagctactacggcaaagcctgaataatatctctccctatgtcccacaggagattcacagagagacgagcccaggaggctgactgagctcaaaggaacaggatggcacccagagccgcaggacggagactgggggcagccctcacccaactcacaacaggctggatgggtgggtggtaaaaagggaaggatgaggctcccccaatgtcacattaaattcatggttttcattcaaggcatctgttgtctctctcggtctcaaaagccctgtgagtgggttccttattccttggctgcgggggatgggggtgagagtcttctcgtacatttgaagggggtagtcagactgcaactgtctaaaatcacctcctcatgccaagtgatgagtgataaattaaggaagtgtaactgaactgaagacccagcttgggtgatcagcccaggttttggaggaagctgctgcaaaactacaagtcccagcatgcctttcacaagcacactacacatcatctatagagttcacacatgctcagtgtggtagctggagcctgttttccataggttcctgactaggttaaataaggtggagcaaatagccccaccccaaaagcaggcttcaggatttgaagtttgagcccatccctgaggtagagccggaatttacctttgtacttcacacggtcagggttggtggtgactacgtgggtctggagctgactgccgtcctgacacgtcctagagctgcaagcaggtttgaatccaggatccctgtgactctgctgttcctctccccaccccctatattctttatccttttcccttcaggactttcccacaggttactaggtctcacataatttctactgcccttgaggacccctgcctaagtaagatttctactacctgccaacggggtaatagtctcaggtagatttctactacctgactatagggactgtcgactaactctcagtagccctttatcaaaatacctagcactgtttcctggcaggaaatgctgggaagggtgggccccagagcatgatcaactgaaggtagaggttaaggatcagggctgaggtgggaagatggtgtcggtcaccaaatatgaccttactggctgctctgccttctgcaggtcctgccagagagccaccatgacctctcagcctctcaggctagcagaagagtatggcccaagtcctggggagtctgaactggctgtgaacccctttgatgggcttcccttctcttcccgctactatgagctgctgaagcagcgccaagccttgcccatctgggctgctcgctttaccttcttggagcagttggagagtaaccccactggagtggtgctggtgtctggggagcctggttctggcaagagcacccaggtgtggtgggggttgtgggggcaggcagattctgggagtggacaaagggaggacaaagggaggacaaagggaaagtggcctttccctgggcaaggggggactgggctgcgtggggtcatgaggaaggtgaacgaagagagatgggatgggttaggttggccctggaggctggtgaaagaccaggggactccccaaataaggaaagattaaagtggccatagttccctgagcacttctgactgaagtcctacatcttcctcactggctctccttccctacttctatcccagatccctcagtggtgtgcagagtttgcgctggccagagggttccagaaaggacaggttactgttactcagccctaccctcttgcagcccggagcctggctctgcgggttgctgatgagatggacctgaccctgggtcatgaggttggatacagcatcccccaggaggactgcacggggcccaacaccctgctcaggtgggggcctctgcaggccttacccgaatataattccccttattcagtagaaacaaacccattcctctggcatctcaccataccctcccttagcccaactcactcttttttattttatttattttggagaaagggtctcactctgtcacccaggctggagtgcagtggtgcaatcacaactcactgcagcctcaacctcccgggctcaagtgatcctcccacctcagcctcccaagtaactgggaatacaggcgcgcacctccacgcctggctaatttttatattttttgccatgttgcccaggctggtctcaaactcctgggctcaagtgatccacccacctcggtctcccaaagtgtaaggactacaggcatgagccaccgtgcctggccccaactcactctaaattgtgtgtggtgcaatggctaaaataagcccttgaatcccagccaggggcctcagacattcagcctcaccctcatcagaaaaatttcacttcccagctggcgtataccttgtgaacaaagtgttctcagcggggttgtggggtgacagttatgggtccataggctcaggaagtcacagcatatttttctgaccttcaatatcaaaatatacgtcccttggggagaagattccctgagcttgtggggctggtcagtgtccacactgattcctctgcccactaccaatgtcaacaggttctgctgggacaggctgcttctgcaggaggtggcctcgacccgaggcactggagcctggggcgtgctggtactagatgaggctcaggagcggtcggtggcatcagattcactccaggggctactgcaagatgccaggctggaaaaacttccgggggacctcagagtggttgtggttactgacccagcccttgaacctaagctccgagctttctggggcaatcctcctattgtgcatatacccagagagcctggtgagagaccttcccccatctactgggacaccatcccacctgatcgggtggaagctgcctgccaagcagtgcttgaattgtgtcggaaggagcttccaggagatgtgctagtgttcctgcccagtgaggaggtaaaaaacaaaacaaaacaaaaaaaacagcctgcaaaatgagcctgcaaaaggaggtactcatcatcatcttccagtcctgaggaatgggaatgggagcaatgcctcttaggaacagtagagttgcagtatttactctccgttggggtcccagagaaaaacttgaggatttcagggtaaagaggtttaccactcacttttt

SEQ ID NO: 98197 - DNA, 14665 bp, Homo sapiens
cggctctgggtacttaaaaagggataaatttgctatgaggtattaacatcaaatgcaactggagatacgagaagggagagattccaatggagacctcaaaaaaggctttctggagaaagtgggactttgggcacaatttagacttgggggagggggtggaagtgtggtgaaatagaaaggacgtggaggggaatgaccagaggacaggaaggtcaagatgtagatttgagagtggtaatagaaaaagcagggccataaagagttgcgatttttagcctgagggcaattgggagctagcggacttttttgaagggaggttatcctgtgaaagcgacatttttgttcatttctcttcagagtgaattgaagtgaatatgcagcaagaagttatgagattagtgattaatcaattattcgttacagcccctgtttacctacttccctggtccgagccactatcatctgtcctctgtagtggcctcttgactgttttccttgagtcccccttcgcctgttctcaacatcacagttgagtgctgtttctcagagctagtgattctgataaaacatgaaacacaaaggacaaaggacaatttttgagatgtggatatgtttattatttttatggtgatgatggtatcatgggtatatacatatgtcaaaacttatcaaattgtacacttcaaatatttgcagtttatatgtccattatacttcaagaaagctattaaaaataaagttgaaaaattaggttgttccttttttacgtttaaaacctgttgagagcttcccttttcaatcagaatgaaagtcaaagtctcagagtggtgtgcaagggcctgcatagtctcttcagatacaccaggatatccttccactgtgtccccaacttgaaatgcttaggtatccaaaatggctccctccttctttcaggtctttactcatgaggctgctgtaatcactctagatgaataacaactcacccaccctttcacttccttgctcttttttttctggttagcacttattagcattctatcatttattattatttaatatacatttctaatatatattatattttctagttattttcagaaaatattttctagaaaacatatttcctagtttttcatctgccttttccactagactataagcttctcagtggcaaggattttttttcctctgttgtgttcacagatatagctccagtgccaggtgcatagttggtgttcaataaaacttttctggatgaatacatgaatgaatccaagtggtggtgatgacagcctcgattagggttttagcaatggcaatggaaaggaagggctgtatctgaaacagttcaaaggaaagtataataggaggaagtagccaggaacctggcttggtaggcctgggtaagagggtgaatgaagagctttggagggaagcatgtcctccagcctgctggacttaaggtggctgcagggaagcagggggagcttgtcagaaggctaggagagtgagcggtggggctggagtgtcagaacaagggatggaggtctcagagttatctggctggatatgagagttgggacttttggaatgggtgaaacttgagcagatgaagagataaagaaagcttaaggcctggtgcagtggctaatgcctgtaattccagcactttgggaggctgaggcaggtggatacttgagcccaggagttggagaccagcctgggcaacatggtgggactccgtcactacaaaaagtacaaaaattagcctggcatggtggcgcatacctgtagtcccagctacttgggaggctgagttaggaagattgctcgagcctgggaggttgaggcagcagtgaaccgtgataatgctactgcactccagcctgagcgacagagtgagatcccatgtcttaaaaaaaaaaaaaaaagaaaagaaaaaagaaagcttaagtctgagctctgaagaatcctcacagtcttcagtggaagaaggaaaatcagtggaggaaaaacataagcagtgactacgaaagtccaaagatgtggaataagatattacagaagcaaaaagaagggacacttcaaaaaataattgatgaccaacaaagtaaaacatgccagggaagtcctggaggagggatactgaacactggagctctctgagaaagggttactataatgaaggcagcttgcactgagttaaaacaagaataaatcatgatgaaatggaggcagtaggcatgaagtaaaaaggaaaggaaaagcatgatctctcttgaagactcaggcaaagattttgtccagatgataaagatctgagacagctgaggggtaggaaagactaagttgatgagagccacggacacacaggacatggtgagacagatccaaagcagtgtgtatgagggggcactcattccagcacctctatcttcgtcttttttttttttttttttttttgagatggagtctcgctttgtcacccaggctagagtgcagtggcgcgatctcggctcactgccagctccgcctcccgggttcacgccattctcctgcctcagcatcccgagtagctgggactacgggtgcccgccaccaagcccggctaattttttgtagttttagtagacacggggtttcaccgtgtcagccaggatggtctcaatctgctgacctcgtgatccacccacctaggcctcccaaagtgctaggattacaggcatgagccaccgcgcctagccaatcttgaatataaaccagcaggaaccatcctttccccgtgaatcagagacaaggaggcaagaaaggacatttcaagccaggttggggtggtggtgcacacctgtaactctagatactcagggggtcaaagtgggaggattgtctgagcccaggagtttgaggccagccagccagcctgggcatcatagcgagactctgtctcttaaaaaaagagaaagtcctaggactgtggtctgggtgacgtaactggatgccatctgttcttgaagtggggcactaaaatattttaaaaactctccagaacacttgtatgaactactgagtttgtgaccattctccttaaaggattagttggacagtccctgggtggcagtaccatctgtgctgaactcaaacggcaggggtgtacgggtctgcatgatgttgcctttttttcatttgttgattcactcactgattcattcaaggaggatttatttaggttggctggagacacactggttaccctgcccccctgcccccagactcaaccttcagagcagagaatgggactagcaaactcctaacctgcacaccagccctcttcagagattatatttctttgctgtctccctaggtttcctgctcccatctggaggaatccagcccttggtaccaaggaagttttttttgttgttgtttgtttgtttgttttttttgagatggagtcttgctctgtttccccagactggaatgcagtggtgatctccgctcactgaaacctctgcctccctggttcaagtgattctcctgcctcagcctccccagtagctgagattacaggcacctgccaacatgcccagctaatttttttgtatttttaatagagacggggtttcaccatgttggccaggctggtcttgaactcctgacatcaggtgatccgtcccctcttggcattccaaagtggtgggattacaggcatgagccactgctcccggcctgaagatttggactaaacaggttcatgcttccttgtagccctctctactgctgagaaaagtgcatgggtttctgtaaagagacgggaggtgataatgtctgtcttctccatcaagatgaaaatacatctgctaaattggtaggagcccccaccctctttcagaacgggctgttagcagggctgaggaggggctggacaaattggatagtagagtggtcaaggtgggggaggttgacacttttttttttttttcagacagagtcttgctgtgttgcccaggctggagtgcagtggcgcgatctcggctcactgcaagctccacctcccgggttcatgccattctcctgcctcagcctcccaagtagctgggactacaggcacccgccaccacgcccagctaatttttgtatttttagtagagatgggtttcaccgtgttagccaggatggtctcaatctcctgacctcgtgatccacccgcctcggcctcccaaagtgctggtattacaggcgtgagccaccgcgcctggcaggttgacacatattaatgcccactattcctcccactgccctctgtcccatttatggttcacctcctctagatataaggcttcagagaacactgaagggctggtggacagagctcacccttctttctcttctttatctttctgcccagatgcccaaatatcattcctggttcccaggggagaaaagaccccttcaccctgccccaggcaccaggctgccagcccatctgctggggagaaaggagggggcagagtctttcccaggggatcctggagaatcagtttgaagatcagtgctcccagggagatccagctagtagacttacaaagcatttcggttcacacgggaaccagcaggatggagctgaacagcggggtgggctcgggacgagggtagagggctggcacagcagggtaaggtcctttggccaccacgtgtcagaggtaggctgagctgctcgttggtgcccacccgccaccgccaccgcaggatggtagaagcgcccccctctctgagcccagtctcaccggctcagaggcgccagggcccccccgggggccggggcgggccggggaaggtaatgtaattccggcccagctaacccgattaccgcggcctgcaccgggcagggcggcggcgggggcgggtctaaggctcaggggcccgcccgcgggggtcccatccccgggaaggacgcagagttcacgcactcccggctcctggattcatggccagaggtcacaaggtcaccaagcggcttaggtctttccccacctcccttctctgacagctccaggccattttttgagtttgggtggggtaaaatgtttatgggaaacaaggcggccaggatccaaccaaggcctcagtgaggtcccacgtgtcccccgtggcgagatttcgccctcccgccgttgaggaggaagagtgtgagaacagacttcctaggcacagaatggaggggcagagtcctgcattgaggactccctgcacttggggtccgggggtaagtgccagccccaagaacccgccggcctgatttggcccgggttgagccatggtccgttttacacggattttggaaaatcgaaattctaggaaacacaggacaccaattaccggtgcgcatgaacagggctggggggacctacaggagaggccagaaggcgcaccacgatcgccagcccaaagcggccgttccccgcccttagcccctgccgtccccttcccacacctgttctcttcctgggcctgcagctcaccgggcgccgttccccagccgcttcttacgcagccgggaaaccacaacgagatttggtcttcgagagcatttaggcggggaccacaacgaatccgggagttggccagaaggatccatcgagaggcgaagagtgggggctgggggaggaggcacctgcggaggaagccggtgaggcggaggcagcccaaaggcggaggccgcccaaaggcggaggccagcaaggatggaggcgcggtgagcatctccgctgactcagcggcccatgctcgggcccctcccgcgctgagcctggctcctaacaccctggccccctgtccccctccccgcacatctccgccagccagccttccccctgcgcttggcgcaaacaggcgtcccttcccctttaactgctgggccccgcccctgccctacccccagcccccactacccacccgggccgatccgtcagtcactgccccagccggagctggccaaccctctccacccgggacttgggcagcggcgccggcagcccagcgtctatttgcgcttaagagccagcaaggaagctccaggggccccagctggccgtgctcccccgggatgcaagtccctgcgctgacgcccggcagcggcyggcacgggcgcggctgctccgggtgcacagggatgctgctgtttcggggaccccggcgccctgccttggccagccccgcgggcccctgaggccactctccggagcgcgccgccgctgggcttctggcgctgcctgaggcatcctccccaaccaccgaacctccggcggttctcctcggcccagaccgatggagccggggatgctgggtccacacaacctcccacaccacgagccaatcagcttcggcatcgatcagatcctgagcggccccgaaaccccagggggcggtctaggcctgggtcgcgggggccagggtcatggggagaatggggcgttctcgggtggataccacggagcctcgggctacggtcccgccggctcacttgccccgctgcccggcagctccggagtgggcccaggcggcgtgatccgcgtccctgcgcaccgcccgctgcctgtgccgccgcccgctggkggggcgcctgcagtgcctgggccctcgggtttgggcggcgccggaggcctagcgggactcaccttcccctggatggacagcggccgccgctttgccaaggaccggctcacgggtgaggttgtctgacccctccagcgtcacgcccgactctgaccccgtctcctcatttcttagctttctgctccaactcaaggacccctttcacacctcccactagatcctcccaggggatcctcccccaactcaaatctctgggtcctgcctccgagaggtgatggggagggagctgccgtcggtgcccgcgccctcctctgtagtcccactgtccacgcgtggggaggggagggtgaagttacaggggacgtctccctcgcatcccaggggaagggcctttcttggctatagggctcggctgatgcttagggcccgggtaaggacagggcgcgggagttctgcggcctggacagccgcgcggccttctcagtggcacctcgggccaccctgcaaatcctgccctggtctttcttcctcccggtagctgcgctctcgcccttctctgsgacgcgccgcataggccacccctaccaaaaccggacccctccgaagcggaagaagccgcgcacgtccttctcccgctcacaggtgctggagttggagcgscgcttcctgcgccagaagtacctggcctctgcggagagggcggcgctggccaaggccttgcgcatgaccgacgcacaggtcaaaacgtggttccagaaccgacgcaccaagtggcggtgaggcgcggcgcgggcgagggcggactggggttcccgagcagggcctggtgagaagcgacgcggcgggcgccccgctgaccccgcgtctccctcccttaggcgccagacggcggaggagcgcgaggccgagcggcaccgcgcgggccggctgctcctgcatctgcagcaggacgcgttgccacggccgctgcggccgccgctgcccccggaccctctctgcctgcacaactcgtcgctcttcgcgctgcagaacctgcagccctgggccgaggacaacaaagtggcttcagtgtccgggctcgcctcggtggtgtgagcgacgcccgtccgatcggcgtggagcgccgggcccggagcggtggagcgcgcggctgcctgcgtccatggtctagtggcagccgggcgcgtgaggagcggcaggccttgaggctgtcgtcgagggctcctccaccaccggccggctcccaagccagcgttgcgcagatgcacggccagctcagaggcggcctttcccgccatttttcacttcactgccgttacgccctcgctggaacctgaggcgccgagagggcgggacctgcaggacagtagccaatgakgtgcggggagggggccgggctggccaatgggagctgctttcctgagggactcgaaattctccggcgggtggtcgggagctggggctctgaggggctctagcggcgttgcgcgcggtgccggctgggtctgtaccaaaggtgtgaaggaaagaagacaccgaccacggcgaagcaatagagggggtgctggagcgcgagaggctggctgattgtgaccgaaaccagagggttgtccaccccgggcatctcatccctcaactgtaaaataatcgctaaggattccttcctgactttgagcctcacgttgtcatgtgtgttcagcctgctggccacatcctccggcaacacgcccgggcaggaggcgagtcggatacttacacacccaacgaaagagaaaatctggctccggtgtcacatagggacagagaagggagaggaggaaacagtggacaaagttaatgggcccagtggagttagggtgaagagaatttggaaaataatttggaagtgacaagcttaagaagaatcaaaggtaattccaagactggaaatgtgcagcatcaggaaatcaatggtgctgtggatgatgaaagggaaattgggaagactggagcaaaattaactgtataggcaaaactaaatgttatacctagagagaataaatcctggagaagtgcctttgagggagatcagctgacatccacatagaggtggacctagatagaatgaatgagaacagatagaatctctgagggagggaactcttgaggagaaaagcagagttctaaggactaaacctttccaccaaattcgacaaccacctttgcaatgtgcaagatgatggagaatacctaagtcaatagtccaagggcaggcagggcacggtggctcacgcctgtaatcccagcactttgggccgaggcgggaggatcacaaggtcaggagatcgagaccatcctggctaacacggtgaaaccctgtcttgactaaaaatacaaaaattagccaggcatggtggcacatgcctgtagtcccagttactcaggaggctgaggcaggaggatcgcttgaacccgggaggtggaggttgcagtgagctgagattgcaccgctgcactccagcctgggtgacagagcgagactccgtctaaaaaaaaaaaaaaaaaaaaattccgagggcacaaaaggggaagggaaggaaggagaacctaggaagaaagaaaggaaagcatgatgtctctgaagttgttagaaagacttccccttgtgggtgtgtctgggctgctgggaagcttgttaatagaaagtctagttaggggatggttgcattagccttaaggtttaaaaaggaattggatttaagctgtatgaggaagaaagggaagaatttgtctgattcctctagcacccccatcctttgtcccctggaggctggtgcactgtgacagagggaagagaggccaggctagagaccaactgtagccagacaactcatgtctgtgctagtgacaactatgtcgatcatagcatgaaggcctgattggagatgggaagaggctagagactatatagttggaggagctggccctggttatttactgtaatatcatcactgatttatggatgttgtatatggcactgcaggaccaaactaaaacttggcatcatagaaaaatcttttatagatcacaagggagtacaagaatgggtttggcaaagttaagagaatgaggagcatgtcagtccctctccaatcaataagagaaggctaaggaaagagtccttccctatgtagactgtggtttaccccattctttccattcccagtctaccatttcttgggactcaggttccagggtttacatttgaccctaaactttgggcttctaaatctgtctgggtgctttggtgtcaccctgagggataatctaatgtgatgagatgaacccagctccattccataggcaggcaggtcactgcaggacacagggatctctgaactcctgggctgaggatgatttgctccctgctgtagaatctgccattccttcccttagctggttcagaaggtctctgctctcactgggaggcaagttactcaggaagtatggaggggccaattccaccagcctaatagagagagtcataattagatgatctgcatcttctctctctctgtctctctctttttagagacagggtctcgctctgttacctgggctggagttcagtggcatgatcataactcactgtagccttagactcccgtaatccttagccttagactcaagtaatcctcccacctcaatctcccaagtagctgggactacagggtggtttcaaactcctagcctcaaggactcctcctgcctaggtctccaaaagtgcatcttctcttataatgcagacttttaaacttctcaccagcccttccacaaatcctgtctcctcagatcatgtttttactaaccactaagatcccttcctctgtctctctaactccccagccataattttggccccagggagaggaataggcagtataggagggatgtcagggaactcacatctgtggttgaatctcagaaacaatggaaaggcagttgtctttggatatggtgaaattgtggtagagcacccatggtgggggtctggcaggagctctgcggcttcggtagcagcagtatgaggagagctgggccacatgcttatgggttaggagaaggtaatttccagtcccgtctgtgtctctggccaccttattgaaaggcagaaatattgacggaataaataaaagggaagaggcaggcagtagaaaaaaataaaaggggattgagaaagagtaagggtgatgagagcatgaaaagtaaagcattacctctaggtgttgtctggtctctactatacctcatggcatttaccatagccccttgtacctcaaatcctcaagggaaaagtcctttctggttctaaagaatcttttgaatggccacctggaccctgatttcaaagtggcttaccaatatttgttctctttgccttttgctcctttgatcaccctcacccccaccctttcctctaaccttgagaaagtatcctgacaccagtgctttctgaaggtctctgcgattctgctcagagccaaaggctggtagggacaagggaagttcaattcgttgcatgagttctaggagttctccccgaagtttatgggcttggcacaatgctgcccaattcagacctcgagcctggcaccaagcctcatctgctccacctaggagaggaaagggaccagctaaactaaagtccttgagacccctgaaataacccaacccttagccaaagggcctcctctttctgagcatagagatctgtcagctggctgcataaaatttcccctctttggaaaatctgggattctataaaaggatgcagaactcactttgtataaaggcttcatacacctggatcagagaactgtggtcaccatccgtgtgttccagggcccgacgcagggcagcttcttctgcactgagtggaggacgggtaaacccaggggcagctggaggcagaagagtggaaggtagaatctgccatttgggaaatgggaagggatagtagtacaggtagaatgctgaaaaggcagaagtgtccctttgggaactttattcaaaagacatagataacttctaggtgctatgcactttattaaacattgaggataagtaaatgaaatacagtctctgccatcaaggagcttcaagtctggtgggagagaccaacaggtaagcagacttgataagcatgataggtgtttgtatatggtactgtggaaacaaagaggaggatacctaatccaggctttaggtggtgaggatgtgagtgatgtaagagaaaacgatgaggacccttgggctagtatttgaaatttgagtaggaattagccgagtggagacggggcagggagtatgttttagactgtggcaacagcatggcacgtaagttaataatatagcatatttggggaactgcaagccatctggtatgggtggagggaatgaaatgacgtggcagaatggcaggagataaagctggagaggtaggtataggtaaggtcatgagaggctggagtactgaggaaaggaactgtctttaaggtaaagagtagctgtagaggaagagttgtggggttttttttgttgttgttgtttgtttatttgagacagggtctcactctcttgcccaggctggagtgaagtggcgtgatcatggcccgttgcagcctcaacctcccaggcttaaatgatcctcctacctcagtctcttcagtagctgagactacaggcatatgccaccacacctggctaattttttgtttttgtagagacagggtctctcctatgttgcccaggctggtctcaaactcctgacctcatgtgatcctcccatctcagcctcccaaagtgctgagattacaggcacaagccaccacgcctggctgaagaagagtttttaagtaagagagtccatgtgtctgaaaaagttcacattactagttaggaggctactgaggaaaaccagctgagcaatgaggaggacctaccattggcagatcctacctaccgtattcactggaagtgaatatggagaaggacagatgaatatatttatatatatatttacatttaggagataaaagtgaaataacctggagaaagactggtctagagtgatggtagcagagcagcagagataatagtattatctgaatctaagactctagagagaggaaaagattttgtggtgatggtggtgagggagtggtttaatagagcatttgagttcagttctgagctgaggtactgttaactattctggtagaaatgtccatcaggggctgggtgccgaggctcaggcctgtaatcccagcagtttgggaggctgaggtggatggatcacctgaggtcaggactttgagaccagcttggccaacatggcaaaaacccgtctctactaaaaatacaagaatcagctgggcatggtggtgcgtgcctgtagtcccagctacttgggaggctgaggcatgagaattgcttgaaccaggcagacagaggttgcagtgagctgagatcatgccattgcactccagcctgggtgacagagtgagactttgtctgaaaaaaaaaaaaaagaaaaagaaaaaaagaaacgttcatcaggagttggagtatgctctctctctctccctctctttccctctccctctctccccctctccccatgcgtctctcccttgctctctctctgtctctcagattcgaagaatggtattgggtgagagatacacggcacaaggtttggaaattttaaggctaaaggtagcacttcaaaccatgggtgtggataaacttgctcagagagttcagggaatagaagacaaaagaggcaagaatagaaccctgaggaccaatttacaatggataagaagaggacaaagagctcaaggaaaagataaaggggatgaccagagacgtaggatgaaatccatgaggagcagcgttacagaggcctagggaggaggcagtttcaaggtggagcggtcagcaatctcaagtgtcaaaagaaggtcatgaataagggttcaaaagtatccactggattaggtacctggaaggtcactggtgagttgaaagctgtttcactggcatggtagacctgaagctggagtgcagtgggtgagcaatacaccagttagaacaggatagaaatcatgctgcatagctgaaggggaggatagggttgaggaagaggggtgtgtgagttttagcaataacagattaggagagatttaagcatgctgagggcaagaaccagcagagaaaaaaggctaaagagacaagagggagatgggtgactaagcctggttctttaggcattgtgaggggtggcaactggagcagagaggaaagggctagcctcaggagcaccaaaacccaagaggaagggctgaagtggtttcaagagctatggatttacagcagcgatttatacctgtgagcatggcagccagggtgagcatctcgtccacacagtcaaactcgcatgaggccagcagggctttggccagctcaggggccagagggaattctgatagtatgacacccagatctgacaggtccccatcatcatccagggctgccagatagtctaaatcttccagggcttgcatcagtgcttctggagctggtgaggaaacagggcttacaggatatgaagtttcagaactgggtggtcagatggcagtgcttgggcaggagaggtgctcaccaggctggtccaggaagtgacactcccctggctctgcaatctgtctcctttttagtagtaacaccagggagctcagattctcctcacacaccctgggttgtggcaatggtggagcttctagttctaagaaggacttaggatacaggcagaggcaggatcctgaggggaaaaagacctgggaaagaagaccactgtagatttctcagggcttgcatgttggtgactcttgggttttttatttcagtgagggcaaaggctcttacctggtgggaaccctcttgctcgcaatcgtcttgcctctgcctgacacttgctgattggcctcaacacttggaattctgctcggat

SEQ ID NO: 98198 - DNA, 15293 bp, Homo sapiens
ccaatctacagtccaatggcccccagcccattgccccaggcccctgccctcctgcagctcccacctgacccatcacttgctagcccattatgtgcctgagtcacgcttcagccacatctgttagagactcccactacctcaccccaaagctttctccagcgcttccattctgtgtcactacagatccgactcagtgggggccgcagccaacatgaggggcgagtcgaggtgcaaatagggggacctgggccccttcgctggggcctcatctgtggggatgactgggggaccctggaggccatggtggcctgtaggcaactgggtctgggctacgccaaccacggcctgcaggtgagtgggaaggaaaggggagccgaggctgttgtctcaaagcctgtgttttgggcagagggctgaggaatgagtcccttggcccaagatgctggatcctgggccttacagaaacatctgcatatgtccccaggagacctggtactgggactctgggaatataacagaggtggtgatgagtggagtgcgctgcacagggactgagctgtccctggatcagtgtgcccatcatggcacccacatcacctgcaagaggacagggacccgcttcactgctggagtcatctgttctgagagtgagtgaaggagggggtgatgcatgccagggaagggagtgtctgggccacccgtttgcagggaaagggggctgtaatctggaggggcacttcttccccataaaagagccagtttcgccgggtgcagtggctcacgcctgtaatcccagcactttaggaggccaaggcggatggatcacgaggtcaggaattcaagaccagcctgaccaagatggtgaaaccctgtctctactaaaactacaaaaattagccaggcgcagtggcaggcgcctataatcccagctactcgggaggctgaggcaggagaatcacttgaacccaggtggcagaggttgcagtgagccaagatcacgccgctgcattccagcctcggcaacagagtgagactccatctcaaacaaacaaacaaacaaaaacaaaaacaaaaaactagtcttacacactagggagggatggaagcacccctctctgtgaagtcagcagtgacttctaacacccccttcctttcttggtgcagctgcatcagatctgttgctgcactcagcactggtgcaggagaccgcctacatcgaagaccggcccctgcatatgttgtactgtgctgcggaagagaactgcctggccagctcagcccgctcagccaactggccctatggtcaccggcgtctgctccgattctcctcccagatccacaacctgggacgagctgacttcaggcccaaggctgggcgccactcctgggtgtggcacgagtgccatgggtgagagggtagggagtcaagtagaagggcaagaccacgggggatggggcaaaccttctgggggcagagaaggaaacagaagttcccttctccccacaggcattaccacagcatggacatcttcactcactatgatatcctcaccccaaatggcaccaaggtggctgagggccacaaagctagtttctgtctcgaagacactgagtgtcaggagggtgagttggggactgaagtgaaccacatggtatccattgcacagcctttccttacactgacatatgccaatccctccagatgtctccaagcggtatgagtgtgccaactttggagagcaaggcatcactgtgggttgctgggatctctaccggcatgacattgactgtcagtggattgacatcacggatgtgaagccaggaaactacattctccaggtacctggagtctggggcttccagatgggtgagtggggggagcgttaaagacacctttgaattcgaggattgtcgctgggttaagtggcctttttctcactcacaggttgtcatcaacccaaactttgaagtagcagagagtgactttaccaacaatgcaatgaaatgtaactgcaaatatgatggacatagaatctgggtgcacaactgccacattggtatttgatgggaagagcaacccaggaagattaggggatgggagggaaagacgttcattctcttttccatagcttgtttctccatcttcccaccttcctgtagagctctcagtccctccacttctacccacccttctccacagtgcatctatctccctccctctgtgcagggcgcctcccaaattgcctgtccactctgcaggtgatgccttcagtgaagaggccaacaggaggtttgaacgctaccctggccagaccagcaaccagattatctaagtgccactgccctctgcaaaccaccactggcccctaatggcaggggtctgaggctgccattacctcaggagcttaccaagaaacccatgtcagcaaccgcactcatcagaccatgcactatggatgtggaactgtcaagcagaagttttcaccctccttcagaggccagctgtcagtatctgtagccaagcatgggaatctttgctcccaggcccagcaccgagcagaacagaccagagcccaccacaccacaaagagcagcacctgactaactgcccacaaaagatggcagcagctcattttctttaataggaggtcaggatggtcagctccagtatctcccctaagtttagggggatacagctttacctctagccttttggtgggggaaaagatccagccctcccacctcattttttactataatatgttgctaggtataattttattttatataaaaagtgtttctgtgattcttcagagcccaggagtcagtgctggtggttggagggacctgcccccactggttcatttaaccctctgtctcggtgccctcagaacctcagccagaaaggcaaggaggaaatcagagcaggagcctcatactcttggtgatctattcattctgtgacctcaggggtcacatataaggtcagtgtttctcgtccccgccggatctgcactgccaactgggattgggttcgaacagcttcataaacatcttcagcattttgtaccatctgctccccaatggccaaaatcacatcaccaggccgcagaccagccctatagagaaaaatggacagagagaaaggaaggagtacaaagcctagttcaaggacacatgcacaccttgcccatccccatatcacactgcagcctctccctcaccggtgtgcaggggagcccaggatgactttatggatgagtacaccatgctgaacatcgggaaagcttggttctcgaagctgtagttcagcaaggatgctgaaagtacacagatcaccctattagccaaacccaggcattctccccatcctgagttccacctcaagtctctcatcaacacattgataaatatatggacaggacatgggctaggtactacaaaatacaatggcaactcactttctgtcttctagcaataaagtgcaacatgtacataaaagatgtacaccacatgagggcaccaaatgacaaacagtgttaaatcaatagcactaatgtcattctagaatactaagagaagctttaaggggaaagaacttaagttgagcctaaaaggatggatctgatattaaccatataaaacaagaacagcataaataaaaaacatgggagtaggaaatcaggttggctgagtattcatataggaaggtattacagccaggtctagaaagttgatttacagacagatggaaaatggcccttaaatgccaagttaatggattgaaggcttgaaatcaaagcagtaacaggatgaaatcaatctggtgacaggtgtacaaagtggagtgggataagaaagtcaagatgatgaagggagacagctcttgtgattatttcaagtgtgacacagttcatcttagataaagacagaaatgagaacaaagctcaatagaggtgcccccctctgattacactggtcacattacatgtcactgtccctaaagctcatacctgggactcagggtcagcatcatcaccccaatgtagcgccgctgggacccactgattccggaggaggaatctgtgacagagggacaaatgagccccacccagctacatccttccttccctgccctcttctcccagtagaccaccctccaggaagtcccactgaatgcccttcccctatttccaccacattaaaggaacccgtttccccataaggcaggctcactcttcttttccccacgatgcagaaactctcgaagacgatcagaagggatggcaaaggagattccagctgtgaccttcatggtgttcactccaatcacctccccatcctgcagggatacagcccccagttccctagcctaaacaaatagtaggggatgggggcacccgaacaaaagtaccagcaagtgttggggagatctggttggatattgagagatagccaacaaagaactgctcagaaacttgaccaaacatccttgaattaggggaaacctacccttcccacactgacctggggcagggattcttggaaggaaggatgtctcactcaccaggttaaccaggggacctccagagtttccaaactgtaggacaaggagaaaacatgaaagagatctggggattctaagtctgggggcataccaggatgtaggtactttctccaaattctcttctttctcagcccatgaataagtggccacatttttgcagcctaagctctatataggctcatccaccatatatcagttggtgcttgtaccacacagcctctcccccctcccccatcatttgtcatttctctcctatcaggacgcacatcaatagctgcatcagtttgaatgtattccacattggtttgggggagtcccaggtctctggctggacgctgagcagagctaacaatgccggatgtgatcgtgttctgcagtgcaaagggacttcccatggcaacaacaaactccccttgccggacatcagctgagcgtcccagaggcagcgtggggagaggctcctaagggagaatgggtaaaagagacctgtcatctgaagatgcgagcaaataagcagctccaaccagacctggcctaccccagcccccaccttagtctgaatcctcagcgttgcgatgtctgccacgggatccacagctgtgaccacggcctcatacgtgtcgccgcttagcagtctcacacggactctgcgccgatcagccaccacatgggcgttggtgacaatgagcccatcggcagccaccacgaatcctgagccgttcgagatagggacctcgcggcccaagaaagggtgcctgaaatggagggaaagcacagataagaggaggctctgacccctcctacccgcccgccctccagcctgtggcttcagtgcctcccggtctacccccaccattaccggtccaggatctcgatatagaccacggcaggtgctgtcttctccaccacatctgcgatgaagttgtactgactccggggagaagcgggcggcgggctagggacggcggcgaggacggccggaggaccccgacccccgccccacaacaacaacagcactgcccccccagcgcccagcgccaccgccagccacgcgcgcgaacgggttccagagttctctgaggcctcccgggtcctggtatctggggtcaccgcagtcagttgtgcccggggacccggggtcccagacgtcaggcatgctcggggttcagtgaccccaacagacaaccgggcccagagactgggggtcccataagtcactcgggcccgggggtcagaagttcctgacgtcagcagggcccggaggtcaggggtcaaacggggtctcctcccccagcgaatgccccccaaagcccgccatgcccgaaggctccagcctgcaccccgccccgccctcggcgcagccatcagctccgccttggctgcctcctcgcccgccctactcagaggcggcacccaggacgcgagcaggcggacagtaggacgcggggcacgccggtacctgaagtccttcagaagtgcacgccgggaccaggattccgggaggccgactcctccctgccccacgaatgccgggaattgtggtctccgccggacgcgagttgtgagacggcccaaggggccgcggggtatgctgggaccgctagcccttccggcgcgcctcaggacttcgggtcccctcaccccgggcggatgcccaaagactccgccttcccaagagcccctgcggccgggcgcgaaaatggcggcggcggcgacggccgggcgctcctgaagcagcagttatggagcttccctcagggccggggccggagcggctctttgactcgcaccggtaagagacccggcgggaagagaccgatccccgcgtgctctcggccttcggcgcctgaccacttcgcctctcgcccccaggcttccgggtgactgcttcctactgctcgtgctgctgctctacgcgccagtcgggttctgcctcctcgtcctgcgcctstttctcgggatccacgtcttcctggtcagctgcgcgctgccagacagcgtccttcgcaggttccgacgcgggcgttcggggagtgtcagagctgggtctggcccgaggccacacagtcaccacctcctgtgtccccagattcgtagtgcggaccatgtgtgcggtgctagggctcgtggcccggcaggaggactccggactccgggatcacagtgtcagggtcctcatttccaaccatgtgacacctttcgaccacaacatagtcaatttgcttaccacctgtagcaccgtgagtgagagcgaggccgagagcgccacggggcggttccctggggcccagctgaaggcccccctgtccccactcgcgttccscatggaggatactgagccttacccctaaccccgatcctctacccaacatgtcagttttttttttcattttcctcaatatttttcttcttgctttctcttctcctggttcccagcctctactcaatagtccccccagctttgtgtgctggtctcggggcttcatggagatgaatgggcggggggagttggtggagtcactcaagagattctgtgcttccacgaggcttccccccactcctctgctgctattccctgaggaagaggccaccaatggccgggaggggctcctgcgcttcaggtgggtttagcacaggtatggggcgccagctgggtaggtggtcaagcttgtgggcccttgagtttttacaactttcttcggcccttagaccccatcatckccagttcatttcctttctgtccactttaagttctttctcctgaatcccttcattcttcaattatgtgcttgtagagtttgacagttgcctgttataaggcaggtgtgagctgctgactaggctggctggattcccatcctactttctccttcctcttctagttcctggccattttctatccaagatgyggtacaacctcttaccctgcaagttcagagacccctggtctctgtggtgagtgtgtgttgaacagggaatctctggggcttgaaggggaaatttcccatccctggccctggcttaggcctcatctcatgccctcccctcagacggtgtcagatgcctcctgggtctcagaactgctgtggtcacttttcgtccctttcacggtgtatcaagtaaggtattaactgtcctcacattttggtcgctggggagaggctcacctcaaggtcaaggaattagtggcctctgccctgtccatttgtagatctttatatcaaggttctaccacagaggcaacacaaagtatttacagtatttactattttcccacccaccatgcaaagaggtaccaaagtggggaatggtgacagcctctaccctgggtgcccacaacatagccctggattgtttctttgcaggtggcttcgtcctgttcatcgccaactaggggaagcgaatgaggagtttgcactccgtgtacaacaggtggtcgggtgcacagacagggtggaggcggggtccctgcttaggaggagagggaggaaagcttgagatcttgacacttccagtcttccaattctccctagctggtggccaaggaattgggccagacagggacacggctcactccagctgacaaagcagagcacatgaagcgacaaagacaccccagattgcgcccccagtcaggtatgtggtctctatacattacagcttttggggtttttttttttcggcctactgtgattcctcccctatttctgtgctagttagcctctccttctagttctctacttaccagaatttcttttttctttttttcctttttccacagcccagtcttctttccctccctcccctggtccttctcctgatgtgcaactggcaactctggctcagagagtcaaggaagttttgccccatgtgccattgggtgtcatccagagagacctgggtatgggaaagggtggccccacactgggagatgggcacagggaggaaaagtgggttgtgaaggaagaaagtaagtagggagtggactcccttctcttttctccccagccaagactggctgtgtagacttgactatcactaatctgcttgagggggccgtagctttcatgcctgaagacatcaccaagggaactcagtccctacccacagcctctgcctccaaggtgagacccaggaaatggtcagatccaagtgttggggtgagttgggggcaggctatgtactcccttatccctgacctttcttttttgatcctgagaccctagcatagtgcctctcttgcaaagtaggcattcgatgcgtgtttaatgatgatgactccgcaagccctctgacattgtgatcacctcagtttcccagctctggcccggtgacccctcagccaacagccctaacatttgccaagtcttcctgggcccggcaggagagcctgcaggagcgcaagcaagcactatatgaatacgcaagaaggtgagggggttagaggacaattaataggatgtggcaaattggagaatggaattatggagctactacggcaaagcctgaataatatctctccctatgtcccacaggagattcacagagagacgagcccaggaggctgactgagctcaaaggaacaggatggcacccagagccgcaggacggagactgggggcagccctcacccaactcacaacaggctggatgggtgggtggtaaaaagggaaggatgaggctcccccaatgtcacattaaattcatggttttcattcaaggcatctgttgtctctctcggtctcaaaagccctgtgagtgggttccttattccttggctgcgggggatgggggtgagagtcttctcgtacatttgaagggggtagtcagactgcaactgtctaaaatcacctcctcatgccaagtgatgagtgataaattaaggaagtgtaactgaactgaagacccagcttgggtgatcagcccaggttttggaggaagctgctgcaaaactacaagtcccagcatgcctttcacaagcacactacacatcatctatagagttcacacatgctcagtgtggtagctggagcctgttttccataggttcctgactaggttaaataaggtggagcaaatagccccaccccaaaagcaggcttcaggatttgaagtttgagcccatccctgaggtagagccggaatttacctttgtacttcacacggtcagggttggtggtgactacgtgggtctggagctgactgccgtcctgacacgtcctagagctgcaagcaggtttgaatccaggatccctgtgactctgctgttcctctccccaccccctatattctttatccttttcccttcaggactttcccacaggttactaggtctcacataatttctactgcccttgaggacccctgcctaagtaagatttctactacctgccaacggggtaatagtctcaggtagatttctactacctgactatagggactgtcgactaactctcagtagccctttatcaaaatacctagcactgtttcctggcaggaaatgctgggaagggtgggccccagagcatgatcaactgaaggtagaggttaaggatcagggctgaggtgggaagatggtgtcggtcaccaaatatgaccttactggctgctctgccttctgcaggtcctgccagagagccaccatgacctctcagcctctcaggctagcagaagagtatggcccaagtcctggggagtctgaactggctgtgaacccctttgatgggcttcccttctcttcccgctactatgagctgctgaagcagcgccaagccttgcccatctgggctgctcgctttaccttcttggagcagttggagagtaaccccactggagtggtgctggtgtctggggagcctggttctggcaagagcacccaggtgtggtgggggttgtgggggcaggcagattctgggagtggacaaagggaggacaaagggaggacaaagggaaagtggcctttccctgggcaaggggggactgggctgcgtggggtcatgaggaaggtgaacgaagagagatgggatgggttaggttggccctggaggctggtgaaagaccaggggactccccaaataaggaaagattaaagtggccatagttccctgagcacttctgactgaagtcctacatcttcctcactggctctccttccctacttctatcccagatccctcagtggtgtgcagagtttgcgctggccagagggttccagaaaggacaggttactgttactcagccctaccctcttgcagcccggagcctggctctgcgggttgctgatgagatggacctgaccctgggtcatgaggttggatacagcatcccccaggaggactgcacggggcccaacaccctgctcaggtgggggcctctgcaggccttacccgaatataattccccttattcagtagaaacaaacccattcctctggcatctcaccataccctcccttagcccaactcactcttttttattttatttattttggagaaagggtctcactctgtcacccaggctggagtgcagtggtgcaatcacaactcactgcagcctcaacctcccgggctcaagtgatcctcccacctcagcctcccaagtaactgggaatacaggcgcgcacctccacgcctggctaatttttatattttttgccatgttgcccaggctggtctcaaactcctgggctcaagtgatccacccacctcggtctcccaaagtgtaaggactacaggcatgagccaccgtgcctggccccaactcactctaaattgtgtgtggtgcaatggctaaaataagcccttgaatcccagccaggggcctcagacattcagcctcaccctcatcagaaaaatttcacttcccagctggcgtataccttgtgaacaaagtgttctcagcggggttgtggggtgacagttatgggtccataggctcaggaagtcacagcatatttttctgaccttcaatatcaaaatatacgtcccttggggagaagattccctgagcttgtggggctggtcagtgtccacactgattcctctgcccactaccaatgtcaacaggttctgctgggacaggctgcttctgcaggaggtggcctcgacccgaggcactggagcctggggcgtgctggtactagatgaggctcaggagcggtcggtggcatcagattcactccaggggctactgcaagatgccaggctggaaaaacttccgggggacctcagagtggttgtggttactgacccagcccttgaacctaagctccgagctttctggggcaatcctcctattgtgcatatacccagagagcctggtgagagaccttcccccatctactgggacaccatcccacctgatcgggtggaagctgcctgccaagcagtgcttgaattgtgtcggaaggagcttccaggagatgtgctagtgttcctgcccagtgaggaggtaaaaaacaaaacaaaacaaaaaaaacagcctgcaaaatgagcctgcaaaaggaggtactcatcatcatcttccagtcctgaggaatgggaatgggagcaatgcctcttaggaacagtagagttgcagtatttactctccgttggggtcccagagaaaaacttgaggatttcagggtaaagaggtttaccactcacttttttattccctttaatgcagagatttgtgattcagtgaacccctgaaattataaaaccttcaactttatgagtaatttgcattttctcagagtgaagggccataactttcaacagtctttcaaagggatctgtgaccccaaaaaacgtgagaactgccctaatgccccacccacccttcttctcaggaaatttccctgtgctgtgaatccttgtccagggaggtagagtccttgcttctccaagggcttccaccacgagtactgccccttcacccagactgtggacgagccgttcaggctgtgtatgaggacatggatgcccgaaaggttgtggtcactcactggctggctgacttctccttctccctcccttccatccaacatgtcatcgactcaggactggagctccgaagtgtgagtgagagagagagatagcggtggggtagtaaagacagaaatggcccactctgatctgtcttggccttggttgggggacgggcaacaggtttacaatcctaggatccgagcagaattccaagtgttgaggccaatcagcaagtgtcaggcagaggcaagacgattgcgagcaagagggttcccaccaggtaagagcctttgccctcactgaaataaaaaacccaagagtcaccaacatgcaagccctgagaaatctacagtggtcttctttcccaggtctttttcccctcaggatcctgcctctgcctgtatcctaagtccttcttagaactagaagctccaccattgccacaacccagggtgtgtgaggagaatctgagctccctggtgttactactaaaaaggagacagattgcagagccaggggagtgtcacttcctggaccagcctggtgagcacctctcctgcccaagcactgccatctgaccacccagttctgaaacttcatatcctgtaagccctgtttcctcaccagctccagaagcactgatgcaagccctggaagatttagactatctggcagccctggatgatgatggggacctgtcagatctgggtgtcatactatcagaattccctctggcccctgagctggccaaagccctgctggcctcatgcgagtttgactgtgtggacgagatgctcaccctggctgccatgctcacaggtataaatcgctgctgtaaatccatagctcttgaaaccacttcagcccttcctcttgggttttggtgctcctgaggctagccctttcctctctgctccagttgccacccctcacaatgcctaaagaaccaggcttagtcacccatctccctcttgtctctttagccttttttctctgctggttcttgccctcagcatgcttaaatctctcctaatctgttattgctaaaactcacacacccctcttcctcaaccctatcctccccttcagctatgcagcatgatttctatcctgttctaactggtgtattgctcacccactgcactccagcttcaggtctaccatgccagtgaaacagctttcaactcaccagtgaccttccaggtacctaatccagtggatacttttgaacccttattcatgaccttcttttgacacttgagattgctgaccgctccaccttgaaactgcctcctccctaggcctctgtaacgctgctcctcatggatttcatcctacgtctctggtcatcccctttatcttttccttgagctctttgtcctcttcttatccattgtaaattggtcctcagggttctattcttgcctcttttgtcttctattccctgaactctctgagcaagtttatccacacccatggtttgaagtgctacctttagccttaaaatttccaaaccttgtgccgtgtatctctcacccaataccattcttcgaatctgagagacagagagagagcaagggagagacgcatggggagagggggagagagggagagggaaagagagggagagagagagagcatactccaactcctgatgaacgtttctttttttctttttcttttttttttttttcagacaaagtctcactctgtcacccaggctggagtgcaatggcatgatctcagctcactgcaacctctgtctgcctggttcaagcaattctcatgcctcagcctcccaagtagctgggactacaggcacgcaccaccatgcccagctgattcttgtatttttagtagagacgggtttttgccatgttggccaagctggtctcaaagtcctgacctcaggtgatccatccacctcagcctcccaaactgctgggattacaggcctgagcctcggcacccagcccctgatggacatttctaccagaatagttaacagtacctcagctcagaactgaactcaaatgctctattaaaccactccctcaccaccatcaccacaaaatcttttcctctctctagagtcttagattcagataatactattatctctgctgctctgctaccatcactctagaccagtctttctccaggttatttcacttttatctcctaaatgtaaatatatatataaatatattcatctgtccttctccatattcacttccagtgaatacggtaggtaggatctgccaatggtaggtcctcctcattgctcagctggttttcctcagtagcctcctaactagtaatgtgaactttttcagacacatggactctcttacttaaaaactcttcttcagccaggcgtggtggcttgtgcctgtaatctcagcactttgggaggctgagatgggaggatcacatgaggtcaggagtttgagaccagcctgggcaacataggagagaccctgtctctacaaaaacaaaaaattagccaggtgtggtggcatatgcctgtagtctcagctactgaagagactgaggtaggaggatcatttaagcctgggaggttgaggctgcaacgggccatgatcacgccacttcactccagcctgggcaagagagtgagaccctgtctcaaataaacaaacaacaacaacaaaaaaaaccccacaactcttcctctacagctactctttaccttaaagacagttcctttcctcagtactccagcctctcat

SEQ ID NO: 98199 - DNA, 63985 bp, Homo sapiens
  misc_feature (1)...(63985): n = A,T,C or G
aagttgtgtttcatctccaggaagtgttggctgcagcaaagattggatgtgacaccagaaaaaaagagtcattggcaggatcctttaaggattctgctacatcactgcagaagtgttctgtctcccagcacagaaagtctgccttagcacatactgttctgagcagttacagtttttaaaaaaacttcccctcccttatcttaggaaacagctagcccatttctcctcttaattaacccctaatcatgactcagttactcagttacgctcccagcccattcttgtggaagccctgcaaagcaagccagtgggaccatggaaacgtgtaatttagcgaagccttggattctcagtggctgcaaagtgaagccccgaggggaggtagctttgtattctaaaacagcaaagaatgctgtgttggtagctccagccagattggtgatctgagtaatgtggacgtttcaataggccccagcagagtcctaaaaatatagtctgcctggtcagctctgccatgtcagtttctaaaactgtcagcaccagtagggcagcagaaccactctcaaagcagaggcttttcaacttttgggttcactgaccgctttcagggacaggaggcctcaccagcctcctagcctctttgatcccaggcaccctggcttcttcctgagagggaagcatgaaggggaagctgcccatcttctcttgcctgaatcctcaccactccttgtctgcagctctgtgtccaggaacagccactgttgcttccgacaggagctgagaaatgatgagctctttgctgtattttgataaaatgaagcccaacgtggacagcaggcacgaggttcctgcaggaaccttggcttctctgaggtactcaggcctctggggaaccaaacacaaaacaatttgatttgtcatcaaggacaccagctcaacacatttgcagatgtgtttggcctggaacatcatccttctccttggccacagtgccatgtgactagccctccaatgccacagggaaataagagcactggtgtcaaactaggaggtaacgcgattcaaagagacccttcaggagggcttggccatagataaaaggatgagggggaagggtaggcaggaggaggagaaaaaagaaacagcagtagccatggttatcttttgtctagtatctactgtgtacaaagtattttgtgttagatgctgtgtgtgtgtgtgttcacttaattatcagggaaatcctgtgaagtaagaatgatctcaggctgggcacggtggcttgtgcctgtaatcccagcactttgggaggcctaggcgggcagatcacgaggtcaagagatcgagaccatcctggctaacacggtgaaaccccatctctactaaaaatacaaaaaattagccgggcatggtggcgcacatctgtagtcccagctactcgggaggctgaggcaggagaatcacttgaacctgggaggtggaggttgcagtgagctgagatcacaccactgcactccagcctgggtgacacagcgagactccatctcaaaacaaaaaaagcaaaaaaaaaacaatgatctctactttgcaattaaagaaactttgactcagaggctgggcatggtggctcactgtaatttcagcattttgggaggctgaggtggattaatcatctgagatcaggagttcaagacccgcctggccaacatggtgaaaccctgtctctactaaaaatacaaaaaattggccaggcggtggctcacgcctgtaattccagcacttgggaggctgctgaagtgggcagatcacctgaggtcagaagttcgagaccagcctggccaacatggtgaaatcctgtctctactaaaaatataaaaatgaaggccgggtatggtggctcatgcctgtaatcccagtactttgggaggccgaggtgggcagatcatgaggtcaggagatcgagaccatcctggctaacatggtgaaaccccatctctactaaaaatgcaaaaattagccgggcgcggtggtgcacgcctgtactcccagctactcaggaggctgaggcaggagaatcacttgaacccaggaggcggaggttgcagtgagccgaaatcgtgccattgcactccagcttgtgcaacaagagtgaaactctgtctcaaaaaaaaaaaaaaaaaaaaaatatatatatatatatatatacacacacacacatatacaatatatacaacattgtatgtatgtgtgtgtatacacacacacacacacacacacacacacacacatatatatatagagagagagagagagagaaagtcaaagcgtggcttttggaactgattctgggctaggtatagatcccaggagaacccgtgttctacaaacctcactctgggcaaaactgacccagactgggttttgggatgcttgatgtaatgaggcaagtggcgcgatcttggcttactgcaatggagcggctccttctgcctgctgccgtcagattctctgctatctggctggcaggacaattcgctatggcctggcttttgcaactgattctgggctaggtataggatcccaggagaacccgtgttctacaaaccccactctgggcaaaactgacccagactgggttttgggatgcttgatgttaatgaggcaagtgatatgtctactgaacttactgctccaagtaggacattgtaactttgagttcccctcatccctttcatattggaggagttgtctgggcagcaggagctacggcaggccagggttgctctagtttttagccagagctagcaggtaagtgcctcccaatgatatgcagattaaagataagtaatcctggcccatttctgctcaagtggctatagtttgcaagtgacagccaccaattccagggacttgaatggctactggaattgaggaagtcctcccactgactgggctgggtagtgcagggagggagaggacaccattctgactgactccagactgacatcaggactagtctccctaggagtgcagggactttacctcctctgcattttcatgaccactgtcctaggccagttgtgtgcctcctcactacaagccagcaattgctgggccaacatatgcttcctgaaaacacagatccagcctctcttgttctttccacttatcaggtggctcaaaggctacccaatcaatcttccaaaagctcagatcctaaacctacacgggctccccagtaccatcagtaactcctgtacttgctttcatggctcatctcatcttttcaatnnnnnnnnnnnnnnnnnnnnnnnnnnnnnnnnnnnnnnnnnnnnnnnnnnnnnnnnnnnnnnnnnnnnnnnnnnnnnnnnnnnnnnnnnnnnnnnnnnnnnnnnnnnnnnnnnnnnnnnnnnnnnnnnnnnnnnnnnnnnnnnnnnnnnnnnnnnnnnnnnnnnnnnnnnnnnnnnnnnnnnnnnnnnnnnnnnnnnnnnnnnnnnnnnnnnnnnnnnnnnnnnnnnnnnnnnnnnnnnnnnnnnnnnnnnnnnnnnnnnnnnnnnnnnnnnnnnnnnnnnnnnnnnnnnnnnnnnnnnnnnnnnnnnnnnnnnnnnnnnnnnnnnnnnnnnnnnnnnnnnnnnnnnnnnnnnnnnnnnnnnnnnnnnnnnnnnnnnnnnnnnnnnnnnnnnnnnnnnnnnnnnnnnnnnnnnnnnnnnnnnnnnnnnnnnnnnnnnnnnnnnnnnnnnnnnnnnnnnnnnnnnnnnnnnnnnnnnnnnnnnnnnnnnnnnnnnnnnnnnnnnnttcttctcctcctccttcctccccctcccccttctcctcctcctcctccctcctttcttccttctccttcttctttcttctcctcctctttcctccccctccccttctcctccccctccttttcctcttcttcttctcctcctcctccttctttcttctccttctttccttttttttttttgagacaaagtctcactctgtcacccaggctggagtgcagtggcgccatcttgactgactgcaacctcctcctcccaggttaaagcgattctcctgcctcagaccacgcccggctaatttttgtacttttagtagaggcagggtttcaccagttggccaggctggtctcgaactccttaccttgtgattcacctgcctcggcctcccaaagtgctgagattacaggtgtgagccactgcacccagcctttctccttctttcttcttcttccttcttcttccgccttctcctttgaacccagcagtcagaggtggcagggagtcaagagtgtgccactgtattccagcctgggctacagagcaagactccatctcaaaaaataacaataataaaacttcttctttcttctcctcctcctccttctttccttccttttttttttttcaagacagtctcgctcattgcccagactggagtgcagtggcgagctctctgctcactgcaacctccgcctcccaggttcaagcaattctcctgcctcagcctcccaagtagctgggattataggcatgtgccaacacgcccagctaatttttgtatttttagaagtgatggggtttcaccatgttggccaggctggtcttgaactcctgaccttgtgatctgcctgtctcagcctcccaattcttctttcttcttccttcctcctttcttcttcctctttttcttcctcctccttcttcctccctcctactcctcctgccgcctcctcctccttcttcttctttgtctttctcttcttccttcctcttctttctttttcttcttttcttcctgttgggggcaggtgttgcaccaaaatccataatgctgacatgtaaaccagttcacaatggaggaactctgattgaagaggatgtcagggatctgctaattccttctccacttccgttttaaaaccgctgcttgaaccaaatggttctgatcactgttgctctcaaatacctccatgctggctgggcgcggtgcctcatgcctgtaatcccagcactttgggatgctgaggcaggacaatcacctgaggtcaggagttcgagaccagcctgaccaacatgatgaaaccccatctctaataaaaatacaaaaattagctgggcgtggtagtgtgcacctgtaatcccagctactctagaagctgaggcaggagaattgcttgaacccaggaggtggaggttgcagtgagccaatatcatgccattgcactccagtctgggcaaaaagagcaaaaatctccatctcaaaaacaaaaaacaaaaaacaaaaaaacctccatgcttttgctcatactgtattctctgtctgtaatgcctggcatctcttcatgtccaaatcttctttcttcttcttcttttttttttttttttttttttttgagacagggtctcaacctgtcgcccagcctggagtgcagtggtgcagtcatggctcactacagcttctcatgtccaaatgttatctgtcctttagggcacaacatgaatgctacaaagcctccagaccattcctctctccaaccctcaacattcactcttatgcccaaaaaggctttttcccttctctgggcctacacaggacttgtgcttccctcacggaaatgagtgactactttctaccacaaactgattacccgtatccagatttcatttcttagctccataagaggcaggcccatgactctatccatcatctgtcactctttcacaaagctcaactgagtgtcttgtccttggtttcatgccagatgccacacctagaataaaagtaatgttaagtaaatgaaagtgggttgaccaacattgtctccatccttgtggataaggaatttctatctcctggggagggtagacggagagatgttggtctaaagatacaaaatttcaattagactggaggaatatgttcaagagaactgttgtacaacatggtgatgctagttaataacaatgtattacattctttttttttttttgagatggagtctcgctctgtcacccaggctggagtgcagtggtgcaacctcagctcactgcaacctccgcctcccaggttcaagtaattctcttgcctcagcctcctgagtagttgggattacaggtgtgtgccaccacgctcggctaatttttatatttttagtagagacggggtttcaccatattggccaggctggtctcaaactcctgacctcaagtgatccacccctccccggcctcccaaagtgatgggattacaggcatgagccaccgcacctggccagtgtattgtattcctaaaaattactaagattttgtgttctcaccacaaaaatgaaagtatatgggataatgcatatattaattagcttgacttagccattctacaatatatacatatttcaaaacagtgtgttgtacatgataaatatataagattttgtcaattaaataagaaacttttgggctgggtgcagtgactcatgcctgtaataccagcactttggaagcccaaggcgggcagatcatttgaggtcaggagttcaagaccagcctggccaacagggtgacatctcgactctactaaaaatacaaaaattagctgggcatggtggcgtgtgcctgtaatcccaggtacttggaaggctgaggcaggagaatcgcttgaaccaggaggtggaggttgcagtgagccaagattgtgccactgtactccagcctgggcgacagagcaagactccatctgaaaaaataacgacaataataattattattgctattataagctgctatgaacattcacgtacaagtgtctatttaaacatacattttcatttatcttgagaaaatatctaggaatgaaggttcttagtcatgtggtaagtgtatgttaaacttcataaaaaacaggccaacagttttccaaattggctgtatcatgttatattcctactggcaatgtaagagagttccagacrctctacatcttcagcaacatttggcgatgycagtttttcaaaaattttggacattccagtggatgtaaggtggtatctcagcatggttgtaatttgcattttccacattactaatgatattatctttttatgtgcttattggctatttgtatatcttcctttaggaaaatatctgttcaagtattttgtcatttttaaaaagttgtattggctgaccgcagtggttcatacctgtaatctcagcactttgggaggccgaggcgggcagatcacctgaggtcgggagttcgagaccagcctgaccaacatggagaaactccatctctatttaaaaaaatacaaaactagctgggcgtggtggcacatacctgtaatcccagctactcagcagctgaggcaggagaatcgcttcaacccgggaggcggaggttgcggtaagctgagatcatgccrtcgcactccagcctgggcaacaagagcaaaactccatcatattaaagaaaattgtattgtgagccttttaattacagatttgcagatacgagtaatatacaccggtgtaaacacacagacatattttagacacaagactttcgtcagatatatgtattttgaacatttctctcaattttggcttgcctattcattttcttcatagtgtcctttgatgaacaaaaggtttgttttgtttttttgaaaccgagttttactctgtcccccaggctggagtgcagtggcacgatctcagcacaatgtaacctctgcctcctgagttcaagtgattcttgcgcctgaccctgagtagctgggattacaggcatgcaccaccctgcctggctaattttttgtatttttagtagaggtggggttttgccatgttggccaggctgtttccaactcctggcctcaagtgatctgcctgccttggcctcccaaagtattgggattacaggcgtgagccactgcatccggcccactttaacattttctacttctatttttatatattctaattgctgagtttgttgttgttgttaattctattcagtttgacgtatgggtcaatcagggctctacctaggacttcatatacaggcttaaagaatccctttgaccggtttcctctcttctaaaatcctctttggagggccaggtgcagtggctcatgcctatatccccaacactttgggaggcygaggcaggcagatcacctgaggctgggagtgcaagaccaccctgaccaacatggagaaaccccgtctctactaaaaatacaaaattcgccgggcatggtggcacatgcctgtaataccagctacacgggagggtgaagcagaagaatcacttgaacccaggaggtggaggttgcagtgagcccagatggcactattgccctccagcctgggcaaaaagaatgaaactctgtctcaaaaaaaaaaaaaaaaaaaaggtatctttcatgagactccatgattgcatatatccatttaatcaccactatattcaggatatagaacacttccatcaccctagaaagttccttatgtcctctcccattcaatccctatcccctctttaggcaactgttgttttactttctatcctcagagattagtttgcctgttcttgaatttcaatttcttgggagtagaatcttatggtgtgtatgtgtgtatcttattgtgcatacacactatacgggttgtatatatatatttcttttggcttctttaaagcagcctgattttgagatttcctgtattggcttttttttttttttttttttttttttttttttttttttttgccatctctctttgtatgctttgatctaccttcaacttcactgaacgtttccttttttttttctttttttttttttttgtgatggagtcttgctctgtcccaggctggagtgcagtggcgtgatcttggctcactgaaacctctgactcccaggttcaagcgattctcctgcctcagcctcccaagtagctgggactacaggtgtgcgccaccacgcccacctgatttttgtatttttagtagagacaaggtttcaccatgttagccaggctggtctcgaactcctgacctcaggcaatccacccacctcggcctcccaaagtgctgggattacaggcgtgagccactgcacctggcctcccctcttttttttttttttttttttttttttgagatggagtcttgctctgtcccccaggctggagtgcagtggcacggtctcggctcactgcaagctctgcctcccaggttcacgccattctcctgcctcagcctcccgagtagctgggactacaggcgcccaccaccatgcccggctaattttttgtatttttagtagaggcggggtttcaccgtgttagccaggatggtctcgatctcctaacctcgtgatccacccgtctcggcctcccaaagtgctgggattacaggcatgagccaccgtgcccggcctctaatttgttgttaagcctaggtagtaaattattcattttagatattgcaggtgttctttgtaagactttcattaaggtctttttctgtttctgtttctcttctaagattgccggtctgttcactcattatgactattaagtctttgaacttttttttttttttgagatagtctcacgctgttacccaggccggagtgcaatggcatgatctcagctcactgcaacctccacctcctgggttcaagtgattctcctgccttagcctctgaagtagctgggattacaggcacatgccaccacacctggctactttttgtgttattagtagagacggggtttcaccatgttggccaggctggtcttgaactcctgacctcaggtgatccacccacctcagtctctgcaagtgctgggattacaggcgtgagccaccacacacggcccaaatatatttttgatagatatttttaagtccttctctgctgattcaacttctgagtcatctttgggtctgtttctctgtttctgttgactgcttttctcctttactgtgtgtcccatttcccattaacagtatacacgtctgttgtatactaaatattgtgaatgacaaaagttgtagactctggcttctgttgttatttactggaaagtgttggtttttgttctggcaggcaattctctttgagtttatggagaattgattttatccaatgttaggctgggtctaggaaaaggcctttcaacttatatacagtataactaggaggtccaagttcattcttttgcatgtagctatttggttatcccagcaccacttgttgaccattcaatagtcttggcactcttgtcaaaaaacaactgaccrgtaaggtgcagtggctcacgcctgtaatcccagcactttgggaggctgaggtcaggagattgagaccaatctggctaacatggtgaaaccccatctctactaaaaatacaaaaattagccaggcgtggtggcatgcacctgtaatcccagctacagggaggctgaggcaggagaatcacttgaacccacaaggtggaggttgtagtgaaccaagattgtaccactccagcctgggcaacagagtgagactccatctgaaaaaaaaaaaaattaaaacaaaaaaacaattgaccatatgcttgcctattgtgattttttaataaaaaaaatcaattgaccatagatgtgtttatttctgaacttgcaattctatctatatgtctatccttatgctaacaccacagtcttgactattactgctttgtagtaagttctgaaataattggaaagtgttgagtcctctaaatatgctcgtcattttcaagattattttttcatattctgggttccttataaccccatataatttttttttcttagacaaggtctggctctgttgcccaggctggagtgcagtggcacaatctcagctcactgcaacctctgcctcctgggctcaagcaatcctcccacctcagcctcccgagtagctgggactacaggtgcacaccaccacactaggtaatttttgtagagacggggtttcgccacattccccaggcgggtcttaaactcctgagcttaagtgatccacctgcttcagcctcccaaagtgctgagattacaggcatgaaccaccatgcccaggcagtttcatactttctatatctgggtcttttttttttcttcttgagatggagtttcactcttgttgtccaggctggagcgcagcggcaccatctcgggttgctgcaacctctgcctcccaggttcaagtgattctactgtctcagcctcctgagtagctgggattacaggcacccgccaccacacatggctaatttttgcatttttagtagagacatggtttcatcatgttgcccaggctggcctacaactcctaacctcaagtgatccaccctcctcggcctcccaaagtgctgggattgtaagcgttagccactacacctggcctgtttcttttaaaaacatgtttctagccaggcacggtggctcatgcctgatatcccagcacttcgggaggctgaggtgggaagatcatttcaggtcacaagttcgagaccagcctggccaacatccagtatggtgaaaccctgtctctactaaaaatacaaaacctagttgagcacggtggtgcatgcctgtaatcccagctactcaggaagtgaggcaagagaatctcttttaccttggaggtggaggttgcagtgagccaagatggtgttaactgcactccagcctgggtgagactccatctcaaaaacaaaaaccagaagcttctaaacatgttaactatggctcagacctgtaatcccagcactttgggaggccgaggtgggtggattgcttgagcacagcagtttgagaccagcctggacaacatggcaataccccgtctctacaaaaaatacaaaaattagccacgcatggcggtatatacctgtggtcccagaaacttgggaggctgagctggcaggatcattgcagcccgggaagtcgaggctgcagtgagccatcatcatgccactgcacttaggtctcagtgacaccctgtctcaaaaaattaatattaaagaataaaataggctgggcatggtggctcacacctgtaatcccagcactttgggaggccggggcggggggggggcacggatcacttgaggtcaggagttcgagaccagcctggtcaacatggtgaaaccctgtctgtactaaaaatatgaaaattagctgggcgtggtggcacctgactgtagtcccagctactcgggaggcagaggtgagagaatcacttgaacctgggagatggaggttgcagtgagctgagatcatgccattgcactccagcctgcacaacagagcgaaattccatttcaaaataaaataaattttaaaaagaaaaaaaaaagttaactagtgctaatatgccactgttataacgcctgtaatcccagcatgttgggaggccgaggtgttatcatgacatcaggagttcgagaccagcctgaccaacatggtgaaaccctgtttctactaaaaatacaaaaattagccaggtgtggcagcacgcgcctgtaatcccagctactcaggaggctgaggcagaagaatcgcttgaacctgggaggtggaggttgcagtgagccgagatcgtgacactgcactccagcctgggtgacagagcaaggctccatctcaaaaagtggcaaattaaaacaatgttattacttcttcaaaattaaattatctgaacttggcattttcttagccttagacttcacagaccttacagtcaacacacaattcctatctccactgcctccctctcccagctcaagtctatgttttatgaaaaataagttacaggcagaagtggtggtgcacacctgtagtcccagctactcgcgaggctsaggaggaaggacagcctgagcccaggaggctgaggctccagtgagcagtgatggcatcactgcactcaggctgggtgaaagagtaagacacagtctcaaaaaaaaaaaaaaaaaaaggctgggcgtggtggcttaagcctgtaatcccagcactttgagaggcagaggcgggcagatcacaaggtcagttcgagaccagcctggccaatatagtgaaaccccgtctctactaaaaatacaaaaattagctgggcgtggtggtgcatacctatagtcccagctacttggtaggctgaggcagaagaatcgcttgaacccaggaggcggactttacagtgagccaagatcacgccactgcactccagcctgggcgactgaatgagactctatcttgaaaaaaaaaaaaaaaagagagagaaaaatatataagaaaaaccagaatgaaaacactatcatttcttaaatgagttaacatatttaaagtatcttgtacacattgttaattaaatgttagttattattccatagctgctaattttttaggaactgtctaaaagtttcaactgtttttaaaatcaaatttaaaaaataggttataatctcagtatagaaaggcatgatatggctgggcacagtggctcgtgcctgtaatcccagcactttgggaagccgatgtgggtagaccacatgaggtcaggagttcaagaccagcctagccaacatggtgaaaccccacctctaccaaaaatacaaaaattagctgggtgtggtggtgcatgcctgtagtcccagctacttgggaggctgaggcaggagaaccacttgaatctgggagatggtggttgcagtgagccaagatcgtgccaatgcactctagcctggccaacagagcaagactctgtctcaaaaacaaaaaaagaaaagaaaagaaagtcatgatccaagagaaaatagaacaaataggatggagcaatcctttatttttacacactttgacaaggaggtttgtcgtaaacaacctttccagtggagaacagagaacaggaaaatcagcctccagayatcagcagctgctctgttcagggccgaggctcccccttgccaatgtggtgaggkggaggggtgtactttccttcctttatcagcttatcccgctgcttcctgatggtacctgcacgtctcatctgtcaaaggaaaatggtaattaaactgagggaggagatatgtgccaaaaagtgagaactggaaaaacagatcaattttggtttcatttttaaactacaaaaggcctttcatcttacggggcctctgaaatgaagtccgcctttaaagaattaacatgaaatcacttcccaagctttcaaacaaatttttagtatacataacctctctgaaaactaacaactaaaatgttcttaatatatatagcaatatggatatttgcaaaaacctttaagaggcatatttgtggatactaaaatcttttaaaatatcaaaagtttaatcccagcactttgggaggctgaggcgggtggatcactgaggtcaagagtttaagaccagactggccaacaaggtaaaaccttgtttctactaaaaatacaaaaattagccagggatggtggtgcacatctgtaatcccagctactcgggaggctgaggcaggagaattgcttgaacttgggaggcggaggttgcagtgagccaagattgaactgctgcactccaacctgggtgacagagtgagactttgtctcaataaataaataaataaaagttgggccgtggtggctcacgcctgtaatcccagcactttgggaggccgaggcgggcgaatcacaaggtcaggagttcaagaccagcctggccaatatggtgaaactctgtctctactaaaaatacaaaaattagccaggcgtggtggcgcgcgcctgtggtcccagctactcgggaggctgaggcagaagaatcgcttgaacccggggggtggaggttgcagtgacctcaaatcacaccattgcactccagcctggacaacaagagcaaaactctatctcaaaaaaaaagagaggaatgtggctcttgaagaatctttatagtctcatcttccctgtccccttagaccctccttctggatcaaaaaaaaaaaaaagaaaaagaaaatctggatccacctgagggcacatgacctcatgagggccatgccatgggtgacggtcaccctaaatttaaaaaaataaaatctgggagatcacannnnnnnnnnnnnnnnnnnncctcagcctcccgagtcgctgggactacaggcgcccgccaccacacccggctaattttttgtatttttagtagagatggggtttcaccatgttagccaggatggtctcgatctcctgacctcgtgatccgccagcctcggcctcccaaagtgctgggattacaggcgtgagccaccgcacccggcaagcacttacatattctatgtggaagtggcactgctgctggtgactatgcaatgggtatgaatgaagcagaaatagccaatatgagttctcttttccccatatggaagtaaaggcctgattcttactcagccactagtcaccgctgagtcttgaattctgtctcttctactcagggcattggttgcttctcaacaaatcaaaactatgttacacaagtgtgtcaaagccacaacaatgaactggtccctggattctgtgacacagaaaatttactaaatctgatcacattattcctctgctcaaaaccctgcaatggctatcttactgagacaaaaagatgaatccttatcatggtttacaaggcctactccagtgacttcatctcttaatattcccctagctccctccagtcagctcagggacctttgcacttgctgtttcctctgcatggaacattcttccctcataaccayatagctcactttctttaagtctctggtctgtcttcttttgctgagatcttctctgactatttaaagtagcatccacctagctcctgcccctagcactttctatccttctgtttattctcctcacagcacttattatcacctgtatttttacttgttatttttctgctcttcctcccactatagcataagctcactgactctgagattttttttttttgctgttttgcttactgtattcctagtgcctagactagtttctgacataatttttttaaccaatgactaacttttcacaaagatacgaaaaattagtatattcagttaaacgtctcattaaccttaaagaagtagtgttgatataacttcagtagaaaaaaccctgaaataaacattaaccattttaaaagactacattcttaccatttatcttagagtctcccaacacaagactagtcatggttttgaactatgacaataccatatgtcaaatctttctctgagctaaaagcagtaactctggataaaagcataggtattgaagccagccttgccaggataaaatcccagctccaccatttactagctatgtaagttcaggcaatgtccttaacttttctttgccttaaattttgtttgttcatttgtttgtttttttgacacagagtttcactcttgttgctcaggctggatggagtgcagtggcgcaatctcaactcactacaacctccgcctctcgggttcaagcgattctcctgcctcagcctcctgagtagctgggattacaggcacccccttaccacacccagctaattttttgtatttttagtagagagggggtttcaccatgttggtcaggctggtcttgaactcctcacctcaggtaatccaccgcctcagcctcccaaagttaaatttttaactgtgtaatggggaaactaatagtaactcatctcataggattgttgtgagaaatacatgcattataatatgctaagaacttacaataggacttgattctaattctgactcactagcttcttcacttacagggaggtatctgttcacttaaggtgaccctgaaaatggtaacttatctattcataaattcacaggattaggaagtgaccttagagcaattctttaattgtttcagataaggaaatgaagactaagagaaagtgacttgctcaaagtcacaaaactagtggtggtttgctggacgtggcggctcatttctgtaatcccagcagtttggggggcccaggcaagaggatcgtttgaggctaggagttcaagatcagcaaaggaaacatagcaaaaccttgtctctataaacaatttaaaaagccgcacatggtggcatgcacttgtagtcctagctacttgggaggctgaggcaggaggatgacttgtgcctaggagtttgagggtgcagtaagctatgatcacgccactgcactccagcccgggtgacagaacaagaccctgtctcaaaaacacgactaacaggatgggtgtggtggctcacacctgtaattccagcactttgggaggccaatgtgggatcgcttgagcccaggagtttgagaccagcctgggcaacacaagaagaccccatttctattttatataaataaaatcaaaattagggccaggtgcagtrtctcacacytgtaatcccagcattttgggaggccaaggcaggsagatcacctgagctcaggagttcgagatcagcctgggcaacatggtgaaaccttgtctctrctaaaatacaaaaaattagctgggcgtggtggtgcactcctgtagtcccagctacttgggaggctgaagtggaagaatcacctgaacccaagttgaatctgcagtgagctgtgaacacgctaccgcactccagcctgggcgacgggagtgagacgctgtctcaaaacataaattaaaattaaycaaccaacaacaaatgagtggtggcagaaccagcatcagaacctgactctcctaactcccaatccaatgttctttccaccttactacaatgcctcctgttggtatcaatttatcaaaatcttttttttattttcttttttttttttcttgagacagagtctcgctctgtcgcccaggctggagtgcagtggcacaatctcgactcactgcaagctctgcctcccgggttcatgccattctcctgcctcagcctcctgcctcagcctcccgagtagctgggactataggcgccagccactacacccagctaatttttttgtatttttagtacagacggggtttcaccatgttggtcaggctggtctcgaactcctgaccttgtgatccgcctgcctcggcctcccaaagtgctgggattacaggagtgagctactgtgccgggccatcttttttttttttttcttgagayggagtctcgctctgtcgcccaggctggagtgcagtggtgtgttctcagctcactggaacctctgcctctcagtttcaggcgattctcttgcctcaccctcctgagtagctgagattacatgcccctgtcaccatgcctaggtaatttttgtatttttagtagagacggggtttcaccatgttggccaggctggtcttgaactcctgacctcaggtgatccgcccaccttggcctcccaaagtgctgggatcacaggcatgagccactgcatgggatttttttaaatttgtttttttggttttttttttagaggcagagtctcgctctgtcgcccaggctggagtgcggtggcacgatctcggctccatgcaacctccgcctcccgggttcaagcaattcttctgcctcagcctcccgagcagctgggactataggcacccaccaccatgccctgctaatttttgtatttttagtagagacagggtttcaccatcttggccaggctggtctcaaactcctgacctcgtgatacacccgcctcagcctcccaaagtcctgggattacaggcgtgagccaccgtgcctggccaactcattcaacttttgaggaggtgaacactaagctgttaacatcccttttccactgcatcgttgttcacgctcatgtacagcaatctcattaacacctccatcttcttcagagtggaatgaatccaaagatgttgaatgtaatggatttgcaaggttaaacctcttttccaatgaggattcaatggatttgaacatattttcacccaaagattttcaagggtcaacatccaaaactagttgatattctctgcttcacagccaactgaaaaaatgggtatacacacacatgcaatttctaacctggtggctaaagcagggtaaaatactaaggaaaatttgggagaagagaaagaatgctgaggaacaatggaccatcctcatatctgaaggcatttaatttcctcatcatggtaccaaagtaggaaaggtatttcaccagaaaagctttgccaattcacatttggcaagccactgctcaatgacccactaaaaacacttaagagtaatcccagaggaggccaggcacggtggctcatgcctgtgatcccactactttgggaggctgaggggggcggatcacctgaggtctggagttcaagaccagcctggccagcatggtgaaatcccgtttctactmaaaatacaaaaattagccaggcgtggtggcaggtgcctataatcccagctactcgggaggctgaggtacgcgaatcgcctgaayctgggaggcagaggctacagtgagacgaggtggcgccatcacacaccagcctaggggacaagagtgagacttygtctcaaaaaaaaaaaaaaagagtcccaaaggaacaagaaagtaattcagcttccacctccatcatttccttaccgttttctgccgaagcaaacactctacgaaatcatcatattctatcttgcactctttctctgcccgagtataaccgattccatgtgcacattctatccattctttttcaaaagcatggcatcgaccagccatcttgtagggctgttcaccactctggattgtcaaccatcgatctatgttaaggccraaccttttctggatgtccaagaaaggcatggctgtaatggaagatttaaaaaaataagtaaataaaataccacaagagggcaatcaactgagaaatttctaagaaaaaattagataatcatgctaagtagcyctctagaacactgtttgatattattctcctgatttcttctcaccaaactttttcattaaataggttcttccagtttatggcagataagcagtttttgcgctttttcaaaactcaaggaaaagagaactataactaaagaacaatgcatagaaatcctttctcggtcaggagcggtggctcacctaccacgtgagatggagtctccgtctgttacccaggctgcagcgcatggtgcaatcttggctcactgcaacctcctcctccrgggttcaagcgattctcctgcctcagcctcccaagtagctgggactacaggtgcgcaccaccacgcccagctaatttttgtatttttagtagagatggggtttcaacatgttggctaggatggtctcaatctcttgacctcgtgatccacctgcctcagcctcccaaagtgctgggattacaggcatgagccactgcacccagccctccccatttctttattccagtcaagccaataaaaattagaatttcttaccttattcttcagatctcatcctttatttcatactgtctcaaatcttttgtttcccagggctatgttatgaatctttcaattcaccaatttctccttcagctgcattgaatctgtatactatttgagtctccactgagtttttaactttagttaatttttaattaacttctatttnnnnnnnnnnnnnnnnnnnnnnnnnnnnnnnnnnnnnnnnnnnnnnnnnnnnnnnnnnnnnnnnnnnnnnnnnnnnnnnnnnnnnnnnnnnnnnnnnnnnnnnnnnnnnnnnnnnnnnnnnnnnnnnnnnnnnnnnnnnnnnnnnnnnnnnnnnnnnnnnnnnnnnnnnnnnnnnnnnnnnnnnnnnnnnnnnnnnnnnnnnnnnnnnnnnnnnnnnnnnnnnnnnnnnnnnnnnnnnnnnnnnnnnnnnnnnnnnnnnnnnnnnnnnnnnnaaacaaaccctgactgcctaaaatgactgaaaggaagcgcgcgcacacccacaaatatcaatataaatgtgtactcatggtagatttaaaggtgaatttagttgggcgcagtggctcacgcctgtaattccagcaccttgggaggccgaggcgggcggatcacctgaggccgcgagttcaagaccagcctgaccaacatggcgaaaccctctctctactraaaaaatacaaaattagccgggcgtgggggcgcatgcctgtaatcccagctactcgggagtctcagggaggagaatcgcttgaatccgggaggcagaggctgcagtgagccgagatcgcgccactctgcactccagcctgggcaacaagagcgaaactccatctcaacaaaaaggtgaatttaacttcttaagttccttcccatccctcagtcatcatttactgagtagttacgttccaggcactcagatgcgggggaaagcagctccaacgtaagcaccagagacacacactcggaattgcgaatacactgcaaggaacacgagtgggtaagagctcgaaggaggaagcacgaactctgcccggagacttgaaaatgcctttaacatggcttgcgagttcgccaagtgaagatcagtgggcagagtgttccagttgggcaacagcccggagttacagccrgaagtgctggctatgtttgggggacaatggagcgcagcgtgcatgacggtgaaaagaatgaaatgagctcaggaggccggcggggccgaaatcacgcagagcctggaaagctgggataaggatcgtagactttaggttaagaaacagaaagccaaaacattagtccggcaaaaacctaaacaaatgtggaaagtggagagagcggcaatctccaggcttcggtgccattagctgtggaggtgaagcggcctgggagggcagggaacacgccctgagttcaggtctgggagaaggggacacacagcaagccaagaggaaatctgttaaagagacctcggaaggaaggtccttaagctaagctgccgcgcggacataagcagcmcctacctacccgatgctcgtgcccttgactcttctctggccgccgcttcagaacgactagctagcgacgcggacgcctgccgtaaaggatgacctcagcgagacgtttgcagcgcgacgccggaagccgaccttccctcagccgtctccccasaaaaccatagaaaccgagcccgttggcctggtacggtggctgacgtctgcaatcccagcaccttggaaggctgagggaggaagatcacttcagcccaggagttcgaaaacagcctgggcaacatggcgaaactcccctctctacaaaaaataaaaaattagccgggcgaggtggtgcatgcctgtggttccagctactcaggaggttgaggtgggaggatcccttgagcccaggagattgaggctgtagtgagccatgatcacaccattccattgcattccagccctggcaacagagcaagaccttatctcagggggagagtgagagagagaggatgaagaagagagagaggaggtagagagagagaaaggaaaaaaaacccaaacccatcaattacagagacacagggaaggcctagccattagtgagttcttgctcctttcttgcactctgcctagcatgctcacgacaacactgagtggtgagagacttcaccaaagtcacaggagagaaagaacactggctccctgcctacccactagtggttaagcacatggactatgagcccaaaccaccacgtggggtcaaatgtaggcccccagccgggcgcagtggctcaggcctgtaatcccagcactatgggaggccgaggtgggcggatcacaagctcaggagatcgagaccatcctggccaatatggtgaaaccctgtctctactaaaaatacaaaaattagctgggtgtggcagcgagtgcctgtaatcccagctagtggggggaggccgaggcaggagaatcgcttgaatccgggaggcggaggttgcagtgaggtgagatcgcgccactggactccagcctggcgacagagctagaytcagtctcaaaaaaaaaaaaaaaaaaaaaaaaaaaaaaaaaaagtaggcccccaccaatttcgtgtgactctaggaaagtttcttaacttcattgtgcctcagtctcctcgtctgttaagataattatggtattcacaatggaggcttgctatagggattaactgatttatgtataaagcactgaggcggtggctagcacatgggaaacattccaaggcagtcgcagttctttgatgtctcagctttcagtttgtgaatcaactgctaccatgcctgtcatctgttccagaacctccaatgactccctttgactacatcagagactctaaagtgttgtgtgtatgtctttggggggtggaccacagggtgcatgagatattatacattggaggtatgggaggaaaatactagaacatatatatatatatatatatatatatataattattacttttgagacagattctcactcccattgccccgctggagtgcagtggtgcaatcacagttcactgcagcctcaacctccctgggctctggtgatcctcccacctcagcctcccaaatagctgggaccacatgtgcatgccaccatgtgcctggcagtctttattataattattattttatttgagatagggtctcactccatcacccaggctggagtgcagtagtgctatcatagatcactgcagcctcaaactccagggctcaagcaatcctcctgcttagcctcccaagtagctgggactacagacatgccactgtgcccagctaattctttttttttttttttttttgagacagagcttcactctgtcaccaggctgaaatgcagtggtgcaatcttggctcactgcaacctccacctcccaggttcaagcgattctcctgcctcagcctcctgaatagctgggactacaggtgtgcgccaccactcccagctgatttttgtatttttttttagtagagacgaggtttcaccatattggcyaggatggtctagatctgttgacttcgtgatctgcccgcctcagcctcccaaagtgctgggattacaggcgtgaaccactgcgcccggccaagctaattctttaaaaaaattttttgtggagatcagtatctctttatgtttcccaggctggtctccagctcctgggctcaagtgatcctcctgcctgggcctcccaatgtgctgagattacaggcatgagccaccatgcctggcccttttatacatttttttttaacactctgagagagagttgagggcaggctgcttgtaaggataaggcagcctcttttatacattattaacctaagaaaaaatggggtgcccttgaaagagttttttaagattagaaaacaagggccaggtgcagtggctaatgcctgtaatcccagcattttgggaggctgaggcaggcagatcacctgagttcaggagttcaagaccagcctgaccaacatggtgataccctgtctctactaaaaatacaaaaaattagccaggtgtggtggcaggcacctgtaatcccagctacttaggaggctgaggcaggagcatcgcttgaactggagaggcagaggttgcagggagccgagatcgcaccattgcactccagcctgggcaacaaaagcaaaactctgtctccaaaaaaaaaaaaaaaaaaggcaaaaggaagtcagaaggagccagatcagtactgtaaggtggatgcctaatgatttcccatcaaaactcttgcaaaattgcccttgtttgctgagagaaatgagcaggaacattgttatagyggagaatgactctggtgaagctttcccaggcatttttctgctaaaacttttgctagttttctcaaaacactctcataataagcagatgttattgttctttggccctccagaaagtcaataaacaaaatgccttgaacattaaaaaaaaaaaaacgaatgacatgacctttgctcttgactggtccacttttgctttgaccagacacttccacctcttggtagccattgctttgattgtgcattgtctttaggattgtactggtaaagccatgtttcatctcctattacaattcttcaaagaaatgcttcaggatcttcatcctgcttgtttaaaattcccattgaaagctctgcagctgatctgggcatsatggtttggcacctgccaagtggaatgtttgctcaactttagtttttcagtcagaattatgtaagccgaaccaagtgagatgcctatggtattgattattatytctgctgttgtcaatccacttcagttaggacacaaaatgtttttctcataaattgatgtggatggtctgccactgtgggtttcatcttcaacatcatttcatcccttctttattttgtttctttttggagatggagtcttgctctgtcgcccaggctggagtgcaatggcgtggtctcggctcactgcaacctccgcctcttgggttcaagcagttctcctgcctcagccttcccaggtagctgggattataagagcccaccacaatgcccagctaatttttgtatttttggtggagacggggtttcaccatgttggccaggctggtcttgaactcctgacctcaggtgattcgcctgcctcagcatctcaaagtgctgagattacaggcatgagccaccacgcctggccaagtattcttaaagaaaataaatactaggagtctgtagtagaggcacagcccggcctaatctcatcccttcttaaaacaaattatctggccacgtgcggtggctcatgcttgtaatcccagcactttgggaggccgaggcaggtgtatcacctgaggtcaggagttcaagaccagcctggccaacatggcaaaaccccatctctactaaaaatacaaaaattagccgggcgtggtggcaggcgcctgtaatcccagctacccagggaggctgaggcaggagaatcactggaacgtgggaggcagaggctgcagcgagcctagatcatgccactgcactccagcctgggtgacagagtgagactccctctcaaaaaacaacaacaaaaaacaatttatctatttgtaaactgctgatttctttgaggcattgtccccataagcttttcgtaaagcwtcaatgatctcaccattcttccacccaagcttaaccataaacttgatatttgttcttgcttcaattttagcagaattcatgttrctcttataggggctcttttcaaactaatgtcttatccttcatagtgcctcaaagtagatcctgctcagacatgttataacaagttagtacaaatttattttggtgcaaaaattttttgaaatctatgcatagttttttcataatacacatttttcataaactttgtgaagacctcttgtatgtccagctgaatactgcaggattatataactggtaactcatggcccttgcccacaaagtgctagtggcgagttatcactaccttttccagtcccctgccccttttcttgtttgttgatggtgtcatcttcccagccacttaggcagcaaactctggagttgtattctgccttttccttttctttcatttagtatttaattacagcacaagttctgtcaaatattccttcaacaaatttccaatttatctcttccttcttgtctcccaactcctcactccaatctgttctgcatgactggtcatcctaaaatacagatttcatcatatcattcctcagaaataccatgcagggttaagcatgatggctcatgcctgtaatcccagcactttaggaggctgaagtggattgcttgagcccaggagttcgagaccagcctgagcaacatagtgagaccttgtcaatacaacaacaaaaaaaaaaattaaaaaaaaattagctgggcatggtggtgtgttgcttgtagtcccagctactcaggaggctgaggcaggaggatcacttgagcccaaaaggttgaggctgcagtgagccatgattgagctactgaactccaggctgcagtaagccatgattgagctactgaactccagtctgggtgacagagcaagaccctgtcaaaaagagagagagacagagagacagagagaatggaaggaaggagggagggagggagggaaggaaggaaggaaggaaggaagggagggagggagggagggatnnnnnnnnnnnnnnnnnnnngatgctcaaacgaatgctcattagagcattctggatttttgatttttggattaggcatgctaaactggtacacataatgcaaatattcccaaacccaaagaaatcacaaataagaaacctgcatatgcctattttgtttcttgctttttcattcaacatcacatccttgagatcttttcaggccatacagagcttccttaatcacttttatagccacattatagtagttcaatgtaaggatgtcccatagttttatctattcagtctcttacagatggatactagaattgtttcttatctttcgctttttccaaacatgctacaattaataacattgcacacaatcactttgtatatatgcaggtatgtctgtaggataaattcttaaaacaggactgctaagtaaaaaatgcatttgcaattttaagcaggaagggaggctgggtgtggtggctcacacctgtaatcccaacactttgggaaggcaaggtgggtggatcacctgaggtcaggagtttgaaaccagcctggccaacttggtgaagccccgtctctactaaaaatataaaaatttgctgggcatggtggcaggtgcctgtaatcccaaatacttgggaggctgaggcaggagaatcacttgaacctgggaggcggaaattgcagcaagtcaagatcacgccattgcactccagcctgggcaatggagtgggactctgtctcaaaacaaacaaaaacaaaacaaagacaaaaaaccacaaaaacaaacaaaaaaaactcaacaccttttacaatagctgcaaaaaataaaataaaatatttaggaatatacctaaccaaggaggcaaaagacctctacaaggaaaattacaaaacactgctgaaagaaatgatagatgacacaaacaaatggaaacacatcccatgttcatggatgggtagaaatcaatattgtgaaaatgaccatactgccaaaagcaatctacaaattcaacgcaatccccatcaaaataccaccaccattcttcacagaattagaaaaaacaattctaaaaaaaaaattataaaatttatatggaaccaaaaaagagcttgcatagccaaagcaaggctaagcaaaaagaacaaatctggaggcatcacattacctgattttaaactatactataaggccatagtcacaaaacagcatagtactgatataaaaataggcacataggccgggtgcagtggctcacacctgtaatcctagcactttgggaggctgagacaggcggatcacctgaggtcaggagtttgagaccagcctggccaacatggccaaaccccatctctactaaaaataaaaaaattagcccggcgtggtggtgcacacctgtaatcccagctactcaagaggctgaggaaggagaattgcttgaacctggaaggtggaggttgcagcgagccaagatcacgccactgcactccagcctgctcgacaggagcgagactccatctcaaaataataataataataataataataataataaaataaataaataggcacatagaccaatggaacagaatagagaacccagaaataaacccaaatatttacacccaactgatctttgacaaagcaaacaaaaacataaagtgaggaaaggacaccttttcaacaaatggtgcctggacaattggctagccatgtgtaggagaatgaaactggatcctcatctctcaccttaaataaaaatcaactcaagatggattaaggacttaaatctaagacctgaaactataaaaagtctagaaaataacttagacattggcttaggcaagaatttcatgacgaagaagccaaaagcaaatgcaataaaaacaaagacaaatagttgggacttaattaaactaaagagattttgcatggcaaaagtaacagccagcagagtaaacagacaacccacagagtgagagaaaatcttcacaatctatatctgacaaaggattaatatccagaatctataacaaaaacaaactcaaacaaatcagtaagaaaaaaaaatcccatcaaaaagtgggctaaggacatgaatacacaattctcaaaagaagatatacaaatgaccaacaaacatatttaaaaaagctcaacatcactaatgatcagggaaatgcaaatcaaaaccacaatgcgataccattatactgctgcaagaatggccgcagtaaaaaaatcaaaaaaggccgggcgcggtggctcatgcctgtaatcccagcactttgggaggcggaagcgggtggatcacgaggtcaggaaatcaaggccatcctggctaacacggtgaaaccccgtcctactaaaaatacaaaaaattagccgggcgtgatggcgggcgcctgtaatcacagctacaggggaggctgaggcaggagaatggtgtcaacccgggaggcggagcttgcagtgagccgagtcgcgccactgcactccagcctgggctacacaggcagactccgtctcaaaaaataaatcaatcaatcaatcaatcaatcaatcaatcaaaaaacaggcatggtggctcatgcctgtaatcccagcactttgggaggccaaggcaggcagatcacctgaggccaggagtttgagaccagcctggccaacgtgatgaaagcctgtctctactaaaagtacaaaaattagctatgcgtggtggcaggcgcctgtaatcccagctactcgggaagctaaagcatgagaatcgcttaaacctgggagttggaggttgcagtgagccaaggtcacgccactgcactccagcctgggggatagtgcaagactcttgtctctaaaaaaataaataaaataaaaaagcagtagatgttggcatggatgcagtgatcagggaacaattctacactgctggtgggcatgtaaactagtacagccactatggaaaactatgtggagattccttaaagaattaaaagtagaactaccatttgatccagcagtctcactactgggtatctatccagaggaaaagaagtcattatacgaaaaagatacttgtacacacatgtttatagcagcacaattctcagttgcaaaaatgtggaaccaacccaaatgcccatcaatcaacgagtggataaagaaactgtggtccgggcgcagtggctcatgcctgtaatcccagcactttgggaggccaaggtgggcggatcatgagttcaggagatggagaccaccctggctaacacrgtgaaaccccgtctctactaaaaatatgaaaaattagccgggygtggtggcatgtgcctgtaatcccagctactcaggaggctgaggcaggagaatcgcttgaacccaggaggcttagaggttgcagtgagctgagatcacaccactgcactccagcctgggcaacagagcaagactcccgtctcaaagaaaaaaaaaaaagaatctgtggtgtatatatatatacgatggaatactactcagccataaaaaggaatgaattaatggcatttgcagtgacctggatgagattggagactaatattctaagtgaagtaactcaggaatggaaaatcaaacatcgtatgttctcactgatatgtgcgagctaagctatgaggacgcgaaggcttaaggatgatacagtggattttggggacctggaggaaagggcgggaggggggcgagggataaaagactacaaatagggtacggtgtatactgcttgggtgatgggtgcatcaaaatctcacaaatcaccactaaagaacttactcatgtaaccaaataccacctgtaccctaataacttawgaaaacagcaacacttccatggcccttgggttcttgggatgaagaaacaatcaaaatgttgtagccagtgatcttctgttacagaaagatgaatgaaacacaaagaagggagccattcattctgccctggctgtgtgtcaatgcttcaagaaaaggtaaaaattcttgggtttggcattcaagatcattcacccatttctaaatcctcagatcccattgcttactgcccccactcaaactcgtgttctcagccatccacaattgctttcacgctccaagctcgtwggagcagtttcttcgcctggaaygatcccacccacttgctgctaccttcccactgtctccctggcgaatgcctaatccattcagatccagtttatcacatcattttctggtgaaaacttccygaattcctcaggcatttacaggcctttttgagatcccaccagccctgtaaatgtctattatagatattgttaaatgatgattccccagcctcctccacyrggccctgcatacagtcttgctgtatgcatgataggggtgcaaggatgtaggtgtcagtcttccttggctgcaaaggctgagaaactaaaaatcccagagtaccccctgctagaactgagcctgcgtgccactggcggctgcctgcattttgttgctccctatgtcacaagcgaggtaatgttgctgtcccctccccccttccctacctttaccttttctttgcctggatctgcatatccattgcttcatgggtgtttttatactgaaatcaaaggaggccttcatgtgtagagaggcaagcccacgctattgctgttttccgtttcatggatcccgaggccccgacacccagtggaataggactagctattcttcccaacatagccttgctcccagggtaacaaagcggggctggaagtgctaatgcaaggccctgagtcccacccctctgaacaagcctcagctgctgcatgcacagggtgtytgcaaggttgtaggcagagccgtctacaggtttcctgggtctgcattcacgggatttctgtccttgacctgtaaggttccctcatgtttacacacctcttartcataacctgagaaaagctctcacagtacccttctacagataggccatctataatttagcacattgggaactttatttagatctgtatcctggtaccactgccacacagatttgaataagctgggtagcacatttggggaagatggtgtttggagagtctccctactcctaacctggtaattcggctgtaggacagacacaacagagcagagaagcaaagtaatgtgaaaaacaaacgggtcttaagggctggaatataatggaaaccagagcgatcatctaagtgacatctaagattgtgccatttggggctggaggaaatatcaagttgaacaggtgaaacaatcaggaatcactgagtcaaaatgaattggggagagactgagccaggcttatggtgggaggggtaacttgattttggtaaacatcccatccctagaacaactaactcctctcactttgatttatagagctgccttttaactttaactaagcttcccaagcagtatgattacatgaagaaaataaactagtaaggccaaaggaccagtctacctgacatatattttcatcataaattaacacactggagtttggttttttatttttttatttttatttatttattttttgagacggagtctcactctgtcgcycaggctggagtgcagtggtgtgatctcagctcactgcaacctctgcctctccaggtttaagcaattctctgcctcagcctctggagtagctgggattacaggcgcgtgccaccacgccccgctaatttttttgtatttttrgtagagatgaggtttcaccattttggccaggctggtcttgaactcctgacctcgtgatcacccgtctcggcctcccaaagtgctgggattacaggcgtgagccaccgcgcctggccaggagtctggttttatagaycaatatagctttattagtgagtcagattcctgaacacagatgagggtaattacactacctggagggaacctgccagggcagctgaataaccttccccaggaaacaccctgccctctctctgtccagacccaaagaacacttaccaaagtaaggagtctcctgcccactagattgtgagcttctctaggttgaggactgctgaatcgctgattttggctgcagagagacagcctacagaaggcttaaaattatttgatctgggagttaagaggaaagagtttcaggtagaatactgaaaattggggaagaggaagagcagccacataattcattaagtcacttttttaaattctccaatttaaaacataattaaaaagtaaactttaatgtcgaaaatgcaaacttggggagggcagaaagatcacacacaaggctgtcacttcacacttggagggttgcacagcagccgggcagaggcgctcctcacttcccagacggtgtggccataggactccatcgctggacatgtgacttgagtttaagcctctcccttctgccctcatctggagatgctgacagcctgggagctcccacctttggcactggatggagaccgaagcctggcaaggccctgccctcagcaggaactccccctgggcccccactctgtgaccccgagcgcaggctaggatttttcccttaccttctcaagccactttgggcctgcccagctctctcagagccctgctaggtaggtgacaaccctgttcccagtgttttgctttgttttgttttttgagatacagtctcgctctgtcgccaggctggagtacagtggcgctatctctgctcaccgtgatctccgcctcccrggttcaagcgattctcctgccttagcctcctgagtagctggactacaggtgcccaccaccacgtctggctagtttttgtatttttagtagagacgggatttcaccatgttggccaggatggtctcgatctcttgacctcatgatccacccgccttggcctcccaaagtgctgggattacaggcatgagccaccgggcctggcccccagtttttttaaattcaattttaagtagagacggggtttcacgatattggccaggctggtctcgaactcctgacctcaggtgatccactcgccttggcctcccwaagtgctggaattactggcatgagccactgcacccagcccccggttcccaccttcttagtgtatgtgctgtcatcacgttccaccccaaccaaaccttgggtgggcagcctctgcaggggactactcacaactggcctgtagtcacggttccctgcagagccctcgcaggtggtccagatgtgcccactggccctgccccagtgtgtcttccctgcctctggtctgctctgcctgatgtgcgctgtacgctcggctctgctgactctgagggggcctccgtcacacaccgagccagcttcatcagctgtctcagtagttgatgttcagggacaggataacgggatcccgcccttcctaaggtgtacctgggttgcgactcagaatggaagttcagaacaaagagactgagctgtgaagtcactcactatttaaaagacaagaatagatataataggtgaaggccgggcgcggtggctcgtgcctgtaatcccagtactttgggaggccaaggtgggtggatcacttgaagtcaggagttccagaccagcttggctaatatggaraagccccgtctctgctaaaaatacaaaaaattagctgggtgtggtggcgggtgcctgtaatcccagctatttgggaggctgaggcagggagaatcgcttgaacccgggaggcggaggttgcagtgagccgagaccataccactgcctccagcctggagttttttcttgaaactccatctcaagaaaaaaaaaaaaaatgatggggtgagtcaatgctagggacagagtctgagaggaaaaagttttttttttctttaagagggtctctctctgttgcctcagctggactgcaatggtgaaatcatagttcaccgtaacctcgaactcctggactcaagcaattgagaggaaaattttaaagtagtgcatgcaaacgctaattaatgcctttaaataggtaggtttaagagaatctatgtcaccccacttccctcctccattaaaggaaccagcagtggctatggaattgggctggattaggtaaagtgagggggaaagacaagccaaaccaaaagaaaaaggatctttgaaggtgtgtctaaggggacagggaagatgagactagaaagattcttcaagagccacattcctctctttttttttgagatagagttttgctcttgttgtccaggctggagtgcaatggtgtgatctcagctcaccgcaacctccacctcccaggttcaagcgattctcctgcctcagcctcccgagtaacagggattacaggcatgcaccaccacgcccggctaattttgtatttttagtagagaagaggtttctccatgttggtcaggctggtcttgaactcctgacctcaggtgatcygcccacctcwacctcccaaagtgctgggattacaggcgtgagccaccgcacccggcccaagagccacgttcctcttaggtgaagctacagccatggttaatcatccttcctaataaatatataggcctcattacctctgactggacaaaaaaaaaaaaagaggctcttagtggctgtgtgtcttagtctggtatttgcccttctgtcttgcacctagccctgaattcattttcccaaaacccttcagatttccacaggataaggcccaaactcctattagtcaaagccctctattatctagcccctactacctagctccagacttctcctgggatccacaacagttttccactcttgctaaatgagaatgtcctctctgcataccaccacggtttcccattactatccctactttcacctacctgagcccattcttttttttttttttttttttgagacagagtctcgctctgtcgcccaggctggagtgcagtggcgtgatctcggctcactgcaagctccgcctcctgggttcatgccattctcctgcctcagcctcccgagtagctgggactacaggcgcccgccaccacgcctggctaattttttgtatttttagttgagatgggggtttcaccatcttagccaggatggtctcgacctcctgaccttgtgatctgcccacctcggcctcccaaagtgctgggattacaggtgtgagccaccacacccggcctcattcattctttgaacgtttcaaccctacctcctccaatgaagccttccctgatcagaatcgccctctcctcagtctactacctgtaccagtcacacaacacttgccaacttttaccttgcctgcttatgtctcttgctagaccgagtcccttctcagtagattcagttgactatttatttatgttaaactctaaattgggtactagcgttataagacagaagggctagggccatttacagaacttgtcaggctttaaaaactcaaatatcattcctccagaaataaagaacamagaagacaccagtaatacttgctgaatgattaacactcaaagccaacataaacatgtcttttcctacttatgtttaactaacaagaaggcatgttgggtagcaaggcaggttggcaggttaacagccttcatcaactaatgaaagccctgatgagacaagaaatataggtamtttcactcctagaaatggagcattagaaaatctggatccacttggccgggcgcggtggctcacgcctgtaatcctagcactttgggaggccgaggcaggcggatcacgaggccagatcgagaccatcctggctatcacggtgaaaccccgtctctactaaaaatacaaaaaaaaattagccaggcgtggtggcgggcatctatagtcccagctactggggaggctgaggcgggagaatggcgtgaacccaggaggtggagcttgcagtgaactgagattgcgccactgcactccagcctgggtgacagagcgagactccgtctcaaaaaaaaaaaaaaaaaaaaaagaaaaagaaaatctggatccacctgagggcacatgacctcatgagggccatgccatgggtgacggtcaccctaaatttaaaaaaataaaatctgggagatcacacctgtaatctcagcactttgggaggccaagggtgggggagtcgcttgagctgcagtgagctatgattgcaccaccacactccaacaagggcaacagagcgagaccatctctaaaaaataaatagaaaaacctactgacaaagccaactaaaaagcaatgaaaatggctgggcgcgatggctcacacctgtaatcccagcactttgggaggccaaggcgggtggatcgcctcaggtcaggagttcgagaccagcctggccaacatggtgaaatgtcgtctctattaaaaatacaaaaattagccaggtgtggtggcaggtgcctgtaatcccagctacttggggaagctgaggcaggagaatcacttgaaccygggaggcggaggttgcagtgagcagagatcatgccactgcactccagcctgggcgacaacagcaaaactccacctcaaaaaaaaaagcagttaaaaaaaaattatatatatatatatagttttttgagacaagagtcttgctctgtcacccaagctggagtgctatggcacaatcatggctcacagcagcctcaacctcccaggcttgtgattcttccacctcagcctccagagaagctgagaccacaggtgtgtgccaccacacctggctgattttttgagtttattttttgcaaaggcaggttcttctgatgttgcccaggctggtctcaaatgatcctcccacctcagcctcccaaagtgttgggattacaggcgtgagccaccatgcccagcccgtcattctcttaaaggcatcaaaaagctaaccagctaataaggaagaactgaaccaaagtctaagtgaggagaaagcagagctaagcctaacagtcagagctgctttttcctttaaggcatttgccaatctggaagaagttcttggacacctgagctgcacttttagaagtctttcagcagcctcaaaggactggacaaaagtcaaaacctaaggctagctaatggtgggaattctcaccacagacaccttaaattgggatcccaaagaattacacctttaagataaaggtgaatcaaaagtaaaccatttctcggccaggcgtggtggctcactcctgtaatctcagtactttgggaggccgaggcaggcagatcacctgacgtcaggagttcaagaccagcctggccaacatggtgaaaccctgtctctattaaaaatacaaaaattagctgtgcttgatggcacatgcctgtaatcctagctattccggaggctgaggcaggggaatcctttgaacccgggaggcagagattgtagtgagccgagatcgtgccaccgcactccagcctgggtgacaagagtgagactccgtctcaaaaaacaacaacaaaaccaaacaaaaaaagtaaaccagttctcaagtggacttgccaccaggttatatttaatctggatgacctgaggtactttcagccttctgaaacctgcatcagatgatttggtagtatcctcagccacaggcaacataaatccttcttagagatagataccctcattcttgtcctgttcactcctgcaaataataattttttttttttttgagatggagwtttgcttgttgcctaggctggagtgcaatggtatgcaatcttgaatcactgcaacctcctcctcctgggttcaagtgattctcctggctcagcctccctagtagctgggattacaggcgcccgccaccacgcccggctgattttttgtatttttagtagagacggggtttcattatattggccaggctggtctcaaacttctgacctcatgatctgcccaccttggcctccgaaagtgctgggattacaggcgtgagctaccgcacccagcctgagccaccatgcccaccgtaatttttcaaatatactgtccagctcacagataaccaggcataaaatgagatactacacagggcgcggtggctcacgtctgtaatcccagctctttcagaggttgaggcgggtggatcacgaggtcagaagtttgagaccagtctggccaatatgatgaaaccccttctctattgaaaaatacaatagccaggcgtggtggcgggcgcctgtaatccaagctattcaggagactgaggcagaactgcttgaacccaggcggcggaggatgcggtgagctgaaattgcgccactgcactccagcctgggtgacagactgagactctgtctcaaaaaagaaaaaaaaaaaggagatattagatacagcaataagtaaaacgaaacaaagacccatgaagaccagaactttaaattgtcaaaatatcacaccttcagtacaataaagtgctaattatttacttgaaagtatggtttggtggccaggtgcggtggctcacacctgtaatcccagcactttgggaggctaaggcgagtggatcacgaggtcagaagttcaagacccacccaaccaacatggtaaaaccccgtctctactaaaaatacaaaattagctgggcgtggtggtgcatgcctgtaatcccacttacttgggaggctgaggcaggagaatcacttgaacccgggagacggaagttgcagtgagccgagattgcaccagtgcattccagcctgggcaacaagaatgaaacttcatctcaaaaaaaagaaaaaaaaaaagtatggtttagggtgggttaatgtacgcttttttccaggtgtccaaccttatccagtttaactgtagctctggaagactacagcactccctcaatctgttttcaacaaaggactccagagtagtagagaagtttctgttcctttttaatagcccatgggcactattacactctgttccttaagaacagtattttacaaactattttaaagccatgctattttctgttaaacaaaattctcacacccatttttgtacctaaaattccaaaattaaaaatgcttgaaataaaattggtcatttcaaatctttttccctccccaaatagtatgctctgtgtccccatccttgagaatcattgctctaaacagttgttcaatagctttttctgtgacatacttactttggcaatcagtttttatttgtaagcaaaaagggtattttcatcacacctcaacttaaggtataacagccttaagaatgacaaattagggtaagtgttgaccaactcatgatgcaacaaggattataaatgaagtaactttgccttgtttgttgctcttttttcttttttttaattgagacagagttttgctcttgttgcccaggctggagtgcaatggtgtgatctcggctcacctcaacctccacctcccaagttcaagtgattctcctgcctcagccttccaagtagctgggattacaggaatgcaccaccacgcccggctaattttgcatttttagtagagatgggatttctccatgttggccaggctggtcttgaactcccattctcaggtgatctgcccgcctcggcctcccaaagtgctgggattacaggcatgggccaccgtgcccagcctgtgtgctttttcccaaatgtttcttcatgctttagtgcaaaggccagcacacttttctgtaaaaggacacagagtaagtattttcagctctgtggcccrtgctttggtctttgtagcacctactctactcaagtctggagttagtgtgaaaactgccacagacaaatgaataggtgtagcagtgtttctacaaaactttacaaaaataggccagtttttgtatgaccctgctatattaacatacaaaacatactgaatacagattcacagaaaggcattaccaaattcwtttgtcattcatcttttatttccttaatcaaacaaaggtacaaattctaataagaaaaagtgagatctttatgttaacaaggggctattcatattggaaagctgagaatcactacttgggacacaaaagtttgggtctccaggtctgacgaagactactataaagaaacctgctctaacattgtaaagtgcatagtctatgccctaagctgtgctaaatactttctttacatggatgatttcttgcatttgaaaacaaaacccaatatgaacctactattaacctcgattttacaggtaagcaagccatgtttcagcaagtttagtaatctggcaaggctgacataaccaaattagtggcagagaagaaaccaaactacagagctacaaccacgcagtcagtcctttactatgctagccaaccaatcctccatggtaagaagattcaccaggtttgaaagattggcttaaatccttttttttttttgagacatagtcttaactctgttgccaggctggagtgcaatggcacaatctcggctcactgcaacctccgcctcatggtttcaggttgattctcccgcctcagccttccaagtagctgagattacaggcgcccgccactacgcccagctaatttttgtattttagtagagatggggtttcaccatgttggtcaagctggtctcaaactccagacctcgggtgatctgcccctcagccttccaaagtgctgggattacaggcgtgcgccacccgctggcttaaattcttgtactctctgatggtcttcccctttggaagatcttaacaattatcactgccttaggagctctgatcttccttttaacttctgacccaaggatggacacttactttttcctcttaagcttaagactttatcaaggataataactggaattaaaatagagaaaaaaattagctagctcaccagatattctgaaaacactgttcctgagaaacccttatacgtttttataggttgacgtcttccttggtctataatttccatgggacaaagacatttctctacctgggagtgcccttaaattcaagctctggaaatcaaggtctagggaaaaattcattcaccagtctgagacctaccttccaggtccccattttctgtcccagttgtcttttctctagattataaacactaaacaaacatgtgtggtctctttagaggggatcccaaaacccagccctggtggtttggtcttaccttgtggcctcagagggctaccttatcattatatgatagcctaacaacaatgtggtatagtggggsgggtggtgagcaggtgtcattttccttagagaaacctactctacttcccagccaggagccacttagttggaatggggactgacactttatagttaagtgagcacatcacactgatctctaaaacaagacttcagtggggcagcattccccattaccagtccagcctccacagcttctgatggctcccacagctgccctttctttattttggtgtgactagcccactgcagagccattcccattacagccactgctatgttcctcttttaggaacaagtgactaccctgaaaaaagaagagatgaaacaaatcacccttcaaatacaaagtaaaatcattctttaattwttaaaaaaaaatcactgttgggcttttttttttaaaggtccataaattttcaatgcaatgttgaactggggaaatggttatagcagctctcacataagttatttgaattaataaacattatcacagtattaagaaggcaaggtaaacaaatagcttaagtattttatttgtttgcaactaagcttgttaacactatataatgaaaatgtacaaagaataatgttgcagtttttggttagatttaagtcaaagacattcattaataaggaatcttcgaatgtgaatattccagaaatttctctaagccatctgatcacaacaactgtctctgaatattaccttactttggaaggtattggcatacatttgaattaaactcagaatttttcaaaataagccctaattaaaaaaactattctatattcaaagtaaaacaatattaatagaactttcctttccagaaacaatgaaggaaacaaggcattttgtaaaatgtggtcctgaacaagtcacagtaaaaaataaatgtatacttaacttccacctcctcaaaacagaggctactttctgttcctcagccttggaaacaaggtgaagaacagcctatatgcgacttcgggcagggggttgccaaaacaaagctgaagcagttgaccatggacacctcaaaagaatttgggagaacccgaccaaaggatccaaattctatgttttttttttttttttgagacgaagtctcgttttgttgcccaggctggagtgcagtggcatgatctgtgctcactgcaaccgccacctccagggttcaagtgattctcctgcctcagcctcccaagcagctgggattacagacgcctgccaccacgcccggctaactttgttgtatttttagtagagatggggtttcaccatattggccagggtggtctcgaactcctgacctcaagtgatccgcatgcctcggactcccaaagtgctgggattacaggcgtgagccactgcgcccagcccaaattatattttttaataactaatacaaaggtgaagtggctcctcccaagtagcagtgctgccggggcctggcccaggcctagccctgggctcacctctcatgctcccaagccaaccctgatgctcctggctccagggtagaccttttccctttagaggttcagtgtccagggagctctatgataattgtgtgaatgaggtgagcgctgactccatgtgagtattttaaggcttggagtcaaagaattaacctaacatgcccaggcagagtccatgtgtcaatggcccgtctccagtttgttctaatttctcaccacgtgtctgtagatacaggaccgcagaccttcgctttatcatcataatcacatctaatgtccatcctaacttacgattcatattctgtgcctggaaacagtccctgtatttaacaatacctacacataaaaacaatccactgttacaacttgtatggtcacaaaacattaatgatcttctttagaccaagcaaatgtttttttaccataattgtcgtgcaccaaattcacagccagaatccccaagatcaaaaaaaaatttttgcacaatacaaataataacttaaaatacacatacacacatatacacacactctcacacgcacttcttacagaactgtgcttggggaaactccatttgttgaatgccactgaaggcatattttgctaaactgctgctccaggtatttttgtttggaaaatctatcacagtagggcacagctgtttattggatgagcagaaaagaaagatatgcttgtggcaaccagaaagttttacggtctttcaagttgtataaaatggacctgcagaaacgtttaagtgttctcaggatgcaaagttggagctgaaatgtgacatcaaaccagttgcaaaaagtgtacagcagccatctcttgaggtcaaacctggtacccagatatgtgacaaagcttcatgacacatctgtaaattaagaataaaaaacaaaaagggtaagaatactaaaaactgtagtgtcatgctttaaaaattttcactaacagtaaatgtgagaaatagcatgaacgatgactcaccacttaaaagatactaaagatcaagaatttaaggaacctgactgaaattcagttagatatacaactgttaatattttatgctttgaatatctggtagttgcaaattatttagaataagaaatcctgaccacacttgataaactaacttaaggaatcaactttcataaattaacaactgaaactatctttctggagaaaagacaggtaacaaattggtgctcaagtcagactacctagattttaatcctagctgaaccactagctgtataagcttgggcaaattatttaacctctttaaatgctatctttaccagtaaaatggagctaataatagtactccctcatagggtcactgtgaggcttatataagctttggtgtggatttaatactcttagcatagtgctgggcacattttacttcacagggactttttactctgaggagagaagtttcagtgtagaaattttgctcttgaaacttagaaaattcaaagaaaatgtggcaatacttacagcttgttggccttgtcccataccgtcgcataatctgatcatgtgtgaatttcacaaaagattcatattgttctgtgagaagacagtacatacttatcctcagcaactctccctcaatttttaagaatcaagcgtcaggatcacaaatagcttcccagtttgaattcttcaccctctcaggccctctttataaaggtccttgtattaaagtccagtgaccttatataaaggtcactgagatctgttcctcttagaacccagagccaaatccttggcttctagaattggtcactgatggtatataatggtattttcctgataacctctcccccgtgacataactctatctcctattaatagctcactaccatagccaggaaatttcagcccatctcccatgggacatgaatctttgaaactctttccttgttataaatttcaacacacattgagtgaaaaacatgagtggaagaagtgtgggatggctagaaagctaagtgaaaatctataccatctaactgcaaacagttccacagaagtaccaccttttaaggggaaactgagtagaaaggaagaaggtagcctgacatctgtgaacaaagaagtgactcagaaccagctgactgaaacagtattatggtgggagtgggagagggaatgatatattagagcttcttctttttttttttgagatggagtctcactctgtcacccaggctggagtgcagtggcgcaaccttggctcactgcaacctctgcctccccgattcacgccattctcctgcctcagcctcccgagtagctgggactacaggtgctcaccaccatgcccggctaattttttgtatttttagtagagacggggtttcaccgtgttagccagcatggtctcgatctcctgaccttgtaatctgcccgcctcggcctcccaaagtgctgggattacaggcgtgagccactgcgcccggcctagaccttcttcttataatacatattaaaggatcaaagtagttctactataaaggaactcatttaactttgcttaacccaacagctcccaatgtaaaacagatctattaatattctgaggaaccacgttgtatgggtcaccagactaggaaacaatagtgttacaggaaaaagttgtgcttcttcactctctgatgattacacagcagcaaagcatgaaagctgcccataaatttcttaattactcacactgtcaccctaagcaacagatcttgacctatatcccatagggtacagctgaggactttaatcagaaaaggagtatgatgagatttgtgcttgacatagagtactgtggtttaatgtggaatattatccactttcactaaacaggtactatttcctatttctgattcagatctctttctttcacaaaaggctttaattgttgccatcattaatcactatctttgttctaacctgccctagccttgcttttactctactgttcctcccaaatcacacccaactcgccacatccataactatgacttcttaactaggaagtttgaatatgttgacaatactgaactcttccacaacacctgttgagagtttagtacagtatcacaaccatctgtttaccagccagctagcccaaatggcctactcaatgccttcattgatatggaaaattcttgcaagagcttggtttgtttcttttcagaaatgcaaatgaaaaatccctcccactgggcaaggtgtgtagcactcctgtaatgccagcactctgggaagctgaggtggagtacttcttgaggcctggagctggagactcctagagctgggctcacagcaaaaccttgcctctatttaaaaaacaaagtcttggccaggcgcggtggctcacgcctgtaatccaagcattttgggaggtcaaggtgggcggatcacctgaggtcaggagtttgagaccagcctgacaaacatggagaagccccctctctgctaaaaatacaaaaaaattagccaggcatggtggcgcatgcctgtaatcccagctactctggaggctgaggcaggagaatcgttagaacctggcaggcggaggttgtggtgtcagcctggaaaataagagcaaaactctgtcccaaaaaaaaaaaaaaaaaaaagtccttccatataatgtataaatgatgtgtttacaatcaccaaagagtaacttccatacccgcaactcaataaactcccttgcatgaggtcctactctctttttctaagttatttaactggtgttaatttttaactgaaccctgttaatgacaatggcagtcactgcctsggcctacctgctagtttggtattgaggatttgctcatactcctcccgaattttatcttcatagtcttttaagaggcgctcacatattatgccaacttgtcggagggtaaatgtgggctggtccttcttcatccatgaggaacctggccaaaagaaaaagtgagtttgggccaggtgcggtggttcacacctataatcccagcactttgggaggccaaggcaggcggatcatctgaggtggagaccagcctgacaacgtggagaaacccagtctctactaaaaatacaaaattagctgggcgtggtagggcatgcccattatcccagctactcgggaggctgaggcagaagaattgcttgaacccgagaggtggcggttgcagtgagtcaagattgtgccactgcactccagcctgggcaacaagagtaaaacgccatctcaaaaaaaaaagaaaaaagaaaaaaaggccgggcgcagtggccatgcctgtaatcccagcactctgggaggtcgaggtgggcggatcacctgaggttgggagttcgggaccagcctgaccaacatggagaaacccctgtctctacttaaaatacaaaaaattagctggrcgtggtgatgggcacctgtaattccagctacttgggaggctgagaaaggagaatcgcttgaacctgagaggcggagattgcagtgagccgagatcacacaactgcatgcactccaaacggggcaacaagagcaaaacggactcaaaaaaaaaaaaaaaaagaaaaagaaaaaaaaggttctcctaatcaggttcactcacagaagatttgaattcagtacagagataagtcacagggataagcttctaccagcctggttctggagctggcaagtgaacaaatcccacaagtggctttctgatcatgataaaagcagcagccctggccaggcatggtggctctcgcctgtaatcccagcactttggaggccaagacgggttgatcacttgaggtcaggagttcgagaccagcccggccaacatggtgaaatcccgcctctactaaaaatacaaaaaaatagctgggtatgctggtgggcgcctgtagtcccagctactcgggaggctgagacagaagaattgcttgaacctgggaggtgaaggttccagtgagctgagatgacgccactgcactccagcctgggcgacagagcaaatctcaaraaaaacccaaaaaaacaaaaaacaaaaaacaaaaacaaaaaaacaaaacaaaacaaaaaaacatgggcagcagccctgttctcaggtgttcctcaaagctcaggctaaaatctgtttctttggccatttgttagccagtaagccatttaacacactgaaacaattttttgcttaaactaactcaaggatatttttttctctacaaataaaatctaaccaaaacatctcactagtcattatttgtaactgttttgttaaccataacatatcccattactttaaaattatattactgaaatctcaagagaatagtgctagttgtaaccactgacaggtttatcatgtatgtgcaagagcaatcagaaagggtgcagttccagagccaggaactctggattaaaaaataataatttgttgaggtaaaagtcacrtaacakaaaagtaatcactttaaagcaaacaagtcagtggcatttagcataatcaaaatgttacactactaycaccacttctagttccagaacacttccatcactacaaaaactaaaaccccttacccatcaagcaatatctcctcattctcccctaaccctaattccgggcaaaccccagtttatattttgtaaggagacattttttaaccaaggtaacttttaacctttagaactgttaagtagaatactttgtgaggaaataagactcttctactgttaaaggagacagatttcaccaccactggagatggtcaaacactgggctgttgaaccccaacaggaggcaatatggcaggcaaaactgagtcactacatgaccatgaagactgtctccaaccttgagattctattttttagcacatcctctttgaccatttgtcaataatgagcagcccctgttgaacagagctttctgcaattatggaaatatctcgtaactgcatgtacaatacaacagccatatgtggctaatgagtacctgaaatgtgactactgaacctgaggaacagaattttaaaaaaactttttttttttttgagacagagactcactctgtcacccaggctggagtacaatggtgtcatctcagctcactgcaacctcagcctcccgagtagctgggattacagctgcgagccaccatgcctggctaatttttttgtatttttagtagagatgaggttttgccatgttggccaggccggtcttgaactcttgacctcaggagatccgcctgcctcagcctcccaaagtgctaggattacaggcatgagccacctcagccggccaaaattttatctaattttaattagtttaaaattaaatagcccacatgtggctatttattgcaccctggctacaatattacacattgcagttatacaggaagatattcttgtattgggtggatggaagcacatcaaatcaatgtgaggtttcttccaatttcatgactgtatagttttaaaaatatctgtaaatattaatacatccccgttagcaattctattacattagaggaggccaattctagattcatcattataagtaccatttacaaactcttaatgcgaattttgcagatcaaagtgggcttacctggagagctaggtgctgtgagtgctgaggagtgaggttgactttccgaagcacaagcttcactctgattaagaacaacttctaaatgtctccacctctgataacgactatattcttgttttatgttctgaaaaatttgctctaataaaaaagaaacaaacttgagctttcactttattgtctcatttcttcaaactttcttcagaagtgggaagagacaaagatcttctgactagactttagatactccctttggcatgtaggtctcaatctccccctcccccgacataaacaagcaaaacgtttataccgtaccaagcactccccagtggcttcaaagacagtatgttcttattgccactatttcaacaatgcataaaagaatagctactttggcataaaccagacagagttccctttacttgttttcctgtggcaaagaacacaagatctgcagttagctggatggttaactagtacaatttacagtaaaagaaacctctgtttacctaacagggattattttttaatctcctttaaatttcgcaatttcacaacctagggtattaaggggtgagtctcatactgcccaagaccttctaacaaggaagctcttgtcccatatgggactttaaaaaagcatctttggagctggaagtggtggctccaaagctgggtgtaatcccagctactctgcagggggaggcgggaggatcccttgagcccaggagactagcctgaacaacacagcaaaatctcgtctcaaaaaaaaaccacaagggagcctgggtgatttatctaaaaaacaaatcaaaataaactttgggaaagggggcagcagaaaccattatgtttacagtgtggacatcgaccaaggaaagaactgagatttaatgcctagaagtgatggtcagggcttagaaaataattttctgatcctaagaggcaactcagtgtgtggggagattataagtcaaggtaatcacaaagcaaatttgctaacactattaaagggagcccaggaaacacaaattactaaccaccttgaaatacactcctagaaacaacaaagaatctaaaaggatgtggttttcaagttctttgtttgtacctactaatttaaaaaaagagatacctgtatccatctcaaacaactcaaattattctagtgtatactttgctataaccacctttttttttttaatggtgggaggtattaacaatgccactttgcttcttactagctgtgtgactataaccttgagaagttattcaggatctttacttcttcaatgtaaacattaaatacctacctgataaggttgtaaaaataaaaactaaaggtaacaataatgtcataacaagtgacagtacagtccaggaactgacatgaattcaagtggttccacacayagtcaaagtccctaactttcagcctaaatactagaacaatgtaggagatgctttaagagtgttatgggccagctgggtatggtggcttatgcctgtaatcccagcactttgggaggctgaggcaggcagatcacaaggtcatgaaatcgagactatcttggctaacatggtgaaacaccgtctctactaaaaataaaaaaawttagccaggcgtggtggcacgtgcctgtagtcccagctactcaggaagctgaggcaggagaatctcttgaaccggggaggtggaggttgcactgagccgagattgtgccactgcactccagcctgggaaacacaatcaagactctgcctcaaaaaaaaaatagaaaaacaaaacaaaaaaacaagagtgctatgggccaggcactgtggctcatgcctgtaatccagcactttggaaggccaaggtgggaggatcacttgaggccagcctgggcaacataacgagacccagtattaaaaaaaagaaaaaaagcctgtacatggtggctcacgcctgtaatcccagcactttgggaggcctaggcaggtggatcacctgaggttcgagaccagcctgaccaacatggcgaaaccatctctactaaaaatacaaaaattagctgggcatggtggtgcgcacctgtaatcccagctacttgggaggctgaggcaggagaattgcttcaacccaggaggtggagattgcagtgagccgagatcaccccattggactccagcctgggcaacagagtaagacactgtctcaaaaaacaaaacaaaacagtgctatgaagtttgtattttagattcctgaatttattaagttttcacctcactttattttttaagagagtcttaccctgtcgcccaggctgtagtgcaatagcacaatctcagttcactgcaacctctacctcccaggttcaagcaattctcctgcctcagcctccagagtagtttggatttcaggagcccgccaccacacccacctaattttttgtatttttagtagagacagagtttcacaatgttggccaggctggtctcaaactcctgacctcagctgatccgcccgcctcggcctcccaaagtgctgggaatacaggcgtgagccaccgctagccccctgtattttaagatgtcttattcctcaagccagagccaatacaaggataagaactgcaaatacttgaaacaagaaaggacaagtatgaggacaacgcttaagagaacagaaggtctttgataaacctctgcctcctgtatggcaatgttaacaaatggaaagatacaattttgagggtggtaggactaagaagtccaagaatctaaacacggtatccatgggagaaaaataagaaagttagacatgattttcttctgtagaaggccatataaagcacaaaatttttttaaaaagaaaaactcaaatttctttttaacagtggataattttaatccttccctccattacttgaggttgtgctgccagattttttccggtctaagcccatcctccaaactctacagtgttcctactgctacaaaccaaaattcaaactcttgaacatggcagtcaatactttccaagatgtggcctcaatttattttcctggttccatctggattccactataatttagttacattacattattctctccttaaattgtgggttttttggactttgctctcatggtttccctgtgctcgaaatgggactattgctcaaacttgatcaagactcagctagccaggcgcagtggctcatgcaatcccagcactttgggaggccgaggcgggcagatcacctgaggtcaggagtttgagaccagcttggccaatacagtgaaaccctgtcttgacaaaaaaaatacaaaaattagtaggccgggtgtggtggctcatgcctgtaatcccagcactttgggagtctgaggcaggcggatcacctgaggtcaggtgtttgagaccagcctgaccagtatgatgaaaccctatctccactaaaaatacaaaaattagctgagaatggtggcatgcgcctgtaatcccagcgttctgggaggctaaggcaggagaatcgcttgagtctgggaggtggaagttgcagtgagccgagatcatgctactgcactccagcctgggcaacaagagcgaaacgtcatctcaaaaaaaaaaaaaaaaaaaaaaaaaaaaaaaaaattagccgagcgtagtgacacatgcctgtaatcccagccactggggaggctgaggcaggagaatcgcttgaacatgggagacggcggttgcagtgagccaagatcgtgccactacactccagcctgggcaacagagtgactctgtctcaaaaaacaacaaaaaaagactcagctaaaatgctaccttaattcagaagttattctcagactctcaagtcataatcagttaattgctttgcacattacgtttacaaatatttcctgcggtcagcaacccccttcttccatgtctggaattcacctagcactcaataaagatttaagcaataaaaggcttagttttacaggasctttccacaaaaagtaccatacagattgagcatccctcatccaaaatgcttgagacagaagttttggattgtggaatagttgcattatacttaccaattgaacatcccttaccccaaatgagaaaaactccagtgaataagtatttcctttgagtgtcatattgacactcaatttttggatcagttcagactttgcagcatttcggatttcagaaaaattgcccagctaattttttagcttttttttttttttgagatggagtttcactcttgtcacccaggatggagtgcaatggccggatctcggcttaccgcaatctccgcctcccaggttcaagcgattctcctgcctcaacctcccgagtagctgggattacaggcatgcaccaccatgccccactaattttgtatttttagtagagacaggatttctccatgtgtgtcagggtggtcttgaactcccgacctcaggtgatccgcccgcctccgcctcccaaagtgctgggattataggagtgagccactgcgcccggccttagaattcttttgtggaaacaaggtctcattatgttgcacagacttgtctcgaattcctgggctcaagcaatcctcctgcctcagcctcccaaagtgctgggattgcaggtgtgagccaccacgccttgcccacattctcttttttttttttttttgagatggagtttcgctcttgtggcccaggctggagcgcaatggtgtgatctccgctcactgcaacctctgcctcccggcttcaaacgattctcctgcctcagcttccctagtagctgggattacaagtgcatgccaccactgcccccaaaacaaaaataactttttttttttttaagatggagtctcgctctgtcgccaggctggagtgcagtggcgcgatcttggctcaatgcaacctcgcccggctatttttagtagaaacagggttttcaccatgttggccaggatggtctcggtctcttgatccacccaccatggcctcccgaagtgctgggattacaggcataagccaccycgcccagcccaaaaatcacttacgaagcagctactgtaatgtgaactacaaccaaattagtctagaggatagtagtattgaataaaacatttacattaaacccatcactttatacttttcaaaatactttttgcaactatcttgagggttcttcaacaaaagatagcgcaagtatgaactccaatttgcagaagtgagacccaaaaagattatggactatctttaggtatctgcaggagctagggaagaacwaaacatcactgcaagtggccatctatggcgcctgtctttgagggttctttaaaatggacttttgcaaacattatctcatcctgtacataaggttatacaacattgaatggccggggaatttaagtagaacagcgttttttatgggcaggttagtcagctaatggataagagacttgaaattactcttttgggattagcaaatagaagggaaaaacatgataagggcacagagcggtgggtctgggggaaaaagcagaggcacagtttgaaaaaaatgtgtaagagactgactaggtaagatatggtcacagttcataagtcctttgaattctaggattaaaaaggtgaactcgagttaaggatatgaagtctgggacagctttagctgggtgtaggaatcttggtgtgaggatgagggcctgcaatttgcattgtggatcgatatgcagaggaaggaggaaatgaaacctgaaggcactgctactgaaaaggggtggaaaggatgattttacggtgagcctaaggttttgcttaagcttgaggaatagaaaaacacacaaagaaacgacttgcccaaatccattaytgagacgcccccctcatttccggaagtcctttaaaatcgcagaatattaatgctgaagcaccctcccctctactcctgcgctatgaggtgtctactgtaacgccagtccttttccttggacaaagtggaacgccttactgaaggagagtccctgttaaggacagttacattcttagttctgtagaacctccgtatgtcgtaggattctcaaattctagctaatgatctaccgatttcaagccatatatggtacgaggcwatagccatataataaaagaacgtggccagtcccttagaaattatcaggttgaaatcggattccgtgactcttgcggcggcctctgggttcctaaagacttctggaaatcatgtctccctacagggctaaacagcacgcactcgcgccccttcccggtaacccgcccccatcccacccccgccctccaggccaggttcgtgagtagaatccaattttccatggcccactggatctgcagggttgctcggtgcagacccggccagnnnnnnnnnnnnnnnnnnnnnnnnnnnnnnnnnnnnnnnnnnnnnnnnnnnnnnnnnnnnnnnnnnnnnnnnnnnnnnnnnnnnnnnnnnnnnnnnnnnnnnnnnnnnnnnnnnnnnnnnnnnnnnnnnnnnnnnnnnnnnnnnnnnnnnnnnnnnnnnnnnnnnnnnnnnnnnnnnnnnnnnnnnnnnnnnnnnnnnnnnnnnnnnnnnnnnnnnnnnnnnnnnnnnnnnnnnnnnnnnnnnnnnnnnnnnnnnnnnnnnnnnnnnnnnnnnnnnnnnnnnnnnnnnnnnnnnnnnnnnnnnnnnnnnnnnnnnnnnnnnnnnnnnnnnnnnnnnnnnnnnnnnnnnnnnnnnnnnnnnnnnnnnnnnnnnnnnnnnnnnnnnnnnnnnnnnnnnnnnnnnnnnnnnnnnnnnnnnnnnnnnnnnnnnnnnnnnnnnnnnnnnnnnnnnnnnnnnnnnnnnnnnnnnnnnnnnnnnnnnnnnnnnnnnnnnnnnnnnnnnnnnnnnnnnnnnnnnnnnnnnnnnnnnnnnnnnnnnnnnnnnnnnnnnnnnnnnnnnnnnnnnnnnnnnnnnnnnnnnnnnnnnnnnnnnnnnnnnnnnnnnnnnnnnnnnnnnnnnnnnnnnnnnnnnnnnnnnnnnnnnnnnnnnnnnnnnnnnnnnnnnnnnnnnnnnnnnnnnnnnnnnnnnnnnnnnnnnnnnnnnnnnnnnnnnnnnnnnnnnnnnnnnnnnnnnnnnnnnnnnnnnnnnnnnnnnnnnnnnnnnnnnnnnnnnnnnnnnnnnnnnnnnnnnnnnnnnnnnnnnnngggctcagcagcgccgcctcgaactccatgggccgcttcagcgtcgccccgcacgccatgccgctgaggggccagggtaccgggagcggacgcggcggtaagtgcgacccaagaggctcctcagccgggctcgccagccaagccggctccaatggcgcctccagcacccggcagcggcgctggccccgccttctgtgacgtcacgggcgcacaccatcgcccggcagaggggggcaggccggaagagggtggctctgcgaggctggtcagtgccggcccggcccggggcgccccctgctgaagaaatggaacggtctgggcggagagcgtggtcaccaagcaactccgggaaggcccccacccccacccccgcccctcccagggtcccatcccccccgctttggggctgtcgcgcccgggtggcccctaaggttttcgcacctgcgctgcgcgggcgtgggggaggggagagcttgaaggggcctggtgaggggccatgggggtctggtgactccaaaaacctccttctaggccgctcttgtccccatgataaaagggtgattgttaaaggtcatcaagggcattccgctgagccctgggaagtctgcacttaaacagaagcgagtattggaggatgggctttagcaagtccatgaaccccatgaaattatttgcagatttgtggggtgggagcgagggtgggggtgtttgtgggagtatttttgagatagctgacccataccttaagcagctcatcaaagggatatgttactttaaaacgttgagaacctacaaaaagcacccactggcttaaaccgtctaagaatggcttcagagtgttaagaacttcagctggtagctgatttgccattcttcccatctgacttggcagctcaggttcttcctcatctttctgaactctttacagcaataccagctgtaaagtgcttttgatattgtggaaaaataaatagataacaggggggttctgctttctgaaactctgcgcgtctgtatttttctggggagcagttccggtgttttcaacagatcatcaaaggaatctgatccaaagaaaggataaagcctttctgtaccttctcatatatactgaataatgaccatgactcctgggatctgtcttcaacatatctccaggatttttcaggacagtccgaattacagatattcacttctattagcccatatgctacatcaatgtgccacaatatttgagttggagaatatgggcatactaccccagtgcccattcattgttctttttctattgcttttctctggatcctcttcagttactacaaattttttttttttttttctgctccttgtggaacagagctaccccataggcatgcagtatgcccggagtaacctctacaaattctttaaatatcataacataggacatatatctttgcatttatctttgtaaaaattgcagaaataattctaaaatcagcataccaaatgttaattttatctcctctcttgtccataagagcataaagggtctttacaataggctagaaaactagaaatagaaaattagggccagagaaaaaggagatcacaattatcatggggttaaacaagactgtaactgaatttgaaatgtagttatcagctgggtgcggtggctcacgcctgtaatcccagcactttggagaccgaggcgggtggatcacttgaagctaggagttcaagaccagcttggccaacatggtaaaaccctgcctctactaaaaatacaaaaactagccaggcgtggtgatgcacacttgtaatcccagccactggagagtttgaggtgggagaattgcttggactcgccaccttgagattgtgccactgtactccagcctgggagacagagtgagaccctgtctcaaaaaaaaaaaaagaaagaaatgtagttctgagcttcctggatgctagggtaaaaatgaaaacacagtacatattgaatagattttgtcatctgaaaggaatgaattaatcataggagacatcatagattttttttccctatataaccaaattctaaaggtagtttctcatgtgattttattaggaaacagtgaatgatttaataaagtaatcaggaagattttaacaacaaatgctaaagcaaaattcacatggatactttttgttatgtctaatgaaagccaaggacataaaaagcaatctagtgacggtttttttgtttgttttgagaaagagttttgctctgttgtccaggctgaagtgcagtggcttaattgcagctgactgcaacctccgcctcccgggttcaagcaatttttctgcctcagcctccccagtagctgggactacaggcgtgtgccaccatgcctggctaatttttgtatttttactagagacggggtttctcgaactcctaatctcaaactcctgacctcaagtaatccgcccgcctcggcctcccaaagtgctgggattacaggcgtgagccactgtgtccggcccagtgatggttattttttaaggggcttgtctaatgtgggccaagtaaattgccttcttatggtgtaaacaggtccaaagttagagcttagaaggtttgaaaagtatgcccccttgggtagtcattctaaatagcacttttttttctcttttacagacagggtcttactctgtcatccaggctggagtgtagtggtgcaatcatagctcactgcagccctgaaaactcctgggcttagcctcccaagtagttaggactacagctttttttttttttttttttttttttgagatgaaattttgctcttgttgcccaggctggagtgcaatggtgcaatctcagctcactgcaacctccgcgtcccacgttcaagtgattctcctgcctcagcctcctgagtagctgggattacaggcatgcgccaccacgccaggctaattttgtatttttagtagagatggggtttctccatgttgctcaggctggtctcgaactcctgacctcaggtgatccgcctgcctcagcctcccaaagtgctgggattacaggcgtgagccaccgtgcccggccccacctggctaatttttaaacttaaatttaaatttgctaaatttgttgtagagacagaggtctcactatattgcccatgctggtctcaacctcctggcctcctgggattacaggcataagccacctcgaccaagacttccataaactagggatttttgttttgttttgttttgttttgttttgagatggagtctcgctctgtcgcccaggctagagtgcaatggcgtgatcttgcctgactgcaacctccgactcccgggttcaagtgattctcctgcctcagtctcccaagtagctgggactacaggtgcgtgccaccatgcctggctaatttttttttgtatttttagtagaggaggggtttcaccaagttagccaggatggtctcgatctcctgacctcgtgatccacccgccttggcctcccaaagtgctgggattacaggcgtgagccaccgcacccggcaagcacttacatattctatgtggaagtggcactgctgctggtgactatgcaatgggtatgaatgaagcagaaatagccaatatgagttctcttttccccatatggaagtaaaggcctgattcttactcagccactagtcaccgctgagtcttgaattctgtctcttctactcagggcattggttgcttctcaacaaatcaaaactatgttacacaagtgtgtcaaagccacaacaatgaactggtccctggattctgtgacacagaaaatttactaaatctgatcacattattcctctgctcaaaaccctgcaatggctatcttactgagacaaaaagatgaatccttatcatggtttacaaggcctactccagtgactnnnnnnnnnnnnnnnnnnnncctcattcatctgtgtttttccacccccagtacagtgtttgaatacagtaggggtaggttcagaataaatattggtcaaatgaagaaatagggctgggcatggtggctcacacctgtaatcccagcactttgggaggccaaggcaggtgaatcatgaggccaggagttcaagaccagcttggctaacatggtgaaaccctgtctctactaaaaatacaaaatagcaggcctggtggtgcatgcctgtaatcccagctactcaggaggctgaggcacgagaatcacttgaacccaggatgtggaggttgtagtgagccaaaatcatgccgctgcactccagcttgagtgacagagcaaggctctgtctcaaaaaaaaaaaaaaaaaagaaatggcaattatctcaaagttggtctctctctgaaagctgagagtccacattgctgagtgtgggtggattcagatgattcagaaaccaaacaagtagatggtatatcctattatatgctgccgatgacagaggactaaccatagagatgttcttcagggagctctgaaatagccactcagtttagtgtctccttatgagatcaccacagtccatgtttactttgctttgcatatccaggcccttggccagtatacacatacacacacattattgagtatcttcagtgtgctaggcattatgctatcttagtatcatggttgaggataccatggtatgaaaagaggccccttcctcccttcataggggtcccaactgttagaaatgacaggtgttaatcaaataatcacaacaaatatgtaactgcaaactatgacaagtactataaaggaaaaggacaggatgtgattaaagtcaggagtcctagcctgtcctggagggcaatgaaaacttccctgaagaaatgacatttcagctaagagctgatgaatcagtcggagttaattaagcaacgaaagggcggagagagcagaggggacagcacatatgaaggcctgtgatagaagaggacatagtgtgaggaatccaaatacgtctccagtggctgtggtccagagtatgaatctggagagtcagggagaaaaaactagtgaggaaggcaaaggaaggaatttaaatatgatcagaaattacatttgaagttcctggctgccccatggaaaacagtttggaggagagcagggatggatgaaggaaatcaataaagaggttactgtatccgtccagatgcacgccttgtagtattagttttgtaatattacaggaacctcccacctccaagcacacacaaattctttcatatcctcactgaggagaggggggtgtttttatgctggtttaccttgtaaaagctcagcaagagatctgaggctctgcctatttactggccagggaacagtgttgtttggattgaaggaatgaaagataccatcttccaaaatctttcaggattctttgtccaaagtttccaaaggaattgtctgtatttatgctctccttttttgtacctcctactcactactcattaacccacgtctatctgacctgtgcccttcccattccactaaaacaagtaaggtcgcctccacattatgaggaaagtagacagaaatgaacaaagtttaggagattaaatcaacagaccttggtgaggattagatatggaggtgagggagatggactaggctactagctttcccagcaccatattctgagaaagttttcattggaaagtgatcagactgaagaggaaaatgagttttgttttggacatgttgtgttagaggttcctttaaagcctcacttgggcgtctcaagtggaggtatttgtatgtaaatacgcgggtctggaattcaagagagatctgaattggagaaaaaaattcaggtgagtcatcggtggaaaaatggttactgaagttgtaagggcaggtgggattgttaaaggtaggagttcttagcctttccttgtgtgccatacaccccttctctgaatgtttttaagtgcaaaaataaaacacatatgattacagaggaacacagctataatacaatatatatgtctatgttcatttatatattttatgcttatgtaattatatatttatgtattaatatatgttatatataataaatttcagaaagtccattaatatccattgcaggctaggtgcagtggcttatgcctgtaatcccagcactttgggaggccgagttgggcagatcacctgaggccaggagtttgagat

SEQ ID NO: 98200 - DNA, 32224 bp, Homo sapiens
caccccacaccctgcagccctgaggggcgggtgtcctctctagtcataggtctcccactttgctgggcatcagaaccacccaggatgctgggcccctcagcagagacctcaatggatctttactcctgaggactcagtagcctagggacttccctagggacacgaaggctgctcagatggggcaggattccctcctgggctctctttttgctttttgatacatggtcttactctgttgcctacactggagtgcagtggcatcattatggctcactgcagcctcaacctcttagactcaagtaatcctcctgcctcagccttccaagtagctgggctacagacaggtgtgcaccaccacacctgaccacttttttgcatttttttttttgtagagaccatgttgcccaggctggtcttgaactcatgagctcaagtaaccctcccacttcggtgtcccaaagtgctgggattacaggtgtgagccaccatgcctggcccatcctgggctcgctttttgcttcccagcaggtgattgctcaggaacgagctatgacttcaagaccccaacatccagggatcctcatttcccccccagaggtctcaagacaacaagaaaacccacagagggcttgggaattcctgaagcaatgcaggggaggagatgcaaacagcaaaggaaggtcttacctcaggaacagcccaggacttcattccacatagatttgaccccaccccagccatcctcaccaagcccacccccggctcaccgattcctgtaggtctcagcccagctattcccaaagaagcggcccacaggctgtttcccgtccttgtcctcatacttgtacttgccagtcagcaggccccctgcgggaaggcagcaatcagcccctggccccagagtgccccagaagctgccacatccctcagggctctggtctaggggaggggcagggacccaggaggggctgaagaacacagcccagcctcttgtcaaaccctccctgcttcataaattctgggctgggcatctgtgggtcaggaataggctgagacagggtcaggaatgctccacgtaccagccagagggttgtaggcatagaacctcagtccaaagtgcctgaggcaggggaagagctccgtttccacctgccgggtggtggcgttgtacatgccctgcagggagagggaccccggggacagggtggacatgtcaagagaaggaactgttgccttccactttcaaacctctaaagcaacaccggcccaggacttcagcaatattctaacatcactactgttagtaggggatggagggaaggtgttgggcccaaggacagaaaattgaagtggaatggtatctttccacaaatatctgctgtatgaactccatgctggacactggttacaaccacaagtaggtatcacaaaatccctgcttccaggagatgtttactcaagtttaaaaaaatagacaaggaaggcagttaattacaataaagttaggttctacaatcaaacaaggagctggaaagtactcgctgaatgtatgaagatgagatttggagactggagactcctatggggctgtctagaaaggcttccagaggaggagacctctatgtaaggcctgagtgcttctcccagggaggagggcaggggaaatgtgttccaggctgaagtatgaaaggaggtggggaaggaagggtccaaggtgcacagataggcaggaaggaagcagatgcccagtggccaggctgaggagcttgaatggcatcctgagggtacatgggagccatctgcaggctttcagcaggggagtggctgctatgcagacggcacagggggcagtcaggggggcaaagagagcccaggattagcaggagtcctggagaccttggcctctgcagccccggccctcacctggtacacagtgggcaggatccagccattgctcttgcagagggtacagatctcggccacttcccagctagcatagttggagaggccaagctccacgaacttgccctgcatgggtgaggctccagtcagaacgcagtgtagcccagaccaggaaggggaggccagggtggggccccagggaatggggctattccctgccccaccctgggactgccctggtgcctctgctctcatgagtaggatcaggataaagaaaggagcaggagcccacctttggagctcggagggccccctcacctcctggtgcagccgctggcaggcatgcagcgtctcttccaccggggtgccgtggtcaggtgcgtgtaggtagaagaggtccacttggggacactgcagcctcttcaatgacgtctccagctgggaccggacactgtcaggctttagtgattttccatcccaagggttggccttggtggcaattttcacttggagagagaatggaatggttaagtgacctattagagccatttgctaaccatgtaaccctggctaaattactaatattctcttggcctcaattgtatgatctgtaaaatggggtgataataatcaaactgtcctcattgggaggtcctggggattaaataatgtcatatatgtgagttctcaatgttcacctattagaataactatcattagtcaccaacctgctggctgtgccaggccttgcactagagactgagtatgcagagatgaactgaacacaatggatctctgccctcctggagccctagaggatgatggtacaatatggtaagcacaggagggaaaggcacacgatgccaaggagcccagatgagatgcatgaagccaacttggagactccagggaaggctttctctaggggatcactcccagagtcccagccaacaaggaagagcaggaagtacactccagagcatgggaacccatgcaaagtcaaagaggcaaaaaaacactatgtgaggctccaaaccttcaagtctaagttataagagcataaattctagagcaaggagcagtgggacgtaggacaagagacagggacagacctcatcccaaaagttcttaaataccatcccactgaatctgaacttgatcattccagattttgtcagggtgtgaaccggtcacctgtgttcacacttggctgcagtatagagaaagaagtcaagggggcaggcctggaagagtttaggaaagcgaagcagccacataaatgtggcccagtggtagagatcaacttgagagcttagaaggcaaactgagcagaatgtaattataattctcccctccccttcctgactcacagaagcatgagcatatatccaaacactgtagggacacatcactatgacaacagtgttctgcatccgagcagcttggaaatgagttaattctgcactattctttcccctataaagaaccccagctgttggtccagatgtagtggctcaagtctgtaaacctagtttgggggtactttgggaggctgagtagggagaattacttgagcccaagagtttgagataatcctggacaatgtagcaagaccctccctctacaaaaataaaaattaaaaaagaaccccagctgggccaggaaaggtagctcacgcctgtaatcccagcactttcggaggctgaagtgggtggatcacctgaggtcaggagttcgagaccagccttggccaacatggtgaaactctgtctctactaaaaatacaaaaattagccaggcttggtggcacgtgcctgtaaccccagctacttaggaggctgaggcaggagaatcacttgaacctgggaggcagaggttgcagtgagtccagattgtgctactgcactccagcctgggcgacagagtgagactctgtgtcaaaaaacaaaaaacaaaacaaaaaaaaagaaccccagctgtctggattggttgggggatggattctgcacttttcatacttagcaaagtcagctcagtagctcagaagggtgtcacgagatcagttgggatatgggacagaacaagttccacagtttctcatccagattttctccatttccccacaacgccccaggcattcttggcatgaactgtgcctcaggcctggcctgaggactttggttcagtgagctcctggccccaaagacggaagcggggaagggttagagaagaaaaaccaactcaggaacaaaatcttcattattaatagtatgtaacgtggccgggcgtggtggcttacacctataatcccagcactttgggaggctgaggtgggcagatcacttgaggtcaggagttgaggaccagcctggccaatatggtgaaaccccatctctactaaaaatacaaaaattagctgggcgtggcggtgtgcacctgtaatcccagttacttgggaggctgaggcagaggttgcagtgagctgagatcgtgccactgcactccaccctgggtgacagagcaagattccgtctcaaataataataataacaaaaacaacaacatgcagccaggtgaactagaaacagcgtgggcctgagattcacatttgccctcttttccccccgaccccccaagcgctatgactcaggaggacccagagagaacctctcctcaggggtggggagcaacagcctcaggatagtccagtgggtgaagcatggtaagggtaacagcccacgttccctgggccctcactgagtgccaggcaccctcccaagggctatcaagggcaccaggctcacgagggacagtcccctccatcctccactcaagccccacctgcccagtggccttcctttcacacatcacgcacattgcatttccaaaccaagtctttgcacagactctaatgttcctttctcttgttctcctccaacctaccattgagcctttaaggctgagctccatccagcatttgctgagccttccctagtgcctctccccggcctgcagctccctaaagtactctctcttctgggctctccagcaatcattacttcaatcttcctcattagactctgaactccctgtggagggctggaatcactttccctcctatggccccaagtcaaagcctggcatagagtggatagaaagtccctacaccctgacccgtccgcactccctaacactcctactctcccagccagccttacggcatcgccacagttctccctgagagaggcagaggtactgccagctgcacaggtcaaattctagtggttaagaaaaggccaggatgagaaaagggtgcccagggtgtgcatgcgtgatgatggtaacgaaggggtagagaaaagggggagagcctgggtggggaccggttgtgggcacctggcaggtttggaggcgggggcatcaatggaggtgggaagcgatgggtcagaccaggctggggggagactctcgcgctgcaactcccaagggaaggagagtgggggaaaggagtcagggcaaagcactgtctagttgtcccggggttcccagagctgcggggtggacctggggtggggagcgagggacgaatccgtcggtgctgcccgcggccgggcccgagcggggtggtgcacggctggggacaggctcagctctacacgatgcatggggaggatctgcagctactgttacctctgcagtcgccaccgcccagcccgagccccaggccgcccaggatggtctcggactggccgtcgctgtacatgaaggccgtgtccagttcggtgtggccgcgctccagaaaggcgcgcacggccgcggcgctggcgggcgcgtccatgcggcgccccatctccatggtgcccagcaccgaggcgacccgcggtggcggtggccgggacatggcgagcgcgcgggcctcgggcggcggagagcgaagcgcgcagtggacggcggcgcgggagactacgcgagacgcggcactcagcatagcagcggcgcctgcgcgttgggagccgggggccccgggggcccgggggccccgcccatgccggggaggagcgcggaggcagttgggggcggggacaacaggcgcggccccagcggcgcctccaggcccggtcagcccagcgcgcggcgtgggggcggggcctgcggttcccgcgggggcggtggcgcgcggtcagctgacccggcgggccttgacccagaagctgggccctggcggcggatctggacgtggtgagccggaccgggggcaggtggcaaactycacggctgggggtcggggctcctgggcttccctgccacatccttccagccctctcctccggccgctggactgtcccggctcctgcgccctccttgtggcgcgatatcgtgggacgaggctccgggccgggactgggtggccctcgggaatccgcagccagtggccccccacctcaaaggcgaccagcgcggcctctcgagctggyctggccaggagttgccctgccccggccgaccggccccttggcatctgatgkcttcgtttttcccgggccggccgggcgaggggccctcgcggcgctggccccagcagctgtcctatcattatccctccaaacaggcggcccgcgccgggctgagtcaccaggagggagctgtggccgaggacgccgaggcctggagtgggtggtagccccgagctgggacrctcctccctccacaatctccccaggtctgcagggaccgagggcctacactgcctcctcccacgccgtgcttagggtaggtttccaaacgtgtaaatggagagtctgagtctggaagtgtgaggggtcccgggcctgggtcacaggtcatgtctaatcaacgcttactgaaggcgcctgtstgcccggacgctggaggggctacaatgagaacaaataatagtcattttgggctgttggtgttgagtgccagtgccaggcacccttgtaatcgcttggcctggattgtctcatttaactctgcagtcagcctaggtggtgggtattgcattattcccctacttttcagatgagaactacgaagctcaatcacttgagttccagactggtaggcatcgggcaggtctgttccagagtgcttttctcctcaaccctgggctgttcgagctcacagctttctccccttcctttctcctttccttcctcttctctctcttccaccctttctcctttctcacccgtttcctctcttcttcactctgtccttctctctacctctctctttctctcactgtctctcaacatttgctgaacctctaggtgtgtttacacctggagaataagaaatgcacaacccagggtggggagagtacgtttcaaagacagtggtcgcagaggacggtggtarcgttcttcaggtgtgtggacaaggggagaggaggaggtggaaggtcctgtccagccagctctcatggggcatctttgaaagggcaatttagaagtgagtcttcttatctcatgaccaggcccttgaaggggagcaggacacttctaggggaagagatggcacgtgcagaagcctggagacctgaaatgactgaagacgtgggtcaggaggcaggagataaggttgggagggcagttcttggagtaacttgaggcctagcctcaggtaatttggacttcatcctgtagacaaaggtggacacatgattggctgtgatcatgtgcccgaagcaccctgactcagcttgggatcagggagaggagtttgggtgtggcaggagatgtcatctccagcccaacctttctcaaagtgcactagatggagcagaatcgctggagggcttcttaaacccagaatctctaagccccagcccaggtgcactgactccaaattttgaacatgcaccctccaagggtgattccagggtaccgcttctggggtccttcccatccctgcaggtgaggtcaagctccattgcaaccttggacatccatttgctcagagctgtttgaacaggatgtgggcccatgcctggcttctaggtgacaggaactacgcaggatggccctcagagccaggccyttctgttcagggatcaggtgtrtctcagagtgtcccgagctccacattgcacatgggtcctgtccaaggtcagggggacacccacccagtatcctggatccataaaccaaggtaccttcctcaagacaactccccaacacgcacgcatactggggtgcatccatttcatttcctccttaacctagggaaagggggaagtgagagagaggccgcaggggccataaaccaaggtaccttcctcgagacaaccccccaacacacacatgctgagatgtgtccatttcatttcctccctaacctggggaaagggggaaatgagagggagagtccccaaggtggttgagatgctggactctcatcctgaaaacagtcgctgccatgtgttgtcaggcacagggctgagagctttatgtgcatttagtcagggcagctgccccaaggagtgagtgtcgttagccccattttwtggacaggctcaggcaggttaattcacttccagggctgctcagcctcacctgtcaaatgagcacagtatacccaaccttgctggggagtggtgaggatggcagtggatgagctgcagccttgtgttcagactctgcaagggggtgtgggggtgcaccccagttggcagtggtggctgagaacatgaggacttgatttgaaatgcctttggccttgcaaacgtgtagttctcacctggactatatggtttttttttgtttgtttgtgttttgttttgtttttgagagtcttgctctgtcacccagttggagtgcaatggcgcgatctcagctcactgcaacctctgcctcctgggttcaagtgattctcctgcctcagcctcctgagtagctgggattacaggcacgcacccaccacgcctggctaatttttgtatttttgatagagatggtgtttcaccatgttggccaggctgttctccagctcctgagctcaagtgatccaactgccttggcctcccaaagtgctgggattacaggtgtgaaccactgcgcccggccacacctggactatatgttaatttggagtggcctttcaggggccrgagatggagcatcaggtgaaggcttccaacatcatctgtgctgatggtcccccaggtgggccacgaagacacagggaagaggctttcagcctccctgcctgtgccaggccctggaggtagtccagtgagctgggctgacagtgacctggggcacccttacctttaggtccagggyctctgcccacagcgagtcacattagggctgagggtctacggcttcctgagaggaggtgctgactcacttcctttccctcccggtgctccctggtctctgtgtcctcagcagttccgtggggccagccagggactagctggggagcccaggcctcctgacacaagtgggaatgaaggcagctagagacagcccccacctggatgaggaaatcccctctgagcacagggaaaaaagaggaagcccactttctggctgtgcagtcatgccagaccacagaggcttctctgtctctctctctccctccctctctccctctctctctctcgagccayagaagtcttctgcttcgctggtgacagatggacctgaggcgggtggtgtggcaggtggctatgagcaggggtrtaggtctgagtcttgggtttgactctgtagtttcctggctgggtggcgctggcacatcacttccgcactctggctcaggctccttgtggatatcagtggtccccacttcayagttgctgggaagatgcaacatgagtgcatgcaggatgcttggctcaccggtccragctgtggtgatgatcactgatggagatggcccagcygagcctcactttccctccctcctctaaggtgtcacgcaggcaatgactgctctactcactgtccagggtgcccgggtagcgggagaggcctgccctgcccacccctgcgatcagccatattctggctttgtcattgtgacggtrgggaggtggctgtggactccctgctgktaggcatcccccccacactctgtgagctcctgggagaatacaggctgcatcgtcccaaacttgagtccttgtcattcatgcaaccccggggatcccttgctcctcttctccacttgcctcatctgtgtggggcaactctttatggtttgtgtgtgtgtgtgtgtgtgtgtgtgtgtgtgtgtgtgtgttttcttttaagacagggttcagctctgtcgcccaggctggagtgcagtggcatgatcatggcttgctctgcaacctccacttcctgggctcaagcgattcttccacctcagcctcctgagtagctagctgggactacaagcgtgtgccaccacacctggctaatttttgaatttttcatrgagacagcgttgcccagcctgttctcgaactcctgggctcaagtaatctttcccacctcagcctcctagagtgctggcacagtgcccagcccttattttgttgttgttttgacacagggtcttgctctgtcatccaggctggagtgcattggtgwgatcatggctctctatagcctgtacctcctgggctcaagtgatcctcccacctcagcctcctgagtagcttggaccagaggtgcacaccaccatgtttggctaatttttgtatttcttttcttttctttttctttctttctttctttctttttttttttagagggagtcttgctctgtcacctctttttttttttttttttttttttgagatggggtcttgttatgttgcccaggctgccaggctggtctcagtctcttgggctcaagctgtcctcccgccttggcctcccaaattgtggggattaccggcatgagccatcattcgtggctacaacctgctttaaattagatgaacttgatgggcctggcctcagcagatccttagagagtaatttacaataataacaagaaattaggaataccctaagtgttcaagagtcataggaaaaggtaacatcgagggctcagttcaacacactgtgtatgaactcactgaacccacacaacagctgtatgtgggaggcagcactgtgatgaccccatttacagatgagagggctcaggcacagaaaggctgagtctttgcccaaagtctagcatgaatgggtgatgaagcagggatttgaacacacccgtcccttctgcagatccagcaygctrcctgcatgtgtctgtagttggcgtgtgtttgctgtgatctgtgcacctgggagctgattgggtcctggtgggtgaagattatgtctttgcccttctctggctcagggccaggagccccgtgaaaaggctgggatgagcttagtttgggatgrccatgaataggacctggacctcccagtgctgaaagcctcctcccttcctccctgtagaacccttgctggcctcagaacaccagcgccctccctcyggtgcagccctgcctggccgggggcccctcctccacagccatggtctggaagaaactgggctcccgcaacttctccagctgccccartggctccatccagtggatatgggatgtgttgggtgaatgtgcccaggacggctgggacgaggccagcgtgggcctgggcttgatctccattctctgctttgctgcatctaccttcccgtgagtagtgtcttggtggcaggaccagggcagggctgtggggttgaggcagtggctccagctactgctcagcgaggggttrtctggtgggccacgggcctctccagactagaggctggggtgtgttccctcgacagggacctgcactgattgctaccgcaggtcagacctagtgctgggcagtgctgatacagagatcatcacctttgcaacagtttattgagtgcccaccatatacctggcttgcttctaagcacttgccatatttctacctcatttaatcctcacaacaaccttgtgaaacagggacagttaccatccatctattttatagatgagggatccaaaacccagagaagttaagcaatttgctttaggtcacacagctggtcagagatggggcgggagagtgggagggctgggatgcgtcaaacacaacctctgtcctccagactttgacagtctcgtggtggagacagcagcagtgaacacaacattgtgtggccgctgccatgatcarggagtgaggacatgctgcacaggggtcaagagcatcttgacctgggcgtgtcacctcactgctctgagcctcagtttccttgcttgtgtcatggaaatattgttacctaactagatggttgctgtgaggatggcatgagggtgtgtagggagagctgcccactcagggccttcacacaatgtttgcacaagcctgaaagctgtcagtggtgacactgctagtatttcattacatgaagcacagaagagggacacccacctgatctgcagaggcggaagaagattacagtcaggaaggacctggaggccaggcacaatggctcacgcctgtaatcccagcactttgggaggccgaggcaggaggatcacttgaggtcgggagtttgagaccagcctggccaacacagtgagacccccatctctaccaaaaaaaaaaaaaaaattaaaattaaaaacaaaaaagaagggagttggaggtgttggcctctaggctaaaagccraggataggacagcaytgggggtgagagccaggggctgagtgtggaagagcagttcaggcagaggaagcagcagatgtacagagaaggggcagctgcgtttatatagtggacagagtgtgtgggggtcagggaagggagaggtgaggtcacaggagtcatcaaaggccctgtggcctaagcggcatgctctgctcttaagaaatgtgctctttatcctaagggataaagacaagggtttgatcaggggcttgacattgttttaacagctttattgggagagaattcgcatttcatgcaattaacccattcagtgtacartcattggttttagtatagccagagttgtgtaactgtcaccacaactaattttaggacattttcgttagcccaaatggaaacccatgcccatcagcagtcattcttcatttctcccggaacctctcagtccctgccmgccactagtctactttctgtctctgttgatttgccttttctggacatttcatgattcatataaatggaatcacacaggacctgttgtgattggcttctttcacttaacataatgtcttcaagattcatccatgtcatagcatgtatcagatcagtacttcagtcctttttgtggccgaatactgttttactctgtgtatagcacatttggttatccattcatccattgatggacattgggttgtttctactttgtagccattatgattaatgttgctgtgcacattcatgttttttttttttttttgcctggtgcagtggctcacacctgtaatgctagcactttgggaggctaaggcgggcagatcgcctgagggcaggagttcaagaccggcctggccaacatggtgaaactccatctctactaaaaatacaaaaattagcggggtgtggtggcgcgtgcctgtggtcccagctactcgggaggctgaggcaggggaattgcttgagcccaccaggcagaggctgcagtgagccaggattgcactactgcactccagcctgggggacaagagagagtctccgtctcttttctttttgagacaaggtctcactctggtcccccaggctggagtgcggtggtgcaatcttggctcactgcagcctctgcctggygkgctcaagagattcccctgcctcagcctcccgagtagctgggaatacaggcatgcgccaccatgcctggctaatttatgtatatatttttggtagagctggggcttcaccatgttgcccaggctggtcttgaactcctgagctcaagtgatcctcctccctcagcattccaaagtgctgggattataggtatgagccatggtgcccgaccttcaggtatgagtttttgtggggaaatatgtttttatttctcttgagtatatacctaggagtagaatttcygggtcctatgttaactctaagtttagccttttgaggatttgtcagactgtttttcaaagcagctgcatcattttactttcccaccaaaagcatatgaaggctccagtttctccaaatcctcctcaacactggtggcctgtctttttttttttttttttttttttgacagtctcgctctgtcgcccaggctggaragcggtggtgcgatctcggctcactgcaagctctgccttccgggttcacgccattctcctgcctcagcctcccgagtagctgggactacaggcacctgccaccacgcctggctaattttttgtatttttttagtagagacggggtttcaccgtgttagccaggatggtctcgatttcctgaccttgtgatccgcccgccttggcctcccaaagtgctgggattacaggcgtgagccaccgcacctggsctcacttctttttttttgagacgtagtcttgctctgttgcccaggctggagtgcagcagtgcaatcttggctcactgtaacctctgcctcccgggttcaagcgattctcctgcctcagcctcctgaggagctgggactacaggcgcctcccaccacacycagctaatttttgtatttttagtagagacagggttacaccatgttggccaggctggtctcaaactcctgatctcaggtgatctgcctgcctcagcctcccaaagtgctgagattacaactgtgaaccaccctgctcggccgtcttttcactttcttgatggtgtcctttgaagcataaaaattttaaattttgatgatgtccagtttatttgttctcttttgtttcttgtggttttggtgtcatatctaagaaaccactgccaaatgcagataacaaagatttatccttatctcttcttttttttttttttttttttttttgagacacggtcatactctgtcccccaggctggagtgcagtagtgtgatcacatagctcattgcaaccttgaccttctgcgctcaagcagtcctcccacctcagcctcttgagtaactgggaccacagacgtgcaccactaaaccttgctaattgaaatttttttttttggtagagacaaggtctcactgtattgtccaggctggtctcaaactcctagatttaagcaatcctcctgtctcagcctccaaagtgttggggttcaagcatgagccattgtgcccagcatctcttgttctaagtgttacaaagatgtaactcttacatttaggtgtttgatccattttgtaaatgatgtgaagtaggagtccaamctcattttttttttttttcttgagacacagtcttgctctgttgttcaggctggagtgcagtggtgcgatctcagctcactgcaacctccacctcttgggctgaagtgattctcctacctcagcctcctgagtagctgggattacaagcatgtgccaccatgcctggcaaatttttgcatttttagtaaagatggggtttcaccatgttggctaggctggtctcgaactcgtgacctcaggtggtctacctgcctcagcctccaaaagtgctgggattacaggcatgagccaccacacatgtggatatccacttgtcccagcgccaggtgttgraaagactgtccttccccattgatttctctgggcaccctatcagaggcttgatgtttttactgagttaccttgttccaggtgcctgttgggtgtggtgcaagtaagctaaacagacactgtccttgcctttggagagcttccattctggtacccttgaaaagataatctgggagtgacggggaggaaggagcagagtgacagagagagagtggaggcagggaggccaccttggaggctgtggaagccttcagcaagcatcagtggtggggggattggagaggccctcaccagacagactggacgggtgtaggtgactgatggggccgggggcgggaggctccctgtccaggggtgagagcttcctcaggactatccgagttgctggctgaggatccccctttctgcctgggctggttgattaaccagggaggggattggaggcctgggagagagccctaagtgatggagagagggtggctgcccccctggtcttccctaggactcagtctctcctgagtgggacagaatcactttcctgcaattgatgaagacaagtcgagtcatagcatcttaggaggagctttactgtaagggataaaccttgattaagggccttctcagtgctgggcctatgctagtcactccccctgtcctcaggaaacttgagggaatctgggagggacggggatgtcaagtgtttcaaaggaggaaggagaagatgccagcggagctcgtgtcggggaggcccagaggaggaaccgacatttcctgagacgggaaagatgactccgaggtctctgggcctgaggaggggtgagcgggacayctgagaccagagctgggaggaagagagccatcctggggcggcgagcctggggccttgcaaggatcccctcacagaatgggggcctttatccaagagcactggaaggctctggcagtttttggtgacactggggttttagttttttatttgttattaaagacaattttttttttttttgagacaaggtctcactgtgtcatccagtctgaagtgcagtggtgcattcataactcactgcagcctcaacctcttgggctcaagtgatcctcccacctcagcctcttgagtagctgggaccacaggtccccactccacacttggctaatttttttttttggtagagacagggtcttgctgtgttgcccaggctggtcttgaacttgtaggctcaagtgattctcttgcctcagcctcctgaagtgctgggattacaggtgtgagctaccacacccagcctccaaagtgttgggattataggcataagccactgcttctggctgagatgggggttttagaaagatttctgaaagggaggatgaaagatttctgaaaggagggaggcttgttaggaggctgagggaggcaggtggaaggactcgctgtgggaagaatgccggtttcttagtttctggcttggataatggatgggatgagctgccatttagttagttagtttctttgtttctttttattttcttttttgagacagggtcttgctctgttgcccaggctggagtgcagtggtgtgatctcggcttactgcaacctccacctcctggcttcaagcaattctcatccctcagcctcctgaacagctgggattacaggcgtgcgccaccatgcctggctgatttttgtatttttggtagagatggggtttcaccatgttggccaggctggtctcgaacttctggcctcaagtgatccaccctcctcaacctcccaaagtgttgggattgcaggtgtgagccaaccgtgtctggccaccatttagtttctttctrtctgtctgttttccttcatgcatgcaggtggttaaagagaaactggaacagtaaatggcagtatgtataatggttaagagcaagaccggaggctcaggtaggggttgaatccgagtggtatggcacggcttcctccaggcccagtgaggaggtcatcgtggtagactggacagcacaggtgtcttgaggacagaatgagtcaacacacatgcagagggctcagaactgccctgggccttagtgccaccgccagctttggcctcgtacccacacctggccagaagtcctaagagggtcccagcaccaaggacctttgggaaaacaaccaggggaccaaaagcctactaccttgatagtggagctccaggcgcctcagccccgcccttctctgttgccctctaaagagaactgggctggggttctgcctgtcttggctacagctgctcctggagacccggcgtgcccaggccttcggcccgcacgtccctttcccagcactgttcttgttgcaatgcccttccctgcatccacaggagaaaggatccagggttctatgcagcggttgtcagggcccaacacaaaacttcaggaccctacataagccccagatccccactggagaccccagggtgtggtagaggagaatctgagtaaggctgcggctttccctggagagatgcacagccgtagagtcctcggcttagaagggattccccaggggactcctccaaagggccgakaaggcttctgaggatcccgcccgtggggaggatgggccgccaggccacttcctctccatcgccgcctcgatccccatggtcgtctcctctgggcggtgtcccctataaggcggcatcccctgtaagrtggcctgagcatgcrtcccttcctcttcctcttccacagccagttcatcaaagcctacaagacgggcaacatggaccaggcgctgtccctgtggttcctcctgggctggattggcggagactcctgcaacctcatcggctccttccttgctgaccagctgcccctgcaggtgggccggtacccgggcaargtggcgctacccctaaccctgcytcaccctgcagggttgcctgaggagatgcyaggctctttggcccgcctggtctccagaaccctgacccgtcattccatcttgtgkgagggccccatccttctgtctgccgaactgtgactgtgggcaggtcactgctcttctctgggcctcagtttccccatctgcaatatgagcatgtctaacaggaaggtttcggggtcttccacctccagggtgctggagtgctggcgaagctttcagagggtgggcccctcgaggagaaagggagtttttccgtgggaggcccagatgccatcctgctcctgtgggcaggcagagctggggctcccaatcaggaaggcattgtcttcccatgtgggaccagaaagttctgactgccctggtgtcaggccaaaccagagccatcacttcaccgcggagtcccactttgtcctgactgctagcgctgaccaccagctcattggcccctcctgggctagatcctttcctgggtctttcgcccacctgttctgtcattctgccaggtgggaactgggagttcttccttgccagataaggaaacagaagctcagagaggagaagtgacttggtccgggtcacccagctgggatatgacagagggctgcyggggcgtggtctcagatcctgggactgcgccaacccctggrccccctgcatctcttacagacctacacggctgtgtattatgtcttggcagacctggtgatgctgacgctgtacttttactacaagttcaggacrcgcccctctctgtgtgagtatggggaccgctctctgtcagatgctctaccagcagcagggggcagttgkkgkkgggggcscctggagtgtgggaggaagcgggtttcccatggctgggtgataacccaaacctcggaaagccttccccgggccttatctaaragcctgagccttaactggccaarataraggcttgagggcagtgagcgcgtcctggcccaraccacaggccggttcctctcgcccaggggctcattcagcagacacagctccagctcctcctctgtgtccggccctgggcttggagctggggaaacgagggcaagtcacacaggctgcctctgccccagccttcaggaggagcaggagacaaggtcagcttgaggctatacagacacggggagggacctggggaggaagttgtctcatcagcgttcctgcttcgtgtaaccccctcctgacctccctgccctcagcgtttcacctttataactctaggagaagggtactgttgttgtacccattcgacagatgaagaatgaaagctcagagaggttaggtcacttgcccaaggtcacacagcccctgaggggcaaggccaggacttagcaccctcccccgacaaccgctgccactcagccatctaacctcagcttccccctgccttgtgtgcagtgtctgcccccatcaactccgtgctgttgttcctcatggggatggcgtgcgccacaccgctgctgagtgctgctgggcccgtggctgcccctagggaagccttccgggggcgggcgctcctgtccgtggagtcgggcagcaaggtgaggcgtgggcgtggcggtcgaagggatggaggctggctcatccccagggctctcccctgcacagcctcatgggtgctaaatggggtgggggatcacctctggctcctacgagacaccaagtgcccccttctgccccacagcccttcacccggcaggaagtcattggcttcgtcatcggctccatctccagcgtgttgtacctgctytcccggctgcctcagatccgcaccaacgtgagcctccagcaggggctgggtggggccragtagaggagagctggcctggccaccygggccctctgggctaaggagtagcacagcataggagccttggttcagaaagtctggtctactcccgctgttggcttgggcragttaatccaatctccgagcctccatttctgcttctggaaaatgggcgtggcrtggcctgccagccaggctacaagaggcccatgtgtgtcttgggggagtgggaggtcaggggaaggtgaggggctgagcttggaggcctgaggggagaggagaagctggggagtcggggaggggaggcttgctgggcagctagagcctgtgtggggtggaatgcagggtggtgtggggccacaggcctggcacagccacggtctcccgtggacctgggcaggggcctgggggggcttgtctgtgggtgggaggaggctcttctgtgtgtcgggcccatatccctgggcacccagggaaagattggctcagagcaggtgcactgtggtggggcaggtggacatgtggacagttacaatccagagtgacaagaggcctgttcgaggtctctgacctgacctcctcctgccccagttcctccggaagtccacccaggggatctcctactctctgttcgcgctggtgatgctggggaacacgctgtatgggctgagcgtgctgctcaaaaaccccgaggagggccagagcgagggcagctacctgctgcaccacctgccctggcttgtgggcagcctgggcgtgctgctgctcgacaccatcgtatccttcagggcgtgtggggcaggtggcggggtgtgggcaaggaagcttctgcctgcacacagcgtcagcactcatccgtctcttcctcccttcatccatccgtccatccatccatccctccctccctccctccctccctccctccctccctccatctgttcacccagtcgtgcacacctcctgtgtgccaggcacccagctggaccctggagccgtgagtgagcaagaacagccatgagtgccccagaagcttacagcccagcggggcgcagagaggacacaacgctatcatcaaagaattacttcattgcagtggcaccaagtgctgcagagaaaaacaacaagagcgtctagccagggaccgtcctggttagaggggcagcaaaggcccctatmagtctcattgaacctgtgacttgacagagtaggagaagtcaggcgaaggcaggagaggaatgttctaggctgtgcagacgagagctggagtgtggagagacacatgacttggtcagacaaacctgggttcaaatcctggctcctcccctgcttcctagctgtgtgacgcagggcacacagtcaacctctctgtgctgccgtgtcttcacctcagttaacagccactgtctcgtcaggatgttgtgtaagatgaggtatctggaaacactccccacaggaccccgttttcagtgagggctcagaaagtgtttgctgaatggctgtaaagagcgttacctgggtctcatttcggagcaagtaaacatggcctttgttttaatatttgttaagtccctgccgggcgcagggaggggtgaaagtttaggctcttgtgccccaaaacggcccagccacctggaagcctccaggacgccacagctgagagcaagcgaagatcctgggccagggtcaagggaggctgcccacgggaaggagaagtcagtgctaggcttggagacagatggagcttggctagggcttgaggagccgggcagaagttctgagtggagggcacagctaaggtagcggctgggaggttatggctggcccttcccacctgcagcgtgggggtgggagggaggggagagggaggcagctcccaggagtcgaaggcccccaggggcaggtccaacccagtctctgctcagcttggccttaacggcggcacccccagatctccatccagttcctggtgtacaggcgcagcaccgccgcctcggagcttgagcccctcctccccagctgaccagaaccaggctgagcgcaggaggacaggcaccaccggatgcyacaccaggcaggaggaggtgtggacagtgatggtacggcggccctgcatcagcctgcgggtggcctctggatcctccgtggaccgaaccgtccccccaggaacacaccttcaggtagaccccraagcctcaaggccggggctggagcggagaccccagggcctctcaggagacagtgaggctgcccctcctaccacctacctcattctgcctactcaccccaggggccacagccacagcctgctggactcaggactgtcctgtcaactccagacaactgaataaacaggccgggtacagtggctcgcacctgtaatcctagcactttgggaggccgaagcgggtggaccacttgacgtccgtagttcgagaccagcctggccaacatggtgaaaccccatctctactaaaaatacaaaaattagccaggtgtggtggcacacatctgtagtcccagctacttgggaggctgaggcaggagaactgtttgaacctgggagacagaggttgcggtgaaccgagatcgtgccactgtactccagcctgggtgacagagtgagactccgtctcaaaaaaataaaaaagataaccgaggaaacggtacctccccatgagacctgcttctgttgctccttccccaaggtgctgagggatcggggctgctttggggaccagcggtggatgtggatggggattcaggacgagctgagcagaggggaccgcatctgcctgcagccctggcccagcctcctggggcctctggtttctttagcctgcttctccrggccctttcctgacaggccccacaccttactgtggggacatagcagggagagtgactccccacggggagcctgcccctcggtgttcaggaagaagcagaatggttaaggttctgttggatctgggttctccatcgcagttcctcagtgcctagcttatctcatctgtgaaatggacagtactgtcatttcctgtgtcctttcaaggattacataagatgctgacattatggagtttagccccagatctggcgcatagtaagggctcaataaaggttagttttgaggacttttagttggagaagaggagcaaccagatcttggagatcagggagagcctcctggaggaggtgataggtcagaaggatgagcgggagatatcacagggaaagagggaggattgaaggcaggaggaagaagtggcgggtacaggagcaaggtgggagagtggagaggagggcagagctgagctccgagtgcttcctggacccgcaaactcagtgttgtccagaccytgttttatttttaaaattttttagcccaggccggagtacagtggtgcgatcatagctcactgcagcctcgaactcctagcttccagggatcctcccactcagcctcccgaggagctgggactacagatgagcaccaccatgcctggctccagaccctgttctgattccactttcctgggggtcatgaccctcaggtgcctggagcacagagacgccagctccccaccttgttggcctgatctcaccccacacacccaaccctagctgtggaaaaccagaaccagggacttggggtatctggtggggtagtcttggggagagacgctgcgtcccagagtgggccttgcctttaggatctcccttcccagccccggagaagggaaacggtgccatggccattctggtgccgcagatcctttgtgagcacagccctccactcagcctttgctgtgtcagacaccggggctgtggtgaaccagctccaaggccctgccttccaggagaggagatggttaccatgaccagaaggtagaaatgtcaggaaatgagcagatgagaccagccccaggagggtcaatcagggaggacttctcagaggagtggcctttgagctggatcttgaaggcagaggggagggcagttcaggaaaagggaggggcaggtacagaggcctggaggtgggtgtctcgggtgcttccaaggtggggctgcttacaaggagccttgaaagccacaccaatgccaaggacaaggtcctggggcacacccagcagcagcccagcagcaggtgatggggtttggtcgggtgaagagccttttgctagagagaggaggcaaggcacacctctgagacccaggtgggcagagagggccagtctcccctgccctgtccccctaggggacacccacggagcccaggatgccatctggcatgcagctgttagttgcacacttgccatgtgcgggctgcgccgcctgccatcagtgcacgagatctccccgtcttcacagccagctctgagatgggggagtttttatttttttttgacacagagtcttgctctgccgcccaagctggagtgcaatggtgcgatctcagctcactgcaacctccgcctcccgggttcgagcgattctcctgcctcaacctcccaagtagctgggattacaggcgcctgccgccacgctcagctaatttttgtatttttagtagagacggggtttcaccatgttggccaggctggtctcgaactccttacctcaggtgatctgcttgcctcagcctctcaaagtgctgggattacaggtgtgccaccgcgcccggccaagatgggagtatttttatggccattttacagatgggagaacagtctcagcacaattgagcagcttgcccagctaggagcagcagcaacacgagaccctccagctttgggagccaccccacacctggccaacgctggcggcccgtgtccccttcctccatccttgctgggggcccatggcttgtggcagttcagcttcaccctcaggagtggcccgaaccctgctggacccaggctcccttctcaccatcctgaatagcgactttgctgagcctctggccctgccgagatttcaggataagttacccccaggcccgaagccccagcttgccctggcctgtgcctgcctcaggtgccagctagatgtctcgctccacctgggtctgggacctggctccacaccagttacctgggaccagtaggtgcccttccagcctgaagatctgggggcacagtatagccacatgagccccaagtgtggtcctgaactggggccgggtggggaagagtgagatgggataacatagcccctgcttggaggcccttctctgatggggtgacataatcccttcctcctgggaaacaccagcttttggggtgatagcactttcaggcaggagctatggttccttcctcaggaggcctccaatctgatggggaagacatggcccctccccctggggagtgccctgtgtgatggaggygatacagcccctaccttcagagagcacctggcctgcagctcatccaaacctgagtctcctctcccttggaggcctcattccagcgccccaaggaggattcaaactgttggggctggaagaacttggtggcctgggtccctggagccctgttgaaggagctggtgacattctgatgctggaggcaggtgacggggagcacagactttgtgtcctgcacactgagctccaagtgtgccccagccactgagccttgtgacttgagcagatgtccgaagccgtttcttcatcccatgagaccaryaayactgtcygcctcagaacatagccgtgatcaagatgagcacggaggctcgtgtcccagcacctggcacacagtaagtgcctggtaaataaacaatggctatatttgcttgtcatcagggggcttaccaatgcctggaacctcccccaggttcctcacaaagagaagggccaaggccgggtgcagtggttcacgcctgtattcccagcattttgggaggctgaggcaggaggatcacttgagccaaggagttcaagaccaacttgggcaacatagcaagaccccatctctacaaaaatttaaaaaattacaataaaggcgaatctcatcgatgggattctgccatactgatggggccatgtttgctgatggtgggcaaacatgttaccaagttaaacgcctccacaggtggcttccctttctccctggcttacacctcctgctccttcctgcaggtcatgggatggcaggatgcttgtctccaggtgtggcctgaagggaaaagtgtggacagtttggtgtgatcaaggaaatggaaccacgcttaccagttgcccttgtccaggaagggctggctcccttaggacgcccacatggagcatgaggttgggccaggcacccccagaggtccccgccttggcaggttctgttttacctgttgaacgagacactgtatggggaagtgacatgcgcagtgcctggcccagtgctgtgcacacacgctgcttcgcttcctcaggttccggggatgggatgggacagaaaagctggttgcttagctggtggcgttctccagcaaagcagaagggatggtcctggcagccctgtgccgagcactggaccccgcgccctccctggctctctcagccccaaggtcccattagttatcaaacctggttttttgtttttgttttgagacagagtcactccgtcacccaggctggagtgcagtggtacgatcttggcttactgcagcctccacctcctgggctcaagtgatcctcccacttgagtgccaccacgcccagctagtttttgtatttttggtagagatggggtttcgccatgttgcccagcaggctgttctcaaactcctaagctcaagtgatcctcccacctcagcctcccaaatttgctgggattccagggttttgaagccacagccaagacgacatggccttccattcctgaagccgaggaaggggagaaagccacaaccttcaccactctccaccctttctgtctgtgtgacttggctttcatcggagctgaatgacgggaccccagaggtgccgggtgacagccaggtgcagagcctcaactaccccagatggtaaagctttaaactgatccactggccaggtgaggcgactcatgcctggaatcccaacactttgggaggctgaggcaggtggattgcgtaagctgagttcaagaccagcctgggcaacgtggtggtgtgcacctgtagacctagctacctgggaggttaaggtgggaggattgcttgggccctggaggtcaaggctgcagtgagtcaagacagcaccactgcactccagcctgggtgacagagaccttgtctcaaacaaaacaaaacaaaacaaaacaaaacaaaacaaaacacaacacaggaaaacctggatctgcttagcattggccctagggcagggagtgggttaccttccaccgtggattaactcagttcaactgataactactcctccaggcccccagcctgggacagccctggggacacagtcacccagtagcagcactgtgcccagcacaggtaagcactcaataatgacgacggttactaagtactccacccccaccaaacagtaggcagagactgtctctcctgttggccatcataaccccagtactcagtaggcgctgaatgtttggtgaatgagtaagtgaagggaaagctgaggcaccaaccctcagggagccctcagtctggtggatgtaaccaacaaccacagaactacagaactgtatactttagatacatgaattgtgtggtatgtgaattatatctcaaagccatttgaaaaaataccaaatgtgccattaagatttggatgggaagttatgggtaatgagaatataatgacatcttgcaacattatattgagaaaaatacaaattgaaatgttttatcttatatttaacttacatgatatttaatttacaggatttaacttatagtatttgaaatgaggcgtacttttttttttctttttttgagacagccgtgatgtgttccccaggctagagtgcagtggcacaatcatggctcactgcaacctccgcctcccgggttcaagtgattctcgtgcctcagtctctcgagtagctgggatcacaggatgcaccaccacacctggccaatttttgtatttttagtagagatggggttttgctatgttgcccaggctggtctcgaactcctgggctcaagtgatccgcctgccttggcctcccaaagtgctgggattccaggcgtaagctaccgcacctggccaagagagaatgtcttcattgtcccagtgtgggtcatgcacaggggaggagggagtgtcctgagtgtactgtgcccaggtggcatgggggcggtttggcaccagaaaaagaggagctgtcccacctagcaaaatccacaatgcctgcatcaccccacctgctgagagagtgccacaccctcgggtgcaactagcccagggcctgccacaaagcagttacccagaaagtaatctgaatgcaggagaaaatcttgggagactaggagtcttgaacctggggccccaggagaacctcaggaaaggcttcagtctgggcgcagtggctcacacctgcaatcccagcaccttgggaggccaaggcgggaggagggcttgagctcgggagttcaaggctgcagtaagaccactgcactccagcctgagcaacagagcgagaccctgtctcaaaagaaaaggccaggcacggtggctcacacctatagtcccagcactttgggaggctgaggcgggcggatcacgaggtcagaagtttgagaccagcctggccaatatggtgaaacactgtctctactaaaaatacagaaattagtcaggagtggtggcgcatgcctgtagtcctagctacttgggaggctgaggcagaagaatcgcttgaacccggaaggcagaggttgcagtgagccgagattgcacctctgcactccagcctgggcgacagagcaagactctgcctcaaacaaacaaacaacaacaacaacaaaaaacggctctggacaacaacaacaacaacagactccggaggctgatttgttaaggccaagcaagggaggaatgaaagggcttcagagagacagggaccccctggattacccacttaagccctcagccctggagagaccctcaccaaggctgcctccccttctgttagttggcaccaaggggacctccaggaagcatctagtgagcccttggggtgggggacatctctgctgctgccaaaccccaggagtctgtagcctgcagcccatgaaccccaggggctcccatacgccttcgttctcttcttagggatgcccgaggtgccctgctggaccccagagctttcctcaccaggcagccaaggaacgagcagggaaaggcatggctgggaagtgggagagggtcaccaaacacatcctcgaggcccactgtccccaatctcaccagctgagtttagcattaaaacactagcagtgagggctgtgtgcggtggctcacacccgtaattccagtactttgggaggccaagttgggggagggatcgcttgaattcgggagttcgagaccagtctggccaacatggcgaaacccggcctctactaaaaatacaaaaattagctgggcgtggcggcgggcacctgtagtcccagctacttgagaggctggggcaggagaatcgcttgaagctgggaagtggaggttgcagtgggccgagatcacgccactgcagtccagcctgggtgacagagcaagactccatcataaaacaaaacaaacaacacaacactagcaatgagggctgggcgtggtggcttacacctgtaatcctagcactttgggagactgaggtgggggatcgcttgaagccaggagtttgagaccagcctgggcaacagggtgagggcccgtctctacaaaaacaaaaaaacccaactggtagtgagggtccctgtggaagattctagatagcagagcaagatcaggcctgtcatacatcgcagtcacaatttctgggtttcaagcattatttttggtcccaggattgtacggctgatgaaagtgacagctcaaggagcaactggtgggtttcctgaagggaaatcccctgagaggagagcgggcctgagcctccaggggtgactctcaggtgagtcagagtccactccacctctgcagttctgtggaattaccactggcgtgcacagcagctcccagcctagcagcctctgctgcaggacagcaggcctctgctgtggcgttcccggtgtgcctgtctcactgacttcaggggtggctgtttttcccttgcgacctcagctcctctcatgtgtccaaggaaaggcattttccatttgtccagtttcttcttgaagtgacaactgccaaagattatttgcttggccaaactttagtcaggctcctgaaccttcccctaggcccacctgtgtgcccttgtaaaatccagtttcagcaatcccttgctaagtcaattttacaaaaacggccatccttgatattttttttctttttttgagacaggatctcactgtcttctaggctggagtacagtggtacgatctcggctcactgcagcctcaacctcccaggctcaagtgatcctcccaactcagcctcccaagtagctgggaccacaggtgcacaccaccacgcctggtttgtatttcttgtagagatggggtctatgttaaccaggctagtctcaaagccctgggctcaagccatcctcccaacttggtctcctaaagtgctgggatcgtaggcgtaagccaccacacctggcctcatcctccacccccacccccaggtgatgtctggtcaccctggcctgtcttcagcaagaatcctgttaggtgtgtttggccggaagacccctgacccctgaggtttcctctgagtcattttccacccactgcccccctctgctccttggctctaatccccacctgcccgtgctgctgcactcagagttgagcccaatctctctccccatccacaagaccccactgcagtggcccctgtacctaccttgatgatcctggataaaactttaccatgaaagaaaatgaaaagcaaaacatttgtttttccagccccttctgtgtgccaggcaccttgccaacatgaccccgggaggctgcagcacccgtgtgcccatggggaacagctcgctgggcccttctgtgtgccaggcaccttgccaacatgaccccgggaggctgcaacacccgtgtgcccatggggaacggctcgctgggtgcatcccctcatggctcacggctggagtgtgcctgcgttctccacgtggcactaggaactcagggggcaggggcttctctgctgtctgtatgccatggcacttgcactccataaagatactgcatcggccgggtgcggtggctcacgcctgtaatcccagcacattgggaggcgggagggtcacctgagatcgggagctcgagaccagcctgaccaacaaggagaaaccccgtctctactaaaaatacgttagctgggcatggtggcacatgcctgtaatgccagctactgaggaggctgaggcaggagaatcgcttgaacctgggaggcggaggttacagtgagccaagatcatgccattgcactccagcctgggcaacaagagtgaaactccgtctcaaaaaaaaagatgttgcatcagacccagggacctcaaacacatgggctggccaggttgtggagcccgctgattggccacggacagatggggggatggtctcggcagggactttgagatctgcttcagatcttccctggggcagtttgga

SEQ ID NO: 98201 - DNA, 179339 bp, Homo sapiens
ggtgctgacagcaggtccatgtagagctccagtgccatgttgagacacatgccaggccccacagccgcagttggccagccacagacctgggcctatgtctggccagagtccctggccctgtgccctctccgatctgggcccaggatcctgtgttccccagggaaacctcttgtttccctttgtgttgtcataaggccaggaagcctgcaattctcacagcatcaaggattctaaggaggcccaggagtaggctggggagaggcccgtggcaaaggtgtggcagccgtgaccctactctcccccttccacgtgtgcctgtgccccgtggtgccacctcacagacaccagtctgagaagggattatgcctgggaattcccacggctggattttcattgcagaacctgacgaaaggggctttgcagggtccagaatgaagaggaggcaatgagaattatccctggaggattctagaagtagaggctgggagtatccacaggtaaatcgagcctgaactatgactagaaaggaattgggagaaagagacacaggtgaatcgagcctgaactatgactagaaaggaactgggagaaagagacacaggaaactgtgagctttgggagcaatggggacaccaccaccaggaagtcagggggcactcagccggtgtgtgccacacagaggagcctagaaacttcctggccttggttggggctgcagtggccagactgtgtacctggtggccaaggaaggtaactagagccccacgtagaggactgagtgccactcactctatgctgtgatctaataggtctaggctgagaaatgggactgaccccacttctggtgacagagtaagcctggagacaagcgaagagcatgcagtgtgtttattgcagacagcagggtgcagtggagtgggctgcacccactgcacctgcttctgggccagctgggggtcccgccaagcctcactgtggttcagaggctggagtatgagcttgtgggcctccagcaagagctcagtaccaagggcagccgccacacgggcctgccacactgccagccggggcagtcttggaagaggtcgcagccaacggcagtgggctgggaagacagggcagctggggttggggctcagccccatgcccagagtccccccagagggcaggtgggtaggaaagcttcacctgcatcacctccgtcagcaccaagtcttccagggagatctgctccattgccaggaagggcctggccaccagcaccccccaatccaggtgctgcagggctggcatcagcctccccaacagccgctccagctgtgcagcatctgcaggctgtccggagaagtggggcaggagagactgggctgggaggagaggagcaacttaacccagactcttggaagcctcttgggcctcctctccatcccttcccggctgccactcattagtgatgtcctctggggctctgtgttcagaaggtttctaaggattcattcaggcttaggggaaggagtactgtgatagattagttatgtctgctgaggacagtggaagtgaagctaatatgtaatatgtaccaactggtgccttccatctctgggggtccaggcccctgccccagcctgcatgacagggcctaggaagctcaccttgcacaggtagacattggtggcaggcagctggatggtgacatgcttccacgccaagtactcatccacgcaggtgcgggcttgcagctcaggtgggtaccagtgtccccgtatctggtactttcgactcaggtataaaacgatgaccatgctgtgggcagggggtgtcagagatcttttctccagcctgtcagggccaggtggcttcattgctcatactcagggtgatttgaccaggttttctccccaccttcaccttcaggggaggacctcccctatactgcaactccctccaggcagtatctccccacgaccaaaccactctgtttctccatttccaactctgatcctccctgggcccatgtttccacctcccctcccagttaccataccatcctgccctctgtgcccaggccccactccctggcatcagggtccccactcagagtgcctgccgtgtgggccctgcccaaaaggtctccaagttcccttcctagtgccccagaacactaggtgcccattttctatcctcaggtaagccctgggaggtggatacattattcctcccactccgttttacagaggagaaacctggcacacaaagttctgtgatttccccaagggcatggattgaggaagtggtgagctgggattgaatgtggagtctcccctgggtctgcccagctcctaggactctgaaaggatgagctggggacatttggggaggagccagcctcaagcctgggccttgcccgctggcttcaggttgtccaggtttatccgggtgacctacgtcctttccccacctgggcagctccagctggctcagactctagccaggttccagcctccagctttagcccaaaggtgcccctgggtccagcctctgcatcggagctacacaggctgaaatgaggaaggggcctcagtgatttggaaagatctccaagccaaggaaagatctcccctctcgcctctgcctccccctacaactctgagccccagaacccaggcagatcctggctctgaccctgggtgggcaccaggtcaccattacctctttgctagtaggaagtcgccatctctgagggcaggcaccttccccagggggttcaccttcaggaactcaggcttcaggtgctcccttggtgggcagaaaggagagaaggctcagtgtagggcctggtccttggcacccactccatggggcccagcccagccacctggctcaccccaagccaactccaccatccacagctcaaaagggatgtcattctgtcttgcaaaagtggatagtgtgtcaggtccaggaagagctcaagccccattgctgctcctctcacctgccctccccagaattctggacctccaggagttgctcagcccttctccactagttctgagctgtttcctgtccatagtctgctgtagtgggccagagcacagggcagatttgtcttcagggactttctctgggcattcctgggcagagaacttcatcttctctgttaactcttgctgataattctctgtagctaggcaccttgtaaaacccatgtcccagaatgccaaacctggaaatgcaatgtcagcgccgaaactgcattgaaactgaatgaatgaggtccccaccctcttatctaaatatcctatcagtctgttgaatgtcaaagtatgtaggggtggtgtgggggagcctatagggagtctccatttctgtagctttccacatgttccatgcagaattttcctctaatgacccttggacaccgtggtggtcactgtttccctgcataaacctttgatgatccttatctttagcgtaccagtgaaacaccaaattcagattttcagtctgtgcagtctatgtagttaataaaatcaatttctaatggaatatgcctgtgcctggtgtgtttgtacctaaccactgctaaggactttcattgatagctagaccttggagttccttcccctggacccctgacccaagtattttgcactcattcctctgccagtgtgtttcatggtgtcctgcttcccagagtgcctcagggaatgcttgcattggatataaatgaatcgttgcggtcaccatggatgggattcaggcctaactctcaccaagaccataaggccacagtctttgatatagattccccatgttaaatctgccatcctcagtgtagtgagagtgatattgagagagaaaagttaggtaattaaggtgggtccttggtaaaactcctttaaacagaggaacagcctgaaaaatcaggcttcaggcacagataaggaaacttgcacaaacctctggctcactcagataaaggaacaatgcccaacacagaaacacctttgatctttgtgcctaaggcatgcccacagctactttgataagggaacaagacccagcatagaaatgcctttgtcctttgtataaccagtgggcttccaggaaatagtctcttctccttttgtggacatgtacacggtgggctacagtgggttccagtgggcactttcctttcttggacgtgctttagaatgtgagcctctgattggtcctgggccaggctatcacttcagctcctgattggtccctcaaggtccaggggccaagctgagtagtgctttctccaagaccagtcagtacattccttcctttcccagtccataaaaccccctgacccagcctcataatgggcaacctgcttgggccccccgccagctgcaatgagctttcttcatttgcttattaaacttttgcttcaaccttaccctttgtgtccacactccctaattttcttggtcgtgagacaaagaattctgggtgataccccacaatgagagactggtacattgtggtgcacgggcaagactgcaacaatatgttttctgcttgcttgtttggactggcctcttcctaactctccagagtgctctctccccactgtggccctgagctttgcctcacggtaacactgtgctgcatgacactccagcatgatctgcatgtttctcacctccggaccttccccacacaactttcttgctgcttggaccacccttcccacctattttcaactgtttctctccagcgcatctttcatgataaggcttgagtggaagctgtatccgaggctgaaggttatccatgcagctttgaaaccatctgtttatgcttctgtttaccccccaaatactgtttaccccaatactcaaagtcaaggttggtgactcaacaattttcagaacttctagcttatcagtatagctttattgtactgaactgagtttttcaccatgctgttactgtctttgaggttaaaaagcccccaacattcactcctatttgaatcatctgtgcaagactcaagcagctatgaattcaaccacagtgtaaagttcttccctacaatgctttattgttattctagctcccaagagagtaccatctttcagcccaagacccttgacagaaccccttcaactctgtcgccttttttcatctctggaattctgacaccacccatgacccctcttcttgttcatttactaggttttgttcctttttttccttttgtttcaatatcctattgtatctgttccttttgggcttcacatcctttttggaaagagaggcacaggtaatataatgaatgaggatgctcctcctccctggttccctctaagtcaagtttctccaacgcgctggtctgcttggctttgaatgcggctcaacacaaattcataaactttcttacaacattttgagattttttggtgatttttatttttattatttatttatttattaacttatcagctatccttagtgttagtgtattttatgtgtggcccaaaacaattcttccaacgtggcccagggaaaccaaaagattggacaccccgctctaagtgttccccaagtttccactgttttcagagcacatgtcccaggtaataacacacagcccatcatttagtgactgctcagggtgcaagctgtggagaagagagtccgactacgagctggtgctctaagcctccagcacgctaggactgacgacggggatccggaaacaacaagctccactcccgcaacacacacacacacacacacacacacacacacacacacacacacgcacacgcacacgcacacgcgcacgcgcgcacacacgcgcacacacgcgcgcacgcgcgcgcgcgccgcccaagggtagccgtctgcagggccccagctaagcagcccgcggagagcgagcggcgcgtgcgcccccgctgattggctggcacaaccggcaccggagccaatgggagcacgccttgttgtcaggcgcgcagccggacggcgcggtggtcgggacagactggccgttgctgtggagacgcctggtgagttcctggaaggctggtttgaaggcggtgccggggtgggggtgaggctcagcagagcccggggcacaggccggaggggctgcaggcgcgaggctgggttacgtgaggaagctgggggtttcgcgggcagctttagagccccagtcagggaaaccgaggccgggcttcctggctgcctcgcgagcctcttcatggctctcgccgccgccctgaggtgcctagaatgggttccggcctccggggaggttcccagtaaccgcaggagccaccattgatttggcgtctgctgggtgcaaagcccagcgcgctaaccctttactcgcgacctttcgcttcaccttcacagcagccctgcgaggtgagtgttgttattggtgccatttacaggggtggaaactgaggccgcgggtaggtgaaatgatttgctccaagtcacccagtgggtgagcgcgactccagactgaaaattttgaccgttctgcttcactgcctccccgcaagaggcgggccctggccagatggaactcacctggcattcccaaggtatctgcacaagtggctttgggagtcacttaactcttcaggacctgggttattacaggttataagtgtgggaccgtcggattccatgtggctaagattctttctatgtgattattgtggttagaaatagaatatgcttagaacagtctcgttcagcggtcggcaaacttttgttgtaaatatatcagtgtttacattgttatattgtaagtataatgagtataatagtattcataatagtagtttaggcttggggggtccatactctgtctacttaactgtagcgatgtagtgtggatacagccaaagacaatacataacagactagctgcgtcgcaataaaattttaattatagggaccgaagttttaattttatatattgttaatataattttcacgtgtcatgattttttttcccaaatatgaaaaaatgtaaaaaccattctttgctcgtgggctgtacaaaaagggtgggctggttagcttgcagaaccctcatctagtacaaagcctcatacatgaggggaaacagactgagagactgacatctatgtcaagtcagtcacacagccagggcactgccaccactgagcttaagacataggcttcccaccttccaggccaggaaacatccccagttatcactctggatcagggtgctgaggtctgaaggtgtgctactctttatcgtgttctgaggccatggaaactatattctaaggggtttggaaacttattagcttagactaataagcctggtgaatgtgctgctatctgaggaaatgcagctgctgggctgggagtcagaaatgaatagatatttttctttttcatgattattcaatagcttttttgtgtgtgtgtgtgacggagccttggtctgtcgcccaggctggagtgcagtggcatgatctcggctcactgcaatctccgcctcccgggttcaagcagttctcctgtctcggcctcccgagtagctgggactacagacacccgccaccatgcttggctaatttttgtatttttagtagagacggggtttcaccgtattggtcaggctgctctcaaactcctgacctcaggtgatccacccgcctcggcctctgaaagtgttgggattacaggcgtcagacaccgcgcccggcctcaatagcttttttttttttaaaagctccttttagtgagtttcttggatttatggtgaacaatacataaatggttaccatcctcacattgcttacagatgataaatatataatcaaaatggttatttctttttaagctttttttttttttttttttgagatggagtctcgcctgtggcccaggctggagtgcagtggtgcgatctcgcctcactgcaagctccgccgcctgggttcacgccattctcctgcctcagcctccctagtagctgggactacaggcgcctctcaccataccctgctagttttttgtattttttagtagagacggagtttcaccgtgttagccaggatggtcttgatctcctgacctcatgatccgcccgcctcggcctccaaaagtgctgggattataggcgtgagccaccatgcccggcctctttttaagctttttaaactaattttagatttagagaaaaattgcaacaatacaaaacgctctgttatgtccttcaccctgctttccctaatgttaacatcttacataatcatacaattatcaagaacagaaatctagtgttggtacagtattattaactacattacagatgtgatatgaatgttaccattttttaaattaaggttgtgttttcattccaggaccctatccaagatcccatgttgcatttagttatttctccttggtccataacacttccttagtcttttcttgttttccttggctttgatgcttttaaagagtagtgatcagttattttgtctaacgtctctcaatttaaaggtttgtccagtgttttctaatgattggggtgagattatgcattgttggccagaacacaaagacacattatctttgtgtctttctcagtgcatcacatggagtccaagatattggaatgtcttattactggtgatatttaccttgatctattggtttacttggtgtctaccaggtttctacaccataaaattactatccctttctaattaataagtctcttgggagagatacattgagaggacacaaattctcgttctccacaaatttgctccctgactttagcatccatctgcagatctttgtggtgtttgcctaaaggtaattatttctctctttccttctacattattaagtcaagttctactgaaaggagaactaccctctctctcttttatttatttatttgattatttatgtgtcagtgtaggccatggatatgtattatattctatgagttaaaattcattatcatcattattttgttgcttactgttccagcattggctatttagttaggatctccttcaggttagcttctgtggcctatcaactggccctcatttttttttttttccttcaagcacttactttatggcacaccacaaggtgttccaggctcatcttgtgttttctctgacccaactctggaatcagttctttttgtctttascctatccagtcaagataccattttctacagttacttaggttagttcctttcttcctcatgcctttcagagtggttatgttagttgtaatagttaggttcattgttagtgtttatatttcattttgagttccccctgcatcctagctgattttagttgtttttgcggtatgaattatgactgatttctgagagtcagagctacacacaaaggtatactcagagaagtgtctttcccttcttatgcctactgccctgttcccattcaccccttcttttcaccgctttcccacctaccctgtatagctaactttggtatctggattatctcgtgtttctttcgcacaagtgaacagttagttgtgtattttttcacatcctcttctttcttatacgaaggtgacatgctatatagataattgtgtttgcttttttcacttaatagtatgttttaggccaggcgtggtggctcatgcctgtaatcccagcactttaggaggctgaggtgggcagattgcctgaggtcaggatttcaagactagcctggccaacatggtgaaaccccgtctctactaaaaatacaaaaaaattagccgggtgtggtggtgggcacctgtaatcccagccacttggaaggctgaggctggagaatcgcttgaacctgggaggcagacgttgcagtgagccgagattgcaccactgcactccagcctgggtgaccggccgagtgagaatccatctccaaaaaaaaaaaaaaaaaaaaaaaagaatagtgtgtcttgaaaatcaccccatatctgttcatagagatcttcttcattctttttttttttttgagacggagtctcgctcttttgcccaggcctgagtgcattggcgctatctcggctcactgcaagctccgcctcccgggttcacgccgttctgctgcctgagcctcccgagtagctgggactacaggcgcccaccaccgcgcctggctaattttttgtatttttagtagagacggggtttcaccgtgttagccaggatggtctcgatcttctgaccttgtgatccgcccgcctcagcctcccaaagtgctaggattacaggcatgagccactgcgcccggcccctcattaatttttaaaaacatctttattgaggccaggcatggtggctcacgcctgtaatcccagactttgggaggctgaggtgggcagatcatttgaggtctggagtttgaggccagcctgaccaacatggtgaaacccctttctactaaaaatacaaaaaaaattagctgggcatggtggtgcatgcatgtagtcccagctacccgggaagctgaggcaggagtatcgcttgaacccgggaggcagaggttgcagagagccgagatcgcgccactgcactccagccagggcgacagggcgagacccggtctcaagaaaacacaaacaagcaaaaacatctttattgagatataatttacataccttacaattgaccgatttaagtatacaattgagtggtttttagtacatacacagttatgcaagcatcatcgcaatacattttagaacatttttatcacccttaaaagaaaccctgatccattagcaattagcagttacttcccatcctgtcttcccccagctctaggcaaccacaaatccactttctgactttataaatttgcctgttttggacatttcatgtaaatgggatcatacaatatgtggtattttgttactggcttcttccacttaggataatgttttcatggttcatccatgttgtcagtgtttcattatttttatggctgaataatattccattttatggatataccaccttttgtttatccatttatcagttgatggattttgggtttctacttatgcattattttgaattatgttgctatgaacattgcctcattaatttttacagctgcatagtacttcattacatgaatgtaccatagtatgtaccatagtacgttataatagtttattcatctactctcctatctatggccatttaagctgcttccattatcttgcagttacaaacagtgctgcacggtgaataattctgtgcatatgtatttttgtattgttggaggtacatattcagggtagtttctagaagtggaattgctgggttgaaaggtaaatgcatatgtagttttctcagatatagtcaaatttccctccagaagggttgtaccaatttccaacagtgtatgagaatagcgcctgtttctccacaacctcgccaacagtgtgtgctgtcatgctttaatttttgcagtgagaaatagtgtctagtgttgttttgttttaatatgcatatctctatgaatgatttgaacattttttcatatgttttagagctagttgcgtcttcttttgtgatttatctgttcgtattttttctccatttgtctaccaggtttttgtttttctgttctttagctttttaaaaaaaattgtgataaaatataagcaacatacaatttatcttttttttttttttttttttgagatggagtctccctcaccaggctggagtgcaatggcgcgatctcggctcactgcaacctccacctcttgggttcaagcaattctcctgcctcagcctcccgagtagctgggactacaggcgcgtgccaccatgcccagccaatttttttgtatttttagcagagacagggtttcactgtgttagccaggatggtctccatctcctgacctcctcatccgcctgcctcagcctcccaaagtgctgggattacaggcgtgagccactgcgcctgacccaatttatcattttaaccattttttaagtgtgccattttgtgccattaaatacatccacattgttatgcagccatcaccaccatccatctccggaacttttttcatcttttcaaactgaaactctgtatccattaaacaggaattcccattcttccctcccctagccctgtggccactattctactttctgtttctatgaatttgactactgtaggtacgttatatacatggaatcgtacaatatttgtctttttatgactggcttattcgacttactgtaatgtcttcaaggttcatccacgttgtagcatatttcggaattgccttcttttttgtgacatgtgtcaggattaccttcctttttaaggctgaataataaatgtttcattgtatgtatatactacattttgtttagccattcatctgtcatgaacagttgggttgctttcaccatttttttttttttcttagcttcagcttaaaggaggccacctttcgactattgtaagtaatgctgtgtccctcagttgtaaaacgttatttatttatttaaaatagtatggtgctcttgtcacccaggctggaatgcaatggcgtgatcacagctcactgtagcctcaaccttctacctcaactgccctgagtagctgggactacagatgtgtaccaccatgccctggctaatttttaaaktttttgtagagatggagtctctctgtgttgcccaggctggttttgaactcctggcctcaagcaatcctttcacctcggcttcccaaagtgctgggactaaaggtgtgagccaccatgcccatcctgtttctcagtttttaagagctgtttgtatattaggggtattagtcccttgtcagtggtatatgttgcaaatattttctcccaatttgttagcttttaattttttttctgagtttttaaatttttttttgtcatgcaaaaatttttaaatttttatgtagttaaatgtatcactcttttactgtttgtgaattttaaatcatatttggcccttctctactacktaatactaagtgttaatacaaaggttaaagaggmattcaccagtatctcctttagtagttgtatggtttcattttttatcrtttagatttctaattcatttgcaagtttattcttgtgagttatctttttccaacagtgaatactgttccagcagtatttaatacaaagttcatcttgactctagtgatttgagatgccatctttgccatattttttatttccatatgtacttgagtctaattctggacctcatctttttgtgtacatatgcagcagtacctcactgtttcattatgaaggctttgtacagtaggttttaatgtctgttatacctatccccccttacagtttttttttcattgttttcctagtcttaaatttttgtttttccatatgaattttagtatcaacttgtcaatattatcttgtcagtatttgtattgggattgcattgaatgtataaattaacttgggaagaactgacatctttatatttttgaatcctatccaggaacaggggatgtcatttcatttgttcaagttaactttagtgtcttttaatagtgatttaaactttttcttgcacagttttaattaactttattcctaagtatttaatgatcttgttgctattgcaaatgggatttttctctaccataatgtcttcttttatggtttgtatatatgaaggctattgatttttatgtattaatcttatattgtgcaacttcactgagtgttggtttttttttttttttttttttttttttgagaaggagtctcactctgtcgcccaggctggagtgcagtggggcaatcttggctcactgcaacctccgcctcctgagtttaagtgattctcctgcctcagcctcctgagtagctgggattacaggcatgcgccaccatgcccggctgattttttgtatttttggtagagacagggtttcaccatgttggtcaggctagcctcgaactcctgacttcttgatcctcctgccttggcctcccaaagtgctgggattacaggcgtgagcctgtaatttttgtatttttggtagagacagggtttcaccgtgttggccaggatggtctcgaactgctgacctcaagcaatccacccacctcagcctcgcagagcactgggattacaggcatgagccaccatgccccgcctgctgagttattattgaataaattttatcattgattttggggttttccaggtagtatatcatattatctacaattagtgatagcttttctttaccctttttttttttttttttttttttgagacggagtttcgcccttgttgcccaggctggagtgcaatggtgcaatcttagctcaccacaacctctgcttcctgggttcaagcaattctcctgcttcaccctcccgagtagctgggatcacaggcatgcgccaccatgcccagctaattttgtatttttagtagagacggggtttctccatgttggtcaggctggtcttgaactcccgacctcagatgatccactcacctcagcctcccaaagtgctgggattacaggcgtgagtcactgtgcttggcctttacccatttttatatctctaattgatttatctcttctaattttattggctaatattgcacaggtggatagtagcagagatagtggacatttttgctttgttcttgatattaatctctgaaattaatggacatgcctctgaaataaggtttgcccatgaaataagattttggctttaggactaaggtgtatttatatattaaagtatctcaatttctgtattttcctgagtattttttattatgaatagatattgaattttgtcagactttcccttctgtggagataatcatgtaattatttttcccttagatgattacattgtgttttcacatgtgatgtgtgtttttttgttagtatctattttttatttttttatttttgatacggggtctcactttgtcacccaggccggcatacagtggtgcaattactgcttactgctgcctcaacttctcaggctcaaatgatcctcctccgtcagcctcccaagtagctgggattacaggcatgtgccactatacccagctaattttaaaattttttttgtagagatgaggtctccctatgttgcccagactggtctcaaactcctgcctcagcctcccaaagtgctgggattataggcagattacagtcatgagccaccatgtctgtccgttagtatttctttaaatttctccaacattttcattgcatttccttttatctggaagttgtttatcaggagattctcaaatttttagatagacacacctttcttctgttggtggtgatggtcgtgttagtaaattctagttttaagcattatgattggcaagtgttgtttttagtatctttacttgatggaaggtgttttctttgtgacatgagcagtttttgtgtgtgtgtgtgtgtgtgaatgtgctgtgagcactggagaagaatatatcatttctgttatcaaggtgtggagtttgatatacatctatatcatctcctctgttatgttgtttagatcaatcatctgtctcctcattttttctccacttgatttgtctttaaaaaaattttttttttttgagacagggtctcactgtgtatcccaggctggaatgcagtggtgtgatcatggctcactgcagccttgaactcctgggttcaagtgatcctcccacttcagtctgctcagtagctgggactacaggtgcatatcaccatgcctggctaatttttattttatttatttatttatttatttattttagagatgggggtctcactatcttgcccagggtggtctcggactcctggagtcaaaggatcctccaaccccagcctcccaaagtgctgggattacaggcatgagccaccaagcctggccatcattttaaaatatttttgtagagacagggtctcactatgttgcccaggctagtctcgaactcttgggctcaagccatcttcctgccttggcctgccaaagtgttgggattacaggtgtgagccacagtgcccgatcaatttgtcttttttaaaaaattatttatttattattttttcaagagatggggtcttgctgtgttgcccaggctggacttgaacttctgggccttagcctcctgagtaggtgaaattacaggtgcacactgccatacttggtgcgtgatctgtcttgttttgagattggtttgaagcctctaatttttagggtgttactgtttatgtgtccttgcatctcctttgggttattctttgttttttgtttttgtttttgtttttgttttggagacagagcctcactctgttgccccaggctggagtgcagtggctctgcctcccaggttcaagcgattctcctgcctcagcttcccaagtagctgggattataggcacatgccaccatgcccagctattttttgtatttttagtagagatggggtttcaccatgttggccaggctggtctcgaatccccgacctcaggtgatctacccaccttggcctcccaaagtgctgggattacaggtgtgagccaccgtgcccggccagcatattcttgactgtcatatcatcagtgtgaattgtgcctttgttacatttaatacttttgggcttgaattctactttgatgtctatccctgtgctattttttttaacaaattgtatttccttttattagaatttttttatacttattatgtttaattaaattatttgaccttttttggagttatagttctgtgacttttgacacatgtgtagacttgttaccaccaccatcattaccactatcaggataaggaacagtccattgcttatggcacccctttacagacaccttcctttaccccgggctgcccctgatgtgttctccatcactatagttttgtcatttcaagaatgtcatgtaaatagaaatataatagtgtacaaccttttgagactggcttttctcacttagcataatgcctttgaaattcacctcagttgtttcatatatcaattgtttgttccttcacattagtagtagtattccactgtatgatatatcacagtttatctactcacctaatgaaggatatttgagttgtttccagtttttggtgatttgagtggagctgtaaacatttttatacaagttttgtgtgaacatttctctaggataaataactaggagtgagattgatgtatcatatgctagtgtatgttgagttttataagaaactgttttctagcatggttgaaccattttccattcctatcagcagtgtatgattcttccagttgctctgtgttggcattatcagtttttaaaaaaatacagctattttaataggtgcatatggtagctcatcatggttttaattcatatttctctaatgatgaatgaggttgagcatcttttaatttatttacttgtctttggtgaagtatctgttcaagtcttttgcccattttttaattggtctttttttattgtgccaaaatttgtataacataaaatttaccattgtaaccattttaagtgaacaattcagtgrcataaagaacattcacaacattgtataactgtgccactatctatttccaaaaaatttttatcataccaaacagaaactttgtgtttattaggcagtaactcttgattcctcccttcttgcaggctgtggtactttcagtctctaggtaccttgtatatcaaacaatatttgtacttttgtatatggcctattttacttaacatagtgttttcaaggttcattcatgttatagagcatgtatcacaatttcattcctttttgtgsctgaatactatttcattgtatttgtataccacattttgtttatccatctattggtggacacttggtttgtttctaccttttggctattgtgaataatgctgcagtgaacatgggtgaacaagtatctgttcaagtcctgttctttcaggtaaaaacctgagtggaattgctgggtcatgtagcaattccatgtctgactttttgaggaactactaaactgttttccacaggggctggaccattttacattcctaccagcagtacatgagtgtttgagtttttctacatccttgccaacacttgttattttccatttcctttctgttttatttttttgataatagccattctagtggatggaaatagtatctcactgtagttttgatttacatttcctggatgactaatttacaattccctgataagcatcttatgcacttacaggtgtttttatatcttctttagagaaaatgtcttttgaaagtcatttacctgttttttttttttttgagatggagacttgctctgtcacccaggctggagtgcagtggtgcgattttggctcactgcaaactctgcctcccgggcccaagcagttctcatgcctcagccttctgagtagctggattacaggtgcctgccaccatgcccagctaatttttttatttttagtagagatggggtttcaccatgttggccaggctggtctcgaacttctggcctcaagtgatctgcctgcctcagcctcccaaagtgctaggattacagacgtgaactaccatgcccagtcatttacccatttttaaattgacttgtttgtctttttgttgttgaattgtaggagttctttatatattctggatattaatctcttattaggtatatgatttacaaatattttcttccattgtgtgtgttgtcttttcactttttgatagtgtcctttgcataaaagttttttttttattatactttaagttttagggtacatgtgcacattgtgcaggttagttacatatgtatacatgtgctacctttgcataaaagttttacattttgatgaagtctaatttatctatttttccttttgtttcctgtgcttttggtgtcatgcttaagaggctattgccagatccaaggacatgaagatttttccatatgttttttcctaagaattgcttctctcttgctgctttcaagatcttctctttggttttggtcttaataagttgactataatgtgtctcaatgtggatgtctttgaatgtgtacttcttagagttcattgaacttcttggatatgtatgttaatgtctttaattggatttgaggagttttcagccattatttcttcgaataatttttctacccctttctctcttctccctcagatactcatatgatacatacgttagttttctagatggtatcccccatatgtccgtatgtctctattcatttttctttattctttttatttttctcacactggataatttcaattgcctttccttcacattcgctgaccatttatttcgcctgctcacatttgtttttgaattttcagttgtatttttagtcttcagaatttttgtttgatttctttttagaatttctgtctctttagtgataatctcatcttgttcttacattattttccttatttcctttattattttgttcatctatcctgatttcctttagttgattcagtgtatttaggacagttaatatttttgactagtaatttcagtgtctggtcaggaatattttctatcaaattcagtttctcagggatggtttctatcaaattcctttttcctgtgaatgtgccacattttcttttttctttgtattctttgtaatttttttgtttagaattgtacattctaagtattatagtatggataatgttggaagtcagatttctgactttttcttgttgagggctgcagccatcaatttttgactttttcaaactatttttgcaaaatgtattccttgttgtttgtgggcactgtagattctgttccattatttctttggtcagccagtgacctgacaacgatttccttaaatgtctgattcaaaaggggggaaaaggtgttccatctctttaaatcttctgatagaagccacctgtgaaaacatcgatagcctgagaaggccaaaaccaaggcaagtatataccagttctacagggatctgccagaccaaccaaagtgcacaaacccacatttttgtaggtttggaaccagccagccactttaggaacatgagctgctatccctatagccgtgagtggtggggccgaggaatgggggatggtagctgagtcaagttattcttttaccaaatatcagcagcctctgctcatcaaacgctctgctggttgttttaagtgttcagtcaggttgcaaagttttgttttgttttgttttgctttgtttgagacaggctctcactctgtcacccgggctgaagtgcagtggtgcaatctcagcttactgtagcctcgacctcccaggctgaagttatcctcccactcagcctcccaagtatctgggactacaggtatgtgccaccacgcccagctaatttatttttttgagacaggctttcactctgttgcccaggctggagtgcggtggcacaatctcagcttactgcagcctcaacctcctggactcaagtgagcctcccaacctcagccccctagtagctggaacaacaggcatgtgcctccacgcccagctaatttttttgtatttttttgtagagacaggttttcactatgttgcccaggctggtctcgaactcctgagctcaagtgatccacccatctctgtctcccaaagtgctaggattatagacttgatccactgggcctggactaattttttttatgttttgtagaaacgaggtctcactctgttgcccaggctggcctcaaactcctgggctcaagcaatcatcctgtgttggcctcccaaagtactgggattataggtgtgaaccaccatgcctggccaggttccagagtttgaaacagtagattttgatgattattttcctagtttactggttgttttggtggaaggactgaccttttcattcttgtagcagtgtcttttgtaaagcaagagtttttcaatttggaagttcagtttattgagttttttgcttatgggttgtgtttttttgtgttgtctgaaggcttgtctaaccctaggtttcaaggattttctcctgtgttttctttgttttgtattttatgtttagaaatgatccattttgagttattttttgtattacatgtgaatttttggtcaaggttctttttcttttttctttttgaatatggatgttcagttgttccggaaccatttgttgcaaagaagattctttctccattgaattgcctttgcaccatagtcagtaataaattggcyattttcatttgggttcttatggactctgtattttgtttcattgatttatgtgtctgttcatttactaacactacgctgccttgattattacagctttattgtaagtttttaaattgtgtagtgtgatccgtccaatattactattcttttcaaaactgggtcattctagtacctctctggccttccattaaatctttctgtcagcttatctataattacaaacagaccctgctgtgatgtttattgggattgcactaaatctgtaggtctgtttgggggaaaattgacatctttactatgttgaatcttccagttcttcaacgtggtatgtctttccatttgtttaggtctactttgagttatttcaccactgttttcttggtttcagaatatagactttgtacatattttgttatatttatacataatttttggagctattgtaaatgatattctttttttcaattttgatttctagtgtttattgctagtatgccgaaatacagttacttttatgtgttgacctgtaccctatgactttgctaaacacacttagaagttctagggctttattttctagattacttgagattttctatgaaaggcaatcatgctatctctgaaaagggacagttttatttttttctgtgtaatctctttccacttaacttatttttcttgccttaacgtagtagctagggcttccagtatattgtggaataggacagatgacagtggatatccttgccttgtttcttgatcttggagggaaattaagtatgctgttagctgtaaataccttttatcagattgctatggtttgaatgtatcccccacagtttatatgttggaaatgtaatccccgatgcaacagtgttgacaagtggaacctttaagagttaattaggtcatgagggatctgcctttatgagtggattaatgttgttattatgggaataggttcattattgcaaggatgggcttgttacagaagtgagttcatcccccttttgctttgtcatgctctctcacccttctgccttccaccacgcagtgatgcagtaaggcctttgccaggtactggcactggcgccatgctctttgactctccagtttccaggactgtgagccaatacattactgtttttttataaattacccaggctcagatattctgttatagcagcaccaaattgactaagatacagattgaggaggtctcttccactttgggtctactggcaggttttttttttttttaatcattacagtcatgcttcagagatattgtgggtttggttccagaccactgcaataaagtgaatatctatcacaataaagcaagtcacacaaattttttggtttcccagtacatataaaagttaatgtttatactgtactatagtctattaagtgtgcagcagcattatatctaaaaaaatgtacataccttagttaagaaatactttattgctaaaaaatgctgacacagaaacccaaagtaagcacatgctcttggaaaaatgacacttaccaactttcttgacaaagggctgccacagactttcaattaatcaaaaacacagtacctgtgaagctcaataaagtaaagcacagaaaaatgaagtgtgtcaaaaaaacggggactgttaaagtcctatttcagctgagatgagaatgctcctcctcgtatgggagtgctacagtccatggtgttaacagaaccatcagtgagccatgtctctgcaggctgcctctgcattgaggtacttctgaagcttgccctgtccttcaaaggtcatcctgtgaatgatggatgctggtcgtggagaaagatttgactgaaaagttaaatgtgtcctatcctccagtcgtttttttccagcccttgttctgtctttgttatggagaggtgcagttgtatgactattccatccttaggaatatggttacagggctcagcttccttatstctaatatgaggatgcacgtttgttctgcacaggaagcactttgttttctgcttgacttgtggtacttctccctgtgtggagggtatgactgaataacaggtgagctgtctagaaaccactcatgtactcacttgtctcttccttcatgggatttggtaccagatatagtggtacaaagataaataggacaggattgctgcctttgggaagtttacaaggctattaagagggacagacccagaggcagggtgatttccactgaagaggtgagggcatgtagaggggacatttagaaakaaccatctcttgctgtgccaaatcagtgtaagatttttagttttaaaaagatgttttatttgtatatcttaggaaaaattcttgcaggtactcgatatttaaaaactcaaggccaggtacggtggctcatacctataacagcactttgggaggccgagacaggtggatcgcttgaggccaggagtttgaaaccagcctggctaacatggtgaaaccctgtttctactaaaaatacaaaaattagccagacgtggtggagcatgcctgtaatgccagttactcaggaggctgagacatgagaatcacttgaacccaggagttggaggttgcagtgagcctcaagccaaggccttaagccgaggcgcttgagctcaagggttcaagaccaacctggacaacatagtgaaaccccgtctctacaaaaaaacaattaaaaatttagccaggcatggtgccatgcatttgcagtcccagctactgaggaagctgagatgggaagattgcctgagcccaggaggctgaggctgcagtgagctgaggtgagattgtgccactgcactccagcctgggcaacagagtgagaccctgtcttaaaaaaaaaaaaatggtagttgctagtaaaggggattatacagtacatgttcaaagcccccacagtcttcccaatgtgtccattattctggcttcttcttaattttgctactggaaattttggagtagctgaggaagagtggtaatgatggagtggaaatagaaggcagtgggcagaaggggtgctggtctcatggacctaatgtatgtgatgagtctatatgagaatcattttttaggttttccttgatgaaatgttgtgtagacagtaaaactgtatacctacaagtatgcctcagttcagtatgtgtctgtgcccaggagacacattgaaaagcagtgcccagcttaaaacttgggttctgctgcccaccagctgggcagcctgaggcaaatcacctaacgtggcaagcctgaggtacctccctataaaatgggagctggtctttgtgagtttttgattagcatgtaatacttgggcattgaatagctttttgctggtacttttattagagaattggaaattttgttttctgctttatggagtgatgttgatgatgcataagtgatggcccaacagcctgagcaaatacaatttattctatggccatcagcaaacctgttcggagctcttgcagggcatcagttgtggctcttagctgaagcataatagctcacagctgtgcatgtccaggggcaggcaggagactctttgctgtcactttttgctgtgctagaaagagtactgggctttgagtcctatttttgtctctttttagcattatgactttgggcaggtcagctagtctccctaagccttggtttcctaatctggaaaatggggatgataatgcctattttgtaaggctgcattaaattcaagtgagataatgtgaatgtgctttgtaaatgtctaggatggactggagatttggagaggtgccaagtgctgctgtttttagattatgttaaagccagcacaggtgcccttttagtggggagagttgacttgagttttaacatagaacaattttgaaaataattaggaagcctgaaatttgtatttgttctcctacactgtggactgttttcagggtgtttgggttctgctgatcatggtactcagggagctgttgcttcagggaatccaggtgccttctttatggaggaggtgggagggattgggctggggcagggactcagacagcatatggggccagacaccccactctggggttcctcactgttttttttctccaacttgcctagttatttagtcattcatctgtcctgagaggccatctcctgtcagctctgcgattggacttgcacctaccatagtcctggagacaaagaagcatatgccccagaggaaggcacaggcacacctggcaccattctggtagtggttggatgcgttcctttgagacattacttaggaagcagatgagctttcttccttgtggaataggttggccttggcatgatggctgtattgatgttctcccacccatgcacatggaccctgccaccgccacacagagacctgatccttcagccattaatgggcccctcccttgtttttccctaggaggatccagttggcatctaggaagacttgccatgacttagagctagcacgtgtcctgcagaaagtgggttgagaggcctgtgtcttggcataagtgccactctctgatttttctcctgcctctgtggggtggcagggggcaggagaaaagtcagtgtgggtgtgacatggggaatcccagctaagtctgctggtctctggtcagaggagctccacgctagtcaagctatygtcgccattttatatacaaggacaccaagggttgtaaaggatcagggagtcargtatctgagacacaactcagccacactctaaaatcttcctattccaaatccagtgtcctttccatttttccttcttacaaccccaggtctaggtaggacagctgatttttacagtaagatagtggtgaaaaaaaatcgaccaatgggtagttcctgagtgactgctctgtaagtgaaggcagcagttcagacggaggctatgtgatgctcagtgggattagaggtgttttcggattcagtgcacagagcccagtgggtgagcagcagagagtggctgtgaagtgggggtttgagaggctctcccacttcttctaatctccagtgggctccatagctggcccctggggctataagttctgcttactgggagtcatcagggtgtggcttgagctgcaggtctggccatgggctgtcggcctgccttgaggatgaccagagcctatctgagactttatttggagtaatgtctttgtattttgaaaacaagttcaactttgttcctaattggaaactattctattgattgtttacttctggatatttaaagaaatggtaaaatatggaaacaaaatttaccattttacccactttttaagtgtacagctcagtggcattatgtacattcacattgttgtgttaccatcaccaccatccatctccaaaactctcttcatcttgaaaagttgaaatgctatacccattaaacagtaactctctattgccctctccctctctggcaaccaccattctactttctgtctgtatgaattttcctattctattttccacctataagtggaatcatataatatttgttcttttgtgtctggcttattttacttagtgtagtttttaaagtttatttcatgttgtagcatgtgctagagtttcctgccttgttaagtttgaatagtattctgttgtatgtatacaccacattttgttcattcatctgttgttggacacttgggttgcttcttaccttttggctattgtgataatgctgctatgaacatgagtgtacaagtgtctgttcaagtccctgctttcatttattttgtgtatatagccagatgtggaatttctgggtcatgtagtaattctgtacttaattttctgaggaactgccatacctttttccatagtagctgcaccattttacattctcaccaggaatgtacaaagactccagtttctccaggtcctcatcaatacttgttattttctggctttattttgctttgataacagcctagatggagggttttaatgctatagtttctactttttttcatattgtatagtggtcccagtgtccattttggcatagcttatgataaagttgcagtttctggccaggcayggtggctcactgtaattccatgcctgtaatcccagcactttggaaggccgaggtgggtggatcacctgaggtcaggaattcgagaccagcctggccaacatggtgaaaccctgtctctactaaaaatacaaaaaattagccaggcgtggtggcagatacctgtagtcccagctactcaggaggctgaggcaggagaatcacttgaacccgggaggtggaggttgcagtgagccgagatcgcgccactgcactccagcctaggcaacagggagagactccgtctcaaagaaacaaaaacaaacacaaaaactgcagtttccaaacttttgattagcagtattcttttttttctaaatgtggaacccaggagataaaacagctatcagtctaggaaaggtttgagtcttctttgtctgtgagaaagtacttccttccttgcatgaacccttaagagaactcagagcctattgtgaaagcctgtgctagaagtcattgctgtaagcactggtgacagtggcagtcattttaaatttattttattattatttttaatagagacagggtctcaccttattgcccaggctggtctcaaactcctgggctcaagcagtccttccgcctcagcctccacaagtgctgggattacatgagccactgtgtccagcccctagcagttattttaattgataaaagtggagcacatgttcaatctgtctgtttgaggcttatcccactgcctgctgggcccttccagccccttctgccagcctctcagctaggacttttaatgggtcctcctcctgccctccctgacgtatttggtagtgtccatatccccatcccagttcctcgggccagcctcccaggtgtcaggtcctgtgagtctacctcctagtgggattccccttcatccctgctgtcacgggtccatctgggatcctggcatctttttaaaaataagagctttgtaatttacatgccatgtagtttcccctaaagtgtacaaattcagtggtttttagtatattaacagagttgtgtaaccaccaccacaatcagttttagaacatttttgtcatcccagaaagaaaccctaaaccccttggtagttgctccccagttgtccttctctccaagcccactaaaccagcggttcccatccatttggcaccagggactggtttcttggaagacaatttttccacggaccagaggcagagggcagggataatttctggatgaaactttcacttcacatcatcaggcattagttagattctcataaggaatgcacaaccgagatccctcgcatgcacagttcacaatagggtttgtgctcctatgagaatctaatgctgctgctaatccgacaggaggcagagttcaggcagtaatgcttgctcacctgccgctcatctcctgttctgtgacccagttcctaacagcccatggaccagtactggtctgtggcctgggggctggggacccctgcactaaactattttctatctctatagatttgcatattctggacatttcatataattggagccagaagatacatgctattttgtatatgacttctttcatttagcataatgttttcaaggttcttctgtgttgtagcatgtatcagaaatttattcctttttatgattgaataataaatacccctttatatggacatacttcattttatttatccattcatcagttggtggacatttaggttatttccaccttttagcttttagaaataatgcctctgtgaacattcatgaacaagttttggcgtggacatgttttcatttcttttgggtagatacacataggagtggaattccctggtcatatgctagctctgtttaacattttgaggaactagcagactgttttccgcaagggttgcaccagtttacattcccagcaacaatgcatgagattctaaatctccacatctttgccaatcctgtcatcttttgcagccttcagactagtctgcctatctctaattatttttctattatctttctaaaacataggcaaaacattttgttctccctaaaacacccattgattccctgttgcctacaggtaaagttcatggcctctgtgttgtcacttggccctcaactacctttccatcctccattcacatccctgctctaaggccttgtcttctagttttcccatcacacctcgctctccctgcctctttgcttcactgtcttccactgcagtgtattccattcttcaaggcttgatgcagtaacttactcctttgccttccttaatcgctttgaattgttctytgctgcctttagatgttgcctgtgtttcttttcgtatcattcaggttttgaaaaaaataataggcttgttacctctgctagcagtgatccctgggggcaaggattgttctcactcttttgtgtgcctggcacctgatgcattgccaggaaatgatgaatgctatcgtaagggaccaaggagctccttgtgtgttagaccacaccgctgtcccaaggcagctcttcactggcctgtctgcatagagctcagggaaggactggttcctggtggaccttggcactgtgaccttcctggctcttcataggccttgtctcagtttgtcctatttcctttctaggagagttgtggactggggcaacctttgccagtgatgagaagtgatgctcgtggcagtgctgaatctctctgaatatggtaaggactgatgcctgcctattttgcggacctcagtgttcttttgttacgttactcctgggggcgaggggcattttcctgttagattctgaaggctcttattatggagtagccttcctcccaggaaggctgttggcacctttgagggtgtgagattgcttgcctggtggttgaagcggcttgcaggaccttgtcacagttgctggaaagacataaagttaacatgttttgttgaaatctgttgttccattacctgggtcttctactgtgttgagctgttgctggggtgtccccagtgtctgttgcttttgcagtggacagtacccaggacatactttctgcacagattggcataaccctcccccctcggccccccaccccccgcccttctttttttttttctttagaggatgatttttttgttcattccccacatctgagaaggtcatagcttttcaaggtagaatagatcatatgctggagcagaattgtattcatctgtgggtatttgaagagatgagtgacatctcaaagcaacttgtctcttccaccaaacccctgtttctagattcgaattgcagccttaaatgccagctccaccattgaggatgatcatgaaggaagctttaaaagtcacaaaacccagacaaaggaggctcaggtacgtaatgcgaggtcttctctgtaggtggaccttctcatttctatagagggaacctcattttaaatacatttaggcatctcctcagtggggctttagggggaaattccattttgaaagatggctagctctccatctcctgttaaacctgttttacttagcagacgatcatatagaggagaaattatatttattctatcagtgtatgtgaaggccagctcagcccccaggcctacttccatgcaccccattctttgtgcagccctcaggagttgggatacccagggaatggtagaatattaatggtagatggtgtttcgaggttccctagtgtattgccctcactttacagtgtgatgagactcttgaggggagcagcctagactgggatcaccctccaggtcagtgagggagccaggtccaacctcaactccctagattgttggtcactcctctttcccatgaggcctggcatctcttccatttcagccttcttctttccatccattcrtctccatacccttctcctatcctagtgtaataagagtttgctcctgcctttgttttccctgaaataaacatatgccttcccttccaccccgctgcattttatggtagaaatcaggacagttccagagctgtctcagaagtctactagtcacctgtccctagtctgcaaggcatgtcagtgaggctcaacctacccagtgccccctccctcccacaggagattgtcatcctccccaggcaatgatcaggctatggcagagtggtgagtagaaaaacatggaaaccaggccgggtgcggtggctcatgcctgtaatcccagcactttgggaggctgaggtgagtggatcacttgaggtcaggagttcgagaccagcctggccaacatggtgaaaccccgtctctactcaaagtataaaaattagctgggcgtggtggtgcatgtctgtagtcccagctactagggaggctaaggcaggacaatagcttgagcctggaaggcagaggttgcagcgagctgagatcatgccactgcactccagcctgggcgacagagtgagaccccgtctcaaaaaaaaaaaaaaaaaaagaaaagaaaacaatggaaaccagcttttgtttgtttatttaagagatagggtctcactctgttacccaggctggagtgtagtggcatggtcacagctcattgtaacctctaactcctgggctcaagcagtcttcctgtctcagcctcctgagtagtttaggactacagacaccaggccaccatgctcagctgatttttaaatttttttgtagagacaggggtctctctatgtggcccaggttggccatgaactcctcggttcacaccttggtttcctaaagtgctgggattacagatgtgagccactgtgcctggcctgcaatggaaaccattcacactgaacattttactcacaacccttctgatatcatatgtttggggtattttccccccataccaattctccaactctccatataccaactgggtgtcctacaattcaattctgacactagctacacagagttagtgtcagactccacagcactaacagctcatcccacaaaactgccctcacttcagatgccagttgcaagcgttgagtgccaggatacctacacttctgtccagccggtctgtaaaatcagggattctcaccccctaccccttttagatttgataatttgctagaatgactcacaggacttagaaaaacactttacatttaccaatttattatgaaggatacaactcaggaacagccaagtggaggagatatttatggcaaggtatggggtggattcacagagcttccgtgccctctccaggtgcggcaccctcccagcaccttgatgttgttcaccaacttagcagctttctgaaccctgccctttagggtttttaaacagagattccatcacataggcatgattgattaaatcattggtgatcagctcaatctccagcctctcttcccttcctggaagttgggaggtgggggagctgaaagttccagctatctaatcacatggttggttcctctgactgtagccccgccttacacacatttttggcttaaaaaagacagatctttatgctgtatgaaaacatctcttgtcttgatttgcaggaagcagaggcttttgcattgtaccacaaggcccttgatctgcagaaacatgaccggtttgaggagtctgccaaagcctaccatgagctcttggaggcgagcctgctgcgggaggtgaggcatcagcaggccaggcagtgtgccgtggtggttagtgcatgggctgtggggctgggtactctgggccttacctctgctctcccatttcttggctggggaaccttgaaaacattatttcacctctctgcccctatttccccacctctaggtatctgcctcattgagtttttrtgagggttgagtaaatccagtgaagcatgtaaaatgattcctggtgtaagtgcttgttaaaggccagctatcgttattacttaatcttcacaaccactctgcccagtagctgggttttacaaatgtggaaactgaggcttagtgaggtcttgatggctcaaagccatccaagtaagtgaagcattcgaaccaggtttggagtccatggtttgctgatacctaatgatcctactggcagcacattttagcaaatgccatttgagtaaaagaccatgagcttgggaagtctgtatagacatgccatgcaattttgaatatagtcagaaggactggggacactggttacagtagagaggggcaggcagagcaagacctggtcccagcatggggactgtggtagtggtgagtgagttaatcctcgagttgactggagatgtcgactggaggtttgggaattggtcccaacctgaaattgatttaggaaggtgtatatttcattaggaggaaaggcgtttgttttsaagttttcatgtttgttttcgcccaaacatgcagatgatgtgcattaaggaagcagataagctccatgggtatttactggactgcacagtccttgagttgagcagagtctcctgtagtgctaggcatgcagacacttatgactcaagcaaaaaccttgatggtttttgctgccgatgagatagaatactgagttttaattgtgagaagaaagcatctgttccttctctcacccacggtttttctttgtattcctaattatatagcttgtcaagattctttggttactggttacagtgctttggaattagtggtatgggacttgtgacctcctcctctcctgttagtrggaagtgggtgaggacccagagagggaaaattagtttattccatgtttactgagctttggttatggaccagttggtgggcatgttggtcttccctctcaggacgtggtggaatgccaggtgggcccagcatccaacagttgctaggcagaaaccttttacctaagggcacggtcatgtgtcagccttttagttgtaggtgtgtgcatctttctgtgcacagtgtatcactttcagccttaaaaggttgtttcagccttaaaagggacaacatgctcattgtaaacaatggagaagtacagaaaatacatagaacagtttctttttacactcatattgcattggcatacttaatgttaattacataattacagttttgcagaagattggcatagataggccctggaccccagctgactcctaagaagcattcaccctgactggtgggtgtcctagagggacttgctcgggcaagcctttcagggtggatggagagtggtgctgaatgtaggtagtctgttaggtggaggttagttaaaagcatccactgttatgtgcatgtccatgtgtattgctgattgtttagttcgaagtagactcacttagtctctgtaaatttgttcccactattctttgaagagttctgtacctggagggacagaggtagctgggatccagccctggtcagctggttcttgggggcctttttgtatgataagtcagatgacggtagaagataactgaatggggcttcatttgagcttctcagtcttaaagaagttccttaagacctccaaggtaggtagattcttggattagtcaagggatgcttcctgagggtggcatgtcttcagatcttacctgttcagaacatgaagagcaatgtgtggaagccacctgccccaggaaagagcttcttggtgcccgtgagtttttctgttagaaaatgttttagtctttgtcctgtggttggagcaatagttttctaatcagcagtttcttagaatataaggtcattaaagctgtaatgaaataacttttcatattaagcatatttgcaattctgatggtctttcagctcactttaacttttgctatttagggtaggaattatttttcttaattacagaggtcagacactaacgttttagttaaattagcaattgtctatgctcatgtgatgagttatagagttgggagctcagtctcttgattcctaatcctggagtgcctgcagtgaagctctaggccttctgcccccaggcagcctgctgatactttgtcttttatcttatacctggagctgctgactgggtctacctatgctgtaaatgttattcgctaggcttgaaccctcaggcatggcagtagtggtggggcagtttctctctgttggatgcccagactctctgcaaactattaatacctcagggtggtctgttcttctctgtgcgcttggagtaggagtggtcttataagaacacatggtgcagtgccttcattttccagtggtggacaacactagactggctcaagggcctgcagcagaggccagcctggaagccaagtatcctgctggctgcttgctgaggcttcaaggtctagttgtcacttctgttctgttttgttcacaggcagtttcatccggtgatgagaaagaggggttgaaacaccctgggctgatactgaaatattccacttataagaacttggcccagctggcagcccagcgggaggatctggagacagccatggagttctacttagaggtgtggttttggcagtgcttagctaccttggtgttttgaaagctcttggtggaggggatgaggttgcggtcttgtgggccaaaaagaagagtttgtagtggtggatcaccaagctatagtacccaaggctctagggtaggtccataggtgataacaattagtactgaccaggcctggagagcaggggctggggcagagcacatgcttggatgcagaggcctgcatgtgaattcttcctttgctgctcagtgcacgtgtggctgtgagtgagttattcagtctcttggtatctctaggtctacaccaatatagtggtaataataaaraagagcatagttgtgaaagttaaatgagttggtatgcataatagtatcaaaaacaaagtctgaaactgagcattcaatatattaatacttacagtcataatagtattgctgttatttcatgttactatcagtctgtctctgggcacctctaaagcaccagacactgcgctgtttgcttcctacgcatacactaatcctcatgccatcttgcaaggaaggagtctttatcctcactttagtgatgaggaaatggaggctcaggatcattctgctaatcagtgttgcagcagggatgtgaaccaaggtttgtcttcaaagtacatgagttttcttgaatcccataagactctcattttttcaaattgttttaaagacagggtctcagtctgttgcccatgctggagtgcagtggcacaatcagggctcactgcagcctcgacttcccaggctcaaacgatcctccgacctcatgcccccaagtagctgggactataggcatgcaccaccaccacacccagctaactttttgtatttttagtagagatggagtttcgccatgttacccaggctgctctcgaactcttggactcaagcattctgcccacctcagcctcccaaagtgggattacaggtgtgaaccaccaggcctggccatattttcttttctttcttctccttttacttattaaatatgtaaggaatacagatattcagattgacaaaatatatcaagacaatggggaaactgaggcaggaggatcacttgaggctaggagtttgagacaagcctggataacatactaagaccgtgtctctacaaaaaaattgaaaattagctaggtgtggtgatgtgcctctgtagcctcagctactcatggagctgaggtgagaggattgcttgagcccagaagtttgaggatgcagtgagctatgatcacaccactgcactcttgcctgggcagtagagtgagacccagtctcaaaaaagaaaaattttttwaaaaaattctaagttaaataacttggtccctgtaactttttatatgccattatcactctagatcttggaaacgtgcgactccaggaaagatgagctggcattacttgtcagttataagatagtcatggcacttttgccatttccctgggaagttcaagtggctgtgccagtgccgtgctcctccygtccccggggtgcatattcaaggagagatctgactgtgtgtgtgtgtgtgtgtgtgtgtgtgtgtgtgtgtgtgtgtgtgtgtgtgtgtgtgtgtgtgtgtgtgtgtttgccctctgcttgtgtcgcttccaggcagtgatgctggactccacagatgtcaacctctggtataagattggacatgtggccctgaggctcatccggatccccctggctcgccatgcttttgaggaagggctgcggtgcaatcctgaccactggccctgtttggataacctaatcactgtcctgtacaccctcagtgattacacaagtgagtcatgctttgatgctttcttccatgtgccagtggtttttggaacagcagaggaaaggcagtttgggtaaactgaaagccaaagttaacactgaaggggtttgccagactgtcagggagaatggcaatgttcttagatttctgctttattctgcatctctttcttgatttgttaaatgccttgtagtaataaagtagcatgttttctgaatgattttactttttttttttttttttttttttgctttgcaaggttttgtttgcttgacagaagtggctatcttatttcctccctgcactgtcccattttgtgtgtcttagtctgtttgggctgccattaaaaaaaaataccatagattgggtggctaaaacagcagaaattgtctgggtatgttggctcacgcctgtaatcccagcactttagggggccaaggcaggcagatcacttgagcccaggagtttgagaccagcctgggcaacatggtgaaaccctgtctcttcaaaaaatacaaaaattaactggacttgatggtgcgtgactgtcatcccagctacttgggaggctgaggtgggaggattgcttcagtctgggaggtcgaggctgcagtgagtcgaggttgtgcaatcgcattcctgtctgggtgacacagtgagaccctgtctcaaaaacaaaacaaaacaaaaatcaatattatctaaatcagatgtgggtaagacttgaggtacaatttgtcctgagacaaaattcctctccagttgtaaacttgtgaatacagataaattaatgtgcttccaaaatataatggtgggacagatataggacaaacatttccattccaacagggagaaataggaaagcaggaaagtgtgatgggtcccaaaacttagcaaacttagcaaggcaaatttgaggtcctgaggctcaggaataattctctttgacctgatgctccgcccttgatgcccactgaggtggcaacatcaccctcatggtacgtgggtggagggacaagccccacccttttggctgggcaagggctctacccctaagatgctaggttgagacatcctggcctatgcaaactggagaagtagccccaccctttaaggaactagccctagcctcttggtctgtgatgggagtggcggctcagatgatctttgaatcatctttgagggttcttcttccctttccttgaaagataacatatattcttgactttctttcattctttctcattttttttctgttcccgttagtccccattagcagtgtttctgccagtataatcccacctttctggcttctgagatacctgattaaatctgtggttcatgcccacactgatcttataagaaaattgttggtcagtcacactcatagtgttctcagaacaaactttctcaatttttgcaatatggatagacagaattttctaaatcttttaagttctggttcctttttgcttaacaatgccctcttattttctctattttagcatttcactataagcagtcaggaggaactgggctatgtctttaatactttgcttagaagtctcagcaaaatagccaattttattgctcacaagttctaccttctaccaaacactagaacatagacgtaattcagccaagtgctttgctactttataacaaggatcaccttttcttcattgtccaatagcatgttccttatttccatttgagatctcagcagaaatgcccttgatgtttatatttctaccaacattctgtacatgattatttattctctagtaagatggaagccgtctctgtacctcttctcttctttctgagccctcatcagaatcaccttttttttttttttttgagatggagtctctgtcacccaggctggagtgcagtggtgcgatctcggcttatcgcaaggtccacctcccaggttcatgccattctcccgcctcagcctccaaagtagctgggactacaggcacccaccaccaagcccggctaattttttgttttttatttttagtagagacagggtttcaccgtgttagccaggatgttcttgatctcctgacctcgtgatccgcccgccttggcctcccaaagtgctgggcttataggcgtgagccactgcgcccagcccagtatcacctttaacaatccttacataccaatattcactttttccagtgtacacctcgaaactctttaagcttatacccagttctaaagctctttccaacaccaggtgtggtagctacaggtagcatgcctgtagtcccaacactctaggaggctgagatgggaggatcgcttgagcccagaagttcaagaacagcctgggcaagatagtgaaaccccatttaaaaatactttttttttttttttcattaactgggtggggtggtgcacacctgtagtcccagctacttggaaggatcacctgaacctaggagctagaggttacaatgagccatgattgtgccactgcactccagcctgggtgacagagcgagactctgcctcaaaaaaaaaaaaaatttgtttccacatatttaggtatttgttacaacagcagcccacttgttggtaccactttctgtcttagttagttcatgctgctataataaaatatgatagattgggtagcttaaacaagaatttatttctctcagctctggaggctggagagtctttttttctcttccttttaaaaagacaaataggaacaggatagaatgtgttgagatagatgaggccttgctcaaccttctcacctccagttcttgttctccataaccactttttaaatctttttaattgaggcaaaacatacatacaataaggtacataaatctgagacctgtcagtttgtatatgtgaaaacatgtcaagatacagaacatgtgcagcgcyccagaaggcaggttactttgggtcccttccactttttacaacctcctaaggcaaccttgatttctcctttttgtcaccaaagatgaactttgcctgttgttgaactttccctaggtagagtcaggaagcgtgtagcgtgtgctttcctcaggctggccccttctgcttgtcatcctgtcggtgagcgcacccatgtggggcacagcagtctctatgtcttgttattttgtgtggtctattatgtgcatttgcacaatgtagccattctgtacatgggcatttgggttatttccagatttgtgttcttagtcataacctgctatgaacattcttgtatatgtcttttagtgaacatatgcactcgttctgtaggttgcccctcatttcactcccaccagcagaatatgatagttgtacagggctgtgttttgactctagcagtttcttcttctggaggctttgagtctcttcttgggtgctcctcccacagtttgggaccatctttggggttcagccttccttcctcaactgacttctttagttctttgcacccctctctcattgtagaagaagttatgcttggtaaactcaagtctttgtgggaagatttaggttggagtattgtattagggttctccagagaaacagaaccaataggatgtatgtacatatatagaaagagatttattgtaaggaattggctcatgtggtattggtagctgacaagttccaagatttacagggtgagtcagcaagctgcagacccaggagtgatggtgtatagttctagtccaagtccaaaggcctgaggaccaggagaattgatggtatagtttcagtctgtaggctggcaggcccaggaagagctgatgtcttggttttagtgagaaggtagaaaaccccccccaccgcaatgtcccagttcaaaggtagtcaggcagaaaaattctcttatgcgggggaaggtcagcctttttgttctgttcaggccttcaactgattggatgaggcccycccacattagggagggcgatctgctttactcagtctactgatttaaatgttaatctcatgcaaagacaccctcacagacacacccaaaataatatttggccaaagtctggatatgctgtagcccagtcaaatagacacatacaattaatcataacagggactgaactgatacatacacctgtgagagccctgatagatttgacagtcatttaaaacaaaaaatkaaagcagcatgttaaattgactctcagtggcattttatgtatttgatatgagtagggagggatgctgctgggttaaggcctgcggactgcctcttgttctgagatttcccaggccttccctctgcaggactgtagggtggctagtgagtttagcttaatgcagctaatgtgcctactgagaaccagcatcatccaagtgctcagtgccttctgggttttctctctggaagtcactgatggctacccttcaggtttcatgtggtctcagagaaaccatgtcccttatttgtctgatgcaggcacctttggaccatctattgagcagcgtggactgtgctgggattgtacagacctctccttgctcacaggctgcacagcctttgtgcaccttggggcgtgtggccctgctgagcattgtggccagtctctgctctctcctcccaagcacactaggagcgcatcactttctcctctcccaaggcttccatgcgcagatttctacttctgctctggttttcctctgtgtgttgcttctcactcctaggtgcttcattttctagttattcttgataggagtgacttgcagtctacctgcaccaaactgagaagctgggcagggcatgatagtggtcccagtgcccaggcagagctggcaccctgctgcagtgttgtgtttctctgtgtgttcactggtgagacctggactgttcccaattacaagtgctgaaagcttttgtaatttatatcatagttctgctttgtgaatccatgccatcccatttttttctgtgtgtttacctgttactgtctccattcctggaggagctggagttggcacaggctttccagatcaataacttgaggatgctcattatgacattaacttgagtgatgtacatgtcttaaattgtaggcagtagctttaataataggttttttttttaaaaaaaggaggaaaattggaaaatacaggtaaacaaaattcaataagttttatgtgtataatggagtcacactatgtgacctcttttgtctcctgcttcttcccagtactgtatcttggccttctttctggtcagtaagcacactccttgaccatctatgtagtggctgcttggcaacctattgtgtggaattggacatactttatttaaccaggtgccatggtgggacagagtggttttgagatttttttttttccttgaaacagggtctcactctattgcccaggctagagtacggtggtatgatcacagctcactgcagcctctacctcctgggctcaaacgattctcccacatcagcctcctgagtagctgagactgcaggtgcacaccaacatgcctgactaatttttgtattttttgtagagatggggtttcatcatggtgcccaggctggtctccaactcctgggctcaagcaatctgcccaactcggcctctagagtgttgggattataggcgtgagccctgtgcctggctatttccagattttttgaaggctgttttccaattagccaatagataatcactgtgagccctgttggatttttgcagtagtttctagaggtgggattcccaggtcatcgaggatctgtgtgtaattgcctatggtcctccaaaaagatcctacggtctgtcctctgccagaatctttgggtctgctcaccttgcagtgcccagtctactctgggtcttattactaacctgactgaattagttaaagtggtatctcattattttttaccaggcatttctttgattctaggagcaggattttcctgatgttaactggcaaggccagagcttctgagtgcggtctcagaagtcataaactgtctctttccccgccagcatgtctgtacttcatctgcaaagctttggagaaggattgccggtacagcaaagggctggtcctcaaggagaagatttttgaggagcagccttgtctccggaaggactctctcagaatgttcctcaaatggtaagtcctgcctcttcccatgccatgtgtgcacgcttactgtgtggctggtgaaggtcaggagcacaccacattctcccctcaggtcccatggatggagcccctgtgctctggggcttcatgccctgccgcagcccctgatctagtgaactgaccttggactgccttgttgatcacccacctctacctaatcttggcaaggcctcctcaggctgcctgctgcccgcctctcctgctgtcctgccagctttcagtgttcgctagctgtcctctggatgcttggggcagcctgctgcccagcttgcctcctgcctttccccttcccagggttttgttctcagtgctgcccgagttcagtgtcccaaacatgcctctgatcatgtgccacccctgccttgcctccaggacatagcccatgctcagttgcattaccaaagaggttctttgcagcctgaccccatagttctcccacgtcacctcctgcttttccctcccaggctccttttgttaagactgcsccaagtcccttgcagtttccaggcgtggtaccattgtgtggcatcctgtcttctcaacctggctcccactatgctctaaactctcatgccatcttcccacctctccacctgtcccgccattgcccctcctttgccaggtgtcttcccacagacacacttctgaggtgacccaagaatacctgcccctcctgcccagactgtcctgatgcctgccagcagggccacacctcagagctgctcacttacaaacttatctgtttctcaggtcacctctctgttgctttctgagctctagctgcccttccccacagccctccagcccagccaactccttttgccctctggtcttccttggccctggaacacacctgtaggggttgattagtagtgatttatcttggcgtctatccccggtgagcctgtccctctcctgaaggaactacctgttggcagagataggaactgagggaacatctgtcatgagggagctaaccttgagggagacagataagaagcacatgaaacagataaattcatgagtagctctgaggtgtaaccctgctgggaagcaccaggacagtctgggcaggagggcaggtgaggttaggtcgcctcagaagtgtgtctgtgagaggacacgtagggcctccaagcccctgccctttctgtatttttgggtcgtgatacactttggtgagcttcacttttccgatgactttttgttggcatgggcagtataggatagttacattcttttaagattttctaataataattgagagaaagattttatttttctgtggcttttcagatattattgtgatagtgttaatacatatgaaaactctttctctgcccagttttgaattgtcaaaggaacaaagaatattagtcatttctagtgtatgtgggtattaagaaggctatttactgccctacccaggccagactgaagtggttattttatttataggaagaaaaatacacattaaaaggtattaacctaaatgcatttttgtgtgtaaaatttcagcctcagttttagtttgtaacatgataatttctccctgtytcacatgcttttagtgacatgtcgattcacratgtttcggtgagtgcagctgagacacaggcgattgtagatgaggccttggggctgcgaaaaaagaggcaagcgctgattgtgcgggagaaggagccggacctgaaacttgtgcagcccattcctttcttcacgtaggttgtctagcgtctctgggagtgctgggtcggccagtaggccctgttgtgggatgctgccctgcacaggagggagagaccttgaggcttgatcctgggttggtggtatgaatgggggctgggtgcacagtggccaaatggttggaggtgcatgcttacttgattactaagaagcaggtcagctctctctcaagtacctccagtctcagtccctttttgctgttgctgttcttgaccccagccacctgccacattcctgtaaggcccttctcagcctgccctatctagagggcgaatggaaactaacatttgccaagcacttgccaggaggaaactgatgttcagagtacttaaatggggagcccagagacagtcccgggtctgggcttctccgctctcaagtccatgttttctctctagggccacgtggggagccctgcgagatgggcctcaatatagtccttgccagccccatgatgtgagagtctctctctctccaggaagggcaaattggtatcggcggttccctggagttgggatagtttagtcccttagcgagctctggaattcaatttctgtatttaaaattctgacattgaatctttaagtttagcatgacttagcagtagcattccatttctaytccccaccccctacctccacccctgtctgcctactctgagggagctctggcctggatcagactgacctgacctgggtccaatcctggcactcctaatgctgtgaattggatgactctggggacattaggagccactccctagcaacggggagagcaacatctstctcatagggttgtcatgataatgacaaaacatgtagggctagcacagaggcagcacatagcacccactcaggaagggctggctctgatccgtattattatgactggctgtgagtttcagcatgtagaatttcccagaaatatttccatacccgagcaccgagatggccaggaagaaagggctgttcttcaggctgctctaggactcctgtctggtgccctttcttgtattttgtcagctggattagagtccttctcccatctgagtgtgtgctccccaactacagagggttggggttttggaagggccctggggtgcctccctgttacagtgaaggaggaaaaggcctgagaacactagaagggattgtggtgatgtgactggagaacagagggctgggaactggtgccgtggccaccctccatggtgtagggggagggctaagtagaagcaggagggagaagtagaagcaagagggagttaggctcagtagttaaatttgggatttggtcattaaaggaagagtgtagattccctctctggtagcagaggacatgatgcttttatagtaatctccatctattccgggggtcagcaaaacttttcctttaaagagccagagagtaaacatactagcctttgtgggccatgtacaatttatgttgtatattttcttctttttctttcttttttttttttaaacaatgctttaaaaatgtgtaaactagctgggcatggtggctaacgcctataatcccagtactttgggaggctgaggcaggaggatcacttgagtcaagagttcaagaccagcctgggcagcatagtgagacctcatatctacaaaaaataaacaaaattagccagatatggtggcacacacctgtagttccagctacttgggaggctgagggggaggattgcttgagccggggaagtcaaggctacagtgagctgtgatggcaccactgcattccagcctgggtgacagagcaagacccccatctcaaaaaaaaaaaaaaaattaaaaaataaaatttgctgcagggcacagtttaccacccctggtttcctcagtgcctagtaggcatgagcaagagcaaggcacgagtaagggaaatggtgtatttaaggcatttgacacaacccagccagtaagcaaattcttcctgtctaaatgtaacactaactgaaggcaggaaaaagatagaagaaattccttctagccctgggagcctccatcatttagattctggaatttgaagcactgtccttttttttcttttttcttttttctttttttttttttttttgagacagagtctcactctgtcgcccaggctgaagtgcagtggcacaatctcggctcactgcaagctctgcctcctgggttcacgccattcttctgcctcagactcccaagtagctgagactacaggtgcccaccaccacgcccggctaatttttttatttttagtagagatggggtttcaccgtgttagccaggatggtctcgatctcctgaccttgtgatctgcccgcctcggcctcccaaagtactgggattacaggcgtgagccaccgcacccagccagcactgtcctttttttcttgagacagggtctcactctgttgcccaggctggagtgcagtggtgcgatcttggctcactgcaacctccacctcccaggttcaagcgattctcctgcctcagcctcccaagtaattagaattacagacatgcgccaccacccctggctaatttttggtatttctagtagaaacagggtttcaccatgttggtcaggcaggtctcgaactcctgaccttaggtgatctacccgcctcrgcctctcaaagcgttgggagtacaagcatgagtcaccgtgcccagcctgaagcactgttcttttattcctttctcaacacttcctggatgctggctctgtgcaggggactgtgctctgtgctaggggcgcagtgtggcagggcctggtcccttgctacaagtgataccaggggtaatcagtcacccagagaaagcagcacatgcctcaagctgatgggggctgtgaggagagaagcgcagtgctggaaggcctctgaacaaggttcctgctgctctaggggttggggaaggctgggtggtggagctggggtctgactgaggcacaggcattggctaggcagagggctatgctgtgggaggggacgttgcatctgggcagaaggaagccagcccaaaggcccagtggcatgtgagagtgtgattttgtttaaggaactgaaagagagctaatgtagcaggattgcagggggtggtgtgagaggaggctgtgcagcaccatgaggccaggctgagcagttggtctttagcctgaggcattagaagcaattaagggatggataaatggatacattgtagcataccacgcagcatagtagacaacacacaaccttgaacccaacacaacacacaacacggaatgtgaaatacaaaacaatagacagcacacaatataacacaccacaccataccacaacaaaacacacaacagtctcctgttgccatccagcaggctccagcccatttggtaatccactgagrtgctgctccccataggccctgcccatggtccaagttcttatagaccatgtccctgttggcagtcccccacaggctctccgcataaaacagattcgtggcagcaggggagttccacaagtgttttaaagacttgaccttcctgaggaggagtttttgaagtgagtcaatggatttcatacatrcctacttgagtctgaaagtgcctcaggccaagatgcttatggggcttctgctgcagtgaggggcaggtggatgccaggtccctggtccagctttggctgccgcatcttcagttcagctgtgttagacaagatttcatcagttgtgccagtgatgaaaccttgatcacctcccccacccccatggacatggcagctccaggagcagctctgccgcctctgtgcaggcaggccattttccactatgcttggagtattcctctgacagggtggtgatcaggtgttgtggccctctccctttagctggaagtgcctcggagagagcttgctggccatgtacaatcatctcaccacctgtgagcccccacgtcccagccttggcaaaaggattgatttgtcggactaccaggaccccagccagcctcttgagtcctccatggtggtgacgccagttaacgtgatccagccaagcactgtcagcaccaacccagctgtggctgtcgccgagcctgtggtctcctacacctctgtggctacaaccagcttcccactgcacagtcctggtctgttggagacaggcgctcctgtgggtaagcaggccccctgaatttggcttccggggagaccccgttcactgagcccagcaggaatgagactgctggggagccctgcctccctagacagaagggtcatgctgatgctcatgactcaagtggaagtgggagcccccagccctagaggagcctctcagcctgctcacagtgccactgcccgtcagggccatttcagctctgaagccctgcagctaggaggacgggggatcagggatgcagctcctggtccttgacagttcccccaggaccatttagtgcctggcagccacattctggcacgaaggttgctcttaaccacttgtaatgtggaagctggcagaggtcccctcttctggtcctgctctcttgctgactgtgtacatcctgagttctttgatcttagaaaacagtcagcaaagttaccaaccaccatatgttttattgatttttattattgctagagttgtcaaaaatttttgacaaaagctcccgagccttttcttgatttctgtgtcactgaaaaaaagaatatctggcagatatagaagtttctgaataaacatgtacatggttgtctcttttttacttaatcatacatgacattcttctattgtccatatagttcacactgttcttttgctcttatcatattgctgagtgctcagagggtactgggtagggtcatagccactcactctgtccgttctgggtaacagagtgagactccgaagttcagccgaccagtgaggggatgggagggtaagggtgttgcttgctttgtagctgtggaaagtaatcttgaaatctggcttgtgggtcctgtgaagtcaagaaaggtgtgagagttaaggggtttcaaattaattttactcaggattctttgttgttgaagaagagatggaagattttttgaatgtcaaagrgtktaatgctagtagatttataaaagagggagattgatgtgtctgtgtggtgcatttttttcatccctgccaccgtgtaagattttaatttgcattctttgtgaaggtgatatttctgggggagataaatccaagaaaggggtaaaacggaagaagatttcagaagagagtggagaaacagcaaagcggcggtctgcccgtgtccgaaacaccaagtgcaaaaaagaagagaaagtagacttccaggagcttctgatgaagttcttgccgtccaggtactgtgtattttttctgattgtcagaaacaaacccacaaagctccagcatacaccatcartaacatttctcattccattgccaccctcttctctggtctcctcctctgtgttcccataacatctgtgcagatgtctgaagcacaaatctcactggagtaggatcttggatttttctcgcctcttcccacctctgaaattcctgaagtcaggagctgtgacttgttcatcttttgagagctagaagcaacatactcatgtccctgtgtatttacaagacatctatttgttgctgggaggcagaggggtgctgtgccttgggtgcagatgccctgaaaaccccatggaagggagcttccctcctgctttcagggagtccktgtctacttgatttgctccaggctcagcaggattcccttgcattctgagaaggtagaggaggagcttgtgaagtattcctgggtttcactcattcttagtgcttctcaggagcctaggggacaagcaggaaccaggctccccagagctgggagggacttggtccccagtgcttcttacttaggttttcaccagtccttctgcctttttttttttgagacggagtcttgatctttcgcccaggccggagtgcagtggtgctatctgggcttactgcaagctccacctcccgggttcatgccattctcctgcctcagcctcacgcatagctgggactacaggtgcctgccaccgcgcctggctaattttttgtatttttggtagagacggggtttcactgtgttagccaggatggtcttgatctcctgacctcgtaatctgcccgcctcaacctcccaaagtgctgggattataggcatgagccacggcgcccggccagtccttctgctttttgtccttgcctgctcacctccttcagaggctttaggatcctcaatttctgagccttcctggagtttatggtgccagtgggttggtttcttaatactcccctttctcctcccttagctgagtggagaggcctctctcggcagacaccattcttcatttgcactgggccatctgccttctaacagttggctggtacattttttgtctgctggggcatcctcgcctatcttctgtctttgtgagtttataccttttttactccttcgttgttactggaatggagtttgggagctaaccatatgtgttcgatatgccatctttaaacaggagttaaactatctagttctttcccatgacagtttatttcagtggtaacaacatcaaagtggtgaaggagaagccagaagctttaggtggtttgtaaatttattttacagcaagattcctaattttcttaatttgttgtctttctgaggtgaaggtgaaatgcttagaaataatgattgttctcagtacttgacgcagaaccaaagtggggctgcagtgccttctgatgaatttttcttaaggggtaataccagaagaaagtttctctttggaagaactgcaggattgttctttggttgatggtgccaagagatttgagtgaccctatattccccttagccctgctttttactccaaggtcttgttccctagtcccatttacctggatggtttcgactttctttttaatcttcattttagttgttggtttcgtttgtggtttagtgtctgctcctttgttgtttatttttgttagagatggggtcttgccctgttgcctaggctggagtacagtggcacaatcatagctcactgtggccttgaactcctggactcaagggatcctcctgaatacccaggaccacaggtgcacaccactatgcccagctaattttatttcttgttttttgtagagatgaggtcttgctatattgcccaggctgatcttgaactcctggcctcaagccgtccttctgcctccacctcccaaaatgttgagattacaatcttgagcaaccacacttaacttagtttctgcttctttgaatggtcaaggcaagagcaacatggtagctcgcctgatggagtcaccctgggagtgtgtgcaatacgtgaatgaagacattcacaagtgccctgagtgtttatgctgcaggggttctgggttgagggaacaccacaaggttggctgaaatgggtccttgggaggagtgcctgccaggagaggcatccccagtcccgagactgggcccacccacagctttgtgaggagccacggaaggaccaagttcagatgrgcttgatgtatcccccaaactcccacctatctatccgctttccaccttagttgttgggctcccatgaggtcctagaacacaccaggtgctcttctggcctgtgcctttgtacctgttcttgtcctgcatctttgtattgcaagcccttctcctcctccagtgtgtcagcatgaacattatcccctctcaaaggctttctctgaccctgctctctaaagcagggcccttttgacccatagtctcaagcactctgttgtgaggtggtccttatttgggttagtttgtgtacctgcttattggctgtgtctctctagagggtaagcttactgcaggcaggatctgccacatttagggctgctgtatttggtgcctagcacagtgcctggcacatagctggtgctcggtaatcatctgttgatgagatgaatgaccgagacaggatacagaccaaatgctggctcatgaggccctggagagaggcagagcctcctggaggcctgggttctggaccccaccacccacttattttagctgccttcttcctgactcagatttagtttctctaacaggaagagttcagrtgcttgtgtcagaacgtgtgttgtgactttgtgattttggcatgttacatgcaggttaagaaagctggaccctgaggaggaagatgattcctttaataactatgaagtccagtcagaagccaaactggaaagcttcccaagcattgggcctcaaaggctgtcatttgactcagccacattcatggaatctggtaggaatcgagcagtgtgaccattcactttgggaattcttcttcccactatcctataacctgcttatgttttgttctgggagaatggttctggggtgttttttagtgtggccaagagtctgcctggattagtcttggacctaagccctgtggtcagcttggaggtcttctgaaatgtccaggctcatacttgctatgctttcttatggccaaattcagagacttcgctttgcaaattgaatctatataagcacacctgttgagtgtgtatcagtgtataactgttgagtgagattagtgcacatggcagcacttggaggtctgcccttttgatgtccaccttagatacggagattcagagaggctcaatcatagctgctgagggttggagccaggcattgaacccagtagcctgatctcagcaccacaacgtggtatcatgtccacctggatcagatggtagagggagggaacagtctttactgtcccaaagtaaataggagaccctggcatggaaggtactctttattcaagtcaggttgttcttgctccccgggcagaaaagcaggacgtgcatgagttcctgctggagaacctaaccaacgggggcatcctggagctgatgatgcgctacctgaaagccatgggccacaagttcttggtaaggtggcctccaggcttggcggaggtcgtgctcagcgtctaccacagctggaggaggcacagcaccagcctgcccaacccgctgctgagggactgcagcaacaagcacatcaaggttagggggagcctctcaagggctggtattgaactgggaccagggcatggggacagggatcttgcatgggtgtggggctgctgttgtgtttggctgcatctacytgtgggcctggaacctggtttttttgtgggtgtcgaagcaggaagtcactgaacctagtttgtgcctagaaagctccctgatggctgagtggaggatacacttaggggtgagagtgggctcacggggctatcaggaggctgctgccatgccaggggagcagtggctgagatccagtggtaatagtggggtgctggtttgtggttgcagagctgataggttgaactagacatgggatgtgtgagggaatgagagtcatggggagggcttctcgggttgtttactgagtcacaggaagccttgccaggagaagctggaggaaagggaaacatttggtttgtttgagttggcaaggactgtgactgaggcttttgttgttgttgtttgagacagggtcttgctctgttgcctaggctggagtgcagtggtgcagtcacggctcactgcagcttcaacctcctgggctcgggtagtcctcccacctcagcctycaaagtagctggaaccacagccgtacaccaccacacccggttatagtcccagctactcaggaggctgaggcaggagaatggtgtgaacccgggaggcggagcttgcagtgagccgagatggcgccaccgcactccagcctaggcgacaaggcgagactcttgtctcaaaaaaaaaaaatttgttttgttttgtagagatgggggtctcsttttgttacgatgttaggatgtggtcttgccatgttgccatgttgcccagactggtctggaactcctgggctcaagtgatcctgatgccttggcatcccaaagcactgggatgacaggcgggagccaccatgcctggcctatgactatttttaacagatgataaaacagcagaagctaaatagcgtgcttagagaagctttgggggccaccagcagtagggggctgagcctcactgagccttgtcttcctgctgcattccacaccccagcctcctccacttggtgcctcctggagctcaagggaacacaaggtgctctggccccttactyctgttggaggtgggacactgaatgctgaagcaggagcaccaggaacattcagggatgcctggtggtctttctgacttgagagcacaggaggtagaagagcttgtaggtcagtcatcccttggtgggcaccctccactgagttacctcagggcaacctcctggcagcttctgcccaccaggccatgctcccctggggcagttgtgaaacagcaggaggaaccagggctttgatccccaggcaaagcaggctgatgatcaccttccagctgtgcccaatgggcaagtgccttctcatcactgagcctcagcttcctcaagtgccctgggaatggtataccagctgcccagaacttttaagggttgagttctataatttggatgcagtgtccgtcccagcacttggcaggtgacagggctgcctcttcaacaggacaagaactctgaagaccggtctcctggcctctcccaagtcttgtcccaacatacatccatgtggctctttttatgttctggcgagtagccactgattatcacttatgaaatggcaagtggatagaaagaattatatttttatcaaaaagtatagttttgtttccttccacagccccctaccccccacactgtgaagaggctttgtgatactgttcttgaccttcctgtgtctgtcctgcaggacatgatgctgatgtctctctcctgcatggaactccagctggaccagtggctgctgaccaaaggcagaagctctgcaggtaggaggcattatgtgttctgtggccaggctaatatctgaacccccagcagctgggagaaagctgaggcgggagactgagtcatggaatttagccttatatctacagtaggcacattttttgggttggcttgtcagggtcccagggaaatctcctggatactcaagaagtggttagcagtagctgagcccccagagggagccacctccctgctttgctgttacacaagattgaaggaagtgggatctcagttttggtgtgactgttcaatgcagtgctttatgtattatgtagcttcagtaatttttctggtgatacggattttttttttttttttttttttttttggtaagacagcgtcttgctctgtcacccaggctggagtgcagtggcatgatcttggctcactgcaacctctgcctcccaggctcaagtgattctcccatatcagcctcccgaggagctgggactacaggcgtgtgccaccatgcctggctaatttttgtattttttggcagagatggggtttcaccatgttagccaggctggtcttgaattcctgacctctagtaatccgcccacctcagcctcccaaagtgctgggattacaggcatgagccactgggcccagcttcattctgacttttaaactaccacctggtggaatgtagatatactcaatgctgtctgtaaaattgcttccccttgcccttgcccctgactctcggcagggggcagggtctctgcatatctttgtcttaactggtccaacctctctgatgcctgccactcagggagctgtagggctctgaggggcttagggtgcccctggagatagggtgggtgtggttagggccaagtgcaacttctgagaagcagaagggcattagaatgctacacatgaagttgactygttggcctgatggtttttagtgtctcctcggaactgycctgctggtatggtgaatggcagatttggacctgayttcccagggacccactgcctgggtgacctcctacagctgtcatttgcctcgtcccagcgcgacctgttcgaggatggttggctggagtttgtggtccgtgtttactggctgaaggctcgcttcctggcgctgcaggttagttccatggtcagctgcttggggagcatgccctgacacccagcagggtgggcagaaaattgaccatgttgagggtgtgtgtgtgtatgtgtgtgtgtgtgtgtgtgtgcatgcatgtgtacatgcatagcacctgcccgggcactgggcttggcatgagaaagtgtgacacagtggggaattctcagcatctcagacttccaagcatgataccaatctgtaaagctcttyagcataaccacagagctctggaaggcatttgctctgcctctacctcccccactcaagattgccttggcatcttgactctttgcttatgttttcctgagagagcccgagcaagtgaataaacagatacagagctttctaggagggaattattcacctgttttatgagagttctgggaaagcttcccttcagagcctggtctggaaggccaggatggattggctgttacctagcaccttgcacatggtggtactggtacactgtggtagaatgagtcaagagattgctagggccctgtcagcaaccatttagtctaaagaaagcaacactgtttgatgtgaagaacattagttctggaattaggacaggcctggcttctaattctggctttgctcaagtgtcctcagtgttttcatctgcaacatggggtttatgatatctcccctcgcagagttgacatggactgttcatttagtcaacaagtatttattgagcccaagctacatgccaggcctttcttaggggggtacagtgtaattggtaaaaaacccaccctcatggcctccacagtctagtgagataagtggtgtaaagcatctggcacatcatagtcagtcttctgctttggttccctgacctgttttccgtctaaccagggagacatggagcaggccctggagaactatgacatctgcacagaaatgctccagagttccaccgccatccaggtggaggcaggggctgaacgaagmgacattgtcatccggctgcccaacctccataatgactctgtggtttccctggaggaggtaagtgagaattttcgtttgtttgtttgtttcctgagatggagtttcacttttgtcgcctaggctggagtgtaatagtgcaatctcggctcactgcaacctacacctctggggttcaagggattctcctgcctcagcctcctgagtagctgggattacgggtgcccgccgccatgcctggctaattttttgtatctttagtagagacggggtttcaccatgttggccaggctggtcttgaactcctgacatcaggtgatccacctgtcttggcctctcgcagtgctgggattacaggtgtgagccactgtgcccagctgaaaggtttttttttttttttttttttttttattgatcattcttgggtgtttctcgcagagggggatttggcagggtcataggacaatagtggagggaaggtcagcagataaacaagtgaacaaaggtctctggttttcctaggcagaggaccctgcggccttccgcagtgtttgtgtccctgggtacttgagattagggagtggtgatgactcttaacgagcatgctgccttcaagcatctgtttgacaaagcacatctttcaccgcccttaatccatttaaccctgagtggacacagcacatgtttcagagagcacagggttgggggtaaggtcatagatcaacaggatcccaaggcagaagaatttttcttagtacagaacaaaatgaaaagtctcccatgtctacttctttctacacagacacagcaaccatccgatttctcaatcttttccccacctttcccccttttctattccacgaaactgccattgtcatcatggcccgttctcaatgagctgttgggtacacctcccagacggggtggtggccgggcagaggggctcctcacttcccagtaggggcggccgggcagaggcgcccctcacctcccagacggggcggctggccgggcgggggctgaccccccacctccctcccggacggggtggctgccgggcggagacgctcctcacttcccagacggggcggctgccggttggaggggctcctcacttctcagacggggcggctgccaggcggagggtctcctcacttctcagacggggcggccgggcagagacgctcctcacctcccagacggggtcgcggccgggcagaggcgctcctcacatctcagataatgggcagccgggcagagacactcctcacatcccagatggggcggcggggcagaggcgctccccacatctcagacgatgggcggccgggcagagacgctccttacttcctagatgggatggygtccgggcagagacgctcctcactttccagactgggcagccaggcagaggggctcctcacatcccagacgatggcggccaggcagagacgctcctcacttcccagacggggtggcggccgggcagaggctgcaatctcggcactttgggaggccaaggcaggcggctgggaggtggaggttgtagcaagccgagatcacgccattgcactctagcctgggcaccattgagcactgagtgaacgagactccgtctgcaatcccggcacctcgggaggccgaggctggcggatcactcgcgattaggagctggagaccagcccggccaacacagcgaaaccccgtctccaccgaaaaaatatgaaaaccagtcaggcgtggcggcgcacgcctgcaatcgcaggcactcggcaggctgaggcaggagaatcaggcagggaggttgcagtgagccgagatggcagcagtacagtccagcttcggcttggcatcagagggagaccgtagaaagagagggagagagagaccatggaaagagatggagagggagaccgtagggagagggagagggagtgaaaggttttaaatggtattttttagtcaaaggtttcttgtgatttggcatagttagccaagggttgacctgtttctgaggaacaagagagcttcccatatgctgagtggggcctctgttgggaagacaggagaggcctgggaaaggctgctgtagtacactgggacactgcagatccttggtggaaagcaggtgtgggagctctcaccagcactatttagaagcagtcattgctctgctctcctggctatgtgtggcagccaccccagtggaactggaaggaaatatcagctggagcagaccagtattgggctggccatggggttgagtcagcagtgtgtggcctatatgccaagttccacccaggtgccactttattcattgtgcagctccagaccctgctgcagttctgcatctgtgacatgtccacactggctgaaagtggccttcagactctcctagagttatttcagggacaagtacaagtacagagctgtctacatgccagggcttcgtcaggtcctgcatgtagcgtatgacaacctctggtccaggcttgctgagtctctgacaacccgatgttccgcagttctgcaagactggttcgccgaactgtgaccacaaggctgtccagctatcttggtggatgctttcctggaactcctctgcttctgagtagtttttggtttttgatgtgcttgttttttaaagaattggatgcctagccattaatagaaatacttttaacacatacgtttagtgtaaacactgatgtatgaaggaggaatctrattttttttgggctggaacatagtctaatttttattctcctcatccaagtctgataaaaacaaacactggccagatttggtggggcaggggctgaggggtttaccctcatacagcattgccgggcctttttcagattgataagaacctgaagtcgctggagcggtgccagtccctggaggagattcagcggctgtatgaagcaggcgactacaaggctgttgtgcatctgctccgccccactttgtgcaccagtgggtttgaccgggccaaacacctggagtttatgacttccattcctgagaggccagcccagctgctkcttctgcaggtgtgtgctgccagtgtccctcacacccacttgcaccttctctccttgcttgtttgtgtttattctctggaggttctgcggtagttcttaagaatgtatagctagaagagagtggatgtcaaaaccactaagcccccaggaagatgttagtcagaagatatggtcaagactaatggaaagttagaaccaaggagtgcaggttctagggttctgcgtggctcagggtgaaccccacacttgactcagaacttctgtgtggcagaggaggaaggaagaatggtcaggtcatcatctgtccatccacttgtttattcatccatcttgttttgtattgctttttaaggtaaatataaaagtggctaaaatatctgtacagtggaaagaatcaagataaaataaagaccaatgtgttgaagaaaaataacactagcmttatgtttgaaacctcgtgtgccctcctgaatccttctgtgcttctgttcctcaggaggtaaactcttaccaagagcctgccagggaactggcagctgctgggtgctgggcagttattcaacctctctgagctcagttcctcatttctaggatagggatgaccaatgtccttagctcagagtcctgttgtagggattacacaaggtaatgtgtgttggcaccatgcctggcactagcaggtgctgtggaggtactgctgtcatcgttgccaccatcctcaggagggttgagttggcaccgagataaacatggaagataatacgcaaaatatgcttagtggcattgagtcctggtcccttatgcttcatcctactaatcacattgtgttttgtatctatggggtacttccctttcaatttggaaagagagtcyagtcttctcccaggctttttgcacagattgcacgaagcattttaatcattaacattgttgaactgggaaatagttaagaggtgcgactatgggaacaaatggaagcacctcagtcatggggaaagggtaagaaagagttggtttggggaagcaggagggagaagggggtggagggaaggaggctccagctcctggcagaggaggtcagtcaggcccaagccaagatcagcggatgagatgtgtgtgacctgttacctggcaggctgcaaggtggcccagcatggctatgtgtgggagggacagccagcataccaggaagggtgctgggtgggagaaaggggagagaggccagtggtctctgcctccataggatggcctcartgctcagatgtggtcttgctcttattgtcttctagaacagctggatgtggcaggataccccattgatgggggaggaactgctgcttgggcaggcgctgagctgtgataagggctgtgcttgaggtcggagccgaatgctgtggaagctcctgctttttgtgaattaaggtttcctgattattgctcagttttgtattgagagtgttttcttattgatytggagtgcttttttttgtatattaaagatagtaatctttttctcaacaaatcttgcaaatatttttttcccaattgtttgcttttaaattgcagagaggttctgaatttttatgctgtcacatcttttgatgttttcatacatgtgtgattttgttcatggttcactgtgttttttgttcctatgcttagacagtctttccaagagtggagaaatattcatccatttgttctacacacatagcttgagcttttatggggtgcctggcactgggccaagaggaaggctgctctgagggaccccatgttctcgagggggggcagacaagagacccatcaacagagagataaaaagagtatttgcttttgttttattcccgcagtgttaatgttttatgttttgcatttaacttgtttcatttagcttttctcaagtggggcattgaacttgcagtcttttcctgtgggtgtatagtggcgctttcttccagtgggcaagctgcctattatgttcttcagtctaattggatagtttgtgtcttgttgagttgattcttagtccttaatatttttggttgctatattgagcagaatctttttgttgttcactatcttttccatgtattcctacgttgctggcttatagaaaccctattgatttttttgtgtttgagtctgggtgcttcactgagttcccattatttcttgttttctgtctggcttgttttattgtgtttgggtagatgattgtgttgcccccagtcgatggtaatttggtctcctcattcattggtgtttattctacttttttgctctgtctggccttgagccctggagattatgtcatattttagagcaccgttagcaggtccttgtcttgtccctgactttcacaatgactctggttgcatttagtagtctttatcatgctggaaaataatcctctggctctcacatgttgggtgttttgaccaggaggcatcagctcaggctttggactcccacatcagcaccctgtaggcaccctcgcaccccagtggcctcctggtaaaggctgctggctttctctaatgaaacacrggccccattttcctggcaattaggatttataaattggggggggttttgatctgtgttcagataccacaccacattccaaaggcagttccaggtatttctgaccccacacctgttggtctcacctcagagagtggcagctgcacatgtcaaggttgggaggagccgctgccagrcctgggctgtggcgaggttagagcccaatgggtcaccgggcagcaggtgcttcctgtaggtgtaacaagcgtcccaccagatctgtgaattcacagacaggctgtgtttccccatgcaccagcacagtgatgagagatcccaggcatttaaatgggttgtattctaggccaaaaaaaaaaaaaaaggagctttgcgaaaagcagtggtttccaaagagaagcttttaaaatagaagtaacagttcagtgtggtgttctgagagttcttccatgtgccaggcactgtgctgagtgtaatatgcacatcagctcatttaatgcccacagtgccgctgaggggatgatgtggtggctgaggctcaaatggcttacacattggccccatcagggcacctggggaggaggaggctgatagagtgatgactttagtgttgcctggccagttgcccctgttgtggccttggctcaggccctcctccgctgaggtagtccctccctggcagtctgcccctttgctgctgaaccccctccagagccctggcactggatgggcacagtggctctggggagagctgacaggtgttggggtgcctgtctcaccttggctggctctgcagcctcattcccagcatccccactttataaatggggaagttgaggtacagaggtgaagcctttctgaaagctccctggctggtgacattctctgctgccattgcacacaggccactggactgcccttctaggcacctccgggctgcatggggcctatgttgtgctggggctcgttcttccctttcttttgctgcccctcatctgttttccttcagttgtctctgctcaggccttgggcccagatgtgctgagctcaccgtgcacttcacctggcttcttgctgtactaggactccttgctccggctgaaggactatcggcagtgttttgagtgttccgatgtggctctgaacgaggctgtccagcagatggtgaactcaggtgaggctgccgccaaggaggagtgggtggccacagtgacccaactgctgatgggcatcgagcaggccctctctgcggacagcagtggtagcatcctgaaggtatcatcctccaccactggccttgtgcggctcaccaacaacctcatccaggtaacccctggctccttctcaccctgccctgccccagcaggtatgtctctgtgacatcctgcttcttcagtagttcatagctttcattgctaattaggcacccaaaggggacatgatggcttctttggttggaactttcgggatctgaggaggggtttgtgcgcaggctgcaaaccttcctggggctggtcggatctggggattagagactgtgtagcacttggtgccatggggttcttccagaccatccgtcccagaggggaagaaataacctcacggggaggccctggtctgcctgcagtgagccagaggcagaatgggggccagagcgcaggccgggatggctccagcatcccacggtatcctggcacttccaactgaggggtagtcacagcaccctgcatcgtccaggaagtctttaaggcagagaatcttcctctgaagcactctgggctctctcctcaattcccgctcaggccatcagcaagtcctgccaaatctatatcctcacccctccagcctttgtttctccctctgtcttcatctttctgctgtagtccaggccactgctactcttgcttgagctgtggcagcacacttgccacagtctcctctgcccgctccagccgctttccagccacagaggcacctttccaaaacagatatgaatgtgcttctccctcacttaaaacccttcatgttccctccaggttgtgtgtcacttaaggtacactgagctccaggcctgtctctccccctggtcttgtgcttccttggctgcagccttcctgggctaccccctggggtccctgcctgcatgcctgtcctctgcccccactccttgccctccctgggtgttggacacaccacagccactcacttggaaactttcttaataaggctctcacctgtctgccccacccctcctctgtgagccattgtggctgcatctgttctcattgcagcagccatactgactctttgcacttgtgtagcttgtccatggctctcttctctctgggctctcagctcccccatgccctgttcacaggacacagcacatagtaggtactgagggtatcagtaactgcatgtggcatgaaggagagtagtgtgactatcattggacactatgggtctctgtccgatgacatgctgaggatctgctaggttacagtgcccacatctgagcagtgggggtgggcaggcagcacataccagctccccaagaggcctcctgcctcccttcagtctgccctgaaggcttaccctgctgtgacacttctgctgtctcccaccccgcactgtcaggtcattgactgcagcatggctgtgcaggaggaggccaaggagscccacgtctcttcagtgctaccctggatcattctacaccrgatcatctggcaggaggaagacaccttccattctctgtgccaccagcagcagctccaaaacccagcggaggaaggtgcacaggcagtgggtgcagtggggatgagctctgactcccatgtccttgcccctgtcctctgccctagggtcctggaccttatccagacgttgtgagtggggctcagtcctctcaatcccaggattttgcatgcgcttggacagaggcagaagtgtccttggtttctccctgagggagcttactgtgcagtgggcacgggaggcctggatgtgtgagcattgtatgtttggtgcagatggcagcatggagggagtgacaagaggtgactacttatgacaaatgctgacactgctccaggaggccttgtatccactagctcctttaatccccatgacacccgaagggatggtaagccgagggcagcatggagtgagcacaggttccacatcccaactgtcacttcttagatgtgtgaccttgggcaagtcatataacttcagcctctatttccccatacccatattgggaataataatatctacctcagaaggttattctgaggatgaaatgaaataataaagccatgaatcaccatggtgggtcagtgcctggctcatggtgggtgctgagtgatgagaatccagggagggcgagccccagacccttaatggagatggcaatggatccatagtcagtgcaatggtagaaagtgtgctggattgaagaaacgacagtactgcagctaaatgacacttaaagcaaagattgcctgtaatcttatcagatagatctttttttttttccattttttgttttcttgcatttgctgtccagacttggcctaatgcacatctagtttgtgtgcagttgttagaataatatgtgtctattgatgcttgtattcaactagcttaaaattaagtttattgaagatttttcctcaataatttgtaaaacaagaaaagtggaaaggaaagagtcatccctattccaactgctcagagaaaaccagagttaacatgtggtttttctccttcccttcacattctctctataattttattcactgctcagaaagttaccagctgctcactacatgtcagggctctgtggctaggatacctctggccttgacaggtttgtgatagtgggagacagatcaactatctaacaccaggatggtgtggtggatggagaggagggcacctgatgctgcccatgggtgtgggtgtgggttgagttgagccctgaaggaagagcaggggcagaggaagacattggggaggtggagtggggccagggactgagcaagccttaagtcaggcaggagacctggggcatggggattggatatgggaagaggggccagattgcaaaaggcttttattttctgttttgtaaagctgttgctccattttgctccattgttttcatcatgctgatgagaggtgcatgcactattgaaccatccccgctgctgaacccttagtttggctgcactatttcattcttacgggtcatgccgtgatgaacacctcattcatgcctttttgcttgtacccaatttttttttaggataaatttctaggaatgaatatctttagagctcttgataattattacctctggtaccacattgttctccaaaaggattttagtggtgaaaaaaaacctaaagtttataactataaaagtttgttatttttcttagaaaaataacacgaaaagacttctggactgaaattctccttttcctcaaaattaattatgcaaacaaaaattagttttcaaaaaactgccagcaagtaaatgcggatagaggaatagtcaaataccttaaactttgaaaagtacatcaaagaaagagagagagattggaaaggaaaaagamagaaaagaaagaaaaaagaaagattctggtggagtggcagtagatgtggctctgtctctgcatgtccctcagcaggagaactgatggaagatagcaagttgaccaaatcctgggaaatattattaatattctcatttgtggagagtggcatgaggggaaacctcctccatcccacccttggccttggcagaggcaggaagagccacaggatcctgccatcttccagtgtgcagactgagctgagggaaggggccctgggataaaacacactatggttgggtggtgaggggcctggtgaggatattatcacccaggaaaaataataacagttatcacatactgaattctctggaagcagatactaagacagggtttataaggaaggcggaggaagcagaattgggcttttgagctgacaaacagaatgaaacaaaaaggaaaatcgtagaactgaggaaaacactgcaaactaaatctcaccattataaagtcataaatgcaaacagcatggagcagaatgaatatgacaaattggaacaattggttgcatttaagagccaaaagtaacagggcatggtggctcactcctgtaattcccacacttcaggagtttgaggcagaaagattacatggggccaggagtttgaagccagcccaggcaacgtagtaagaccctgtatctacaaaaagtaaaataaaatttaaaaaattagccaggtgtggtggtggcacctagagacctagctacttgggaggctgagaaaggaggatgacttgagcccaggagttggaggctgcattgagctatgaccatgccattgtactccagcctgggcaaaagtgagacctcatcttaaaaaaaagaagaaaaagtacaaaacaaatttcatgaaagaaagttattactagtggcttctgacatgttctgtcctgatccactctaaaaatgctagttataagtcgttaatgggttatggcccagagtttcaaaaatactaagggacctttataaacaaataatacttctagtggtaaacaaatgtgtaactggaattcagtagttctttttcctcctgttttactctttttcttctgtattattcaggtagacctaaatctaagaacttttaaggccaggcgccatggctcatgcctgtagtctcaacactttgggaggccgaggcaggccaggagttcgagactagcttgagcaacatagtgagaccctgtctctacaaaaaattaaaaaattagctgggtgtggtagctcgcgcctgtagtcccagctactcaggagactgaggcaggaagattgtgtgagtccaggaattggaggctgcagtgagctataattgtgccaactgtactccagcctgggcaacagttagaccctatctcttaaaaaaaaaaatttttttttttaagttaagaaatggcatgtgtagtatgggttccattgtaacaaattacttttctctcattcaaaatgcatcagatatgcacagatggatgctgtgactgaggttcaccagatgtcagcattggttctctctgggctggtattttgatggataaagtgtgctcctttatattttcctatatggcttgaattgtgttttgataagcgtgtattgctttagtaaagccagtcaagtcactacttatttaaaaaggcaaaaaaaaaaaaaaaagggaaaggaaaagtctgtagtcatgttgataaagacagaaaagcccgaaaagaggagactgagcctcgcagcccctgcaggcacgcaggttcccacactaactctgtgtctgtcggcctgggctttccctagggatgtcagagacgcccatgctcccatcctccctcatgctgctgaacacagcccacgagtatttgggcagaaggtcctggtgctgcaattcagatggggctctgctgcgattctatgtaagtgcttccccttgggctgcagactgccagtgcrgggcagggctggggtgggaggtggaatgggaaggggacagattcatgttggcacgctgggcttgcttggccttccctcagtgggcccactgtgtgtctttgacttactgcatttctcactgtagttaccgaagcttgtcagaaagtctgataagactttcttgccagaaagttcccttgtgtacctgaggctcaggaagctccggagctcttgaacagcaggtggatttagatctactagtccttactgagtttcttcctagtcaggcacggggctaggccttgtagttgtaatttcaggagtaataaccacatgcaccaccaccgccttctattgagtcctgtttactaagcattactcacaatgccaagtagtagttgctcattcaatagctattattacatccattcagtcactaaatgattagtgagagcacatacacttccttgcacttgtcagttgtgattgactggaagtagctccctgggtttactagggataagcagcacgaaccctgtctccaatctcactgttgagtaggaggccaagcagcatgcagaccagttacagagcacctggtgttcttcatataccaagacagggacctcagacccagcctataatatttattcgtgaagttctattgggatataaccatgcccattcatttacatattaactgtggctgcttttgcagtagagtggcagagtgcagtagctgtgatggaggtgtatggccagcaaagtctaaaatacttagtatctggccctttaagaaaacgtttgccatcacctgctctataccttctcttcagggaacaatacctgctctttcacaactgcaccctccctcccagtactccccatcttcctgtgctttcccctcagcgcttaacctctagcatgctgtgtgatacactcattgagtgtattgtgtgtctctgctccactgaaattaactttagagagagtagggggttttgctagttttgttcactgctggatccaagtacctagtacacacctggcacatagtaggtgcttaataaatatgggttaaaggagagtatgcatatgtatagagctcatgtatgtatagagcttgacagtttgcaagacacttaggctgaatatgtgatttgtccaggagacccatctggcccaggtccctgttgctggttagtgtctgaggcaaattccagccccagctccagatgcctgaatgtctcccctaccccgtgagctctgagggcctttgggatgctcaccctgggtcagctctactctccaagactatttttggaagagttttgccaggctgagtctgtaatgctgcccaggactcagccactccctttttctgccttccctctgccaaccaaccctctgcagggacagtctctgcttccataaggtcacctccacaaggccatcctccttatgctgattgggaagaatgagttaataccttaggctagcttgggtgggagtggtgctaagagtgaaggggtgggctgaaggggcaacaggatggtcctatttcatttttcttaatctgtgtcttttctactggagcatgaattctagctgctgatatctgctaatgaatttgagggagtagaagtgagttgagcactgttgtgtttcattttgtagttcctgattttcctgcccaaggcccagcctttacatttctccaacctttgcagcagctctcctgaccaccctgtgccttctgcctgccatgctattcctcagcttctgcatgactggtttgttgtttccttcctgcattttcaaagaggcttttctctcttgccacatgctgtcctgtctactgctggggacccccaccatttgtttctgtcatgtgcccctcccccaccagctagcatccctgggaccagggaccttttctgtcttgctgtttgaagcatccctggggcctgagcaatacctgacagactgctgcccagttgtatttcttgaatgaatgaatgaacaaacataaagacattcattaatttccccagaaatgcttgctgagcactcatgattctgggtgccatggagggttatgaaggttgaatgcttcattactacctcttcttgccccaggctcatggtctgcaggtaaaaggattccatcttgagagtgatttgaggccaacatcagggagaccttttgtgtggattattttcttagatagaatggaaatgttctctgagagaaatcctcttgagtctcttcttttcttgagttatttcttttcatatgttttacttgggttgatggattcttatctgttcatctccacacagctcaaatggcccctgtgctatagagcctttattaatacctggatattccctcttacattgtgtgcccaccccccttctgtgtaccacacccagattttatatgtgttgacaatctgctgtatttgccacaaatttgtcttctgataaaaataagagttaacaagaaagcatgctcttcactaccctacctccctcactctcttgaagctggttgtgtatctttttgtccacatttttttatacctaattatgtatctgtatgtcagtaaatagtatatagttacatgagttttaaaattttacatactaaatatcatatagtatgtaacctcttgcagcttgcttttattttagtatactgagatacagttacattgatacaagtacatctagtttattcattttaattgctttacagggttctattgtgtgagtatatcatgctcttaaactttttagtatggaaaattcccaacattattaaaatagaaagtatagtgcacttccatatactgagcactggttagtcgttattattcataacgcatgtccactcccccacctaccttcccaatcatcccacattattctgaagcaaatcctagacatttatatcaattcatctgtaagtatttgttattattttttaaaacaattttcctaatatggcattaaggttgtttatccattttgggagttacaaatgatattatggttaacgtccaccaagaggttgttttatgtatacatgtgagagtttctcttgtgtagattcctgtaaaaggaactactggatcacagagtgtgtacattgttaactttaaaaattttattttcagattattctccaaaattattgaacagttttatacttttgatagctgtgtgggaattcctgcacatctgtgtcagccctaggtacagtagacttaaatgttgatgcccatctgaaaggcatgaaatggtatttcattgttctttagatgttctttctaataatttataattattagtgagattgaatatctttttatgcctgtttaccccttgggtttcctcttatgcaaattgcctgttcacatgatttgcccatctttctagtggtttgtttttctttttcctattgatttgcagtttttttcttaaggtactctgaattccagtcttttatctgatacataagtttcaccagttttacgtgcacatattgtgtctgtgtgcttagttctatttctatttctgtgcacctttatgtgggatatcttttaactatgtgtatggtatttgttttacagaattttaaaatttgaatgtcaaatttattagtcttctcctttgaggtttgtgattttttgagggatgggggtacttttacttccctctcacaaaattatgtaaagatctcctttacattagtctactagtttgctcttgtatttcatgtgtctgtattccatctaaattttatttttgttaaaagataaggcaggaatccaattttacattccacatgcatggccagttggtttttaccattttttgaagagtctgttctctgtgctgacttgtaagtcaccttcttacatgttggctctgttctttttattggcataggagtcttgtccgttcctgacaatactgaattgtctttgagagattttgatacctggtagggttaacctactcacgtacctcttagtctcttggctattcttggccttttcctcttctgtaccattgtacgatcactctgtaatgttttatgatatccaaccccctaacgcaaacctgccattggaattttgattggaataacattgacctcacagattaatttgcaaaataattgtcatttttgtatgattgagtctttctagtcgtaaatgtggtatatctctctgtttatttaggtcttatgctttcatgtcccttaattcagcttaataattttctccataatactttttttcctttcactctcattttttcaaagtatagctgtaaaattgttgcgtatattttgttagattgttgcctaggtttcatttgtttttattagtgttgtaaatagatatttaaatgttagtttttctatttggtttttgtgagcatgcaggagcactagttttttgaataattttttcttatgcacagctcctttgcttattgcttctattaattttagtgggtggtagacttgaattttctatgtagacagtcatatcatccacgaataactattttttccttccttttcaatccttatagtttttttcttttttcccccttgtcttatactctttgccaggggtcaccaaagcttttcctgtaaagggacaaatagtaaatctttgaggctttgtaggttctagggtctctgttggaactactcagggcttccattgcctcagaaaagcagtcgtagatattatttaaatcagtggctgcagctttgttccaacaaaacttgtggacgctaaaatttgaatttcatataatcttcatgtgttaaaaaatagtttttttctgttaattttttttcaatcatttaaaaatgcagacatcgttcttaactcccggcctacaaaacagacaagggcaggatttggcccatggggtggtttgccacctgtggtctagagctctctctctctttttggggagtgttataataaattctaaactactatttctttagtgattataggtccaattagattttctcttctcaagtcaattatattgttttaacagtttccacttagagcataaggctgttcatggtttctgcttatgctttaaaaagttctgtggtacctcgagttatgcccctttttcattgctaaaatagtttgtgctttctccccccaccttttaaaaaccagtctttcatgaggtttgtataaattagtcttttcaaattactgactattggtttattgatccattttttctttgctttctagttcattaccgctttaatatttccttttacgttctttgaatttactctgtattgtttctaacttactgaattgaatggttattttagtattcactctttttttttcttttttctatttttattatttttaaaaattttgggccaggtgcagtggctcacgcctgtaatcccagcactttgggaggctgaggcgggtggatcacctgagatcaggagttcgagaccagcctgaccaacaaggtgaaaccccgtctctactaaaaataaaaaaattagctgggcatggtggcaggtgcctgtagtcctagctacttgggaggctgagacaggagaattgcttgaacccaggaggtggaggttacagtgagccgagattgttccactgcactccagcctgggcgacggagcgagactccatctcaagaaaaaagaaagaaaatttgttttcttctcaggtcttccttgattttattctctctctttttttttttttttttttttgagacagggtctcactctgttgcccatgctaagagtgcagtggtacgatcacagctcactgcagcctggacctcctgggctcgagcagtcttcctgccttagcctcccacgtagctgggactacaggtgtgcaccatcatgcctggctaatttttaaattttttgtagagacagagtctcactttgttgcccaggctggtttcagtctcctgggctcaagcgatcctcccacctcggcctcccaaagtgctggaattacaggcatgaactgctgcatccagccagtattcacttttctaatgcctgtattgaagactgtaagttttcccagatacatctttgtctgactcccatatattctgatatttggtgtttgctatttttatataattgatttctaattttattgaattgtgttcagctgaggatgtggtatgtattatatctagtttttggtctttgtacttgcttttcatccagttttggcaaaaatctcatgaatgcttgaaaataatgtgtatttgctaatagttgggcataacaatagccgtcggctctcatattcttagatgtaacttgtttactatgttgttcacatcctctctgatcctcatttatgttttgtctgagggagattctcttagccctaatgagatttatcatcttatgttatarttatttgtttatagtttaactttattctctccactggaatctgaacttctaaaaagcaaggactatacctattttaagaaagtattcagtaaatattcgttgaggaaatcaatgactaaataaatgagtgaagttcccaggaggcaaatatcttcttctggtggctggtagaaattggctaggtgtgctgaaagaaaggcagcttggtaaacccatcaggaggctactgttgggcccagaggtgggaccagaattactcctattaggataacaagacttttccaggaaacaggtgtttttggaatcaagtcatgcaggagcccaacagacatagccacctcaggttaaaagagttgatagagtggtggtttctctggggccctgctgtgacagggaggcagtggctacaggccctcacctcaggccatctcttctgcccaccacaggtgcgagtactcsagaaggaactggctgcatccacctctgaagacacgcacccttacaaggaggagctggagacagccttggagcagtgcttctactgcctgtacagcttccccagcaagaagagtaaggccaggtacctggaggaacactcggcccagcaggtgagggtgctgcaataggcccaacaaagagggaagcaggagctgtaagctcttttgaaggatgtcatatttgtcaacagtcatcttggcagtcstgcttggagttgcatcagaaggaggagagaagacggtctgatgagtgtatcaaaggacaagggtttttcttgcaaaaacttattttcataaatgttgactgacattcaactaatgttgactaatatgtagaaccagatatggtggtgcatacctttagttctagctgctctggagggtgagggtaggagggttacttgaggccagaattttaaggctggagtgcactgtgattgcatctgtgaatagccctgggtggcagagcaaggccccatctctaaaaacaaacaaacaacaaacaaaactaccctaaaaccaaaaaatgtagcatggcagttgtcgatagtttatttctattttggatatgaataattccttagaggttttccatttttgtgttgttttggtttttagagcgctattgagtgtattatctaatggctcctcagtactgtcagttattctctgatcttagggattccatccactaaaatgtaagctccttaggacagagcccctgctgtggaccccaaacctagggccactctccctggagtcagctctccttcaatattttgtctaccaagtggagagggtctgtggctggcccaaggtccccacccatgatggaacccaccctctggctcagccacgtgggcttatagagcgcagcttgtggtttctaatgtctgtctttctacagactaggcttatgcttttcagacacttggatttggggattatagtgggcatgcagattttttttttttttttgagatggagtctcactctgttgcccaggctggagtgcagtggtgccatctcggctcactgcaacctctgccgctcaggttcaagagattctcctgccgcaacctcctgagtagctgggattacaggcgcttgccaccgtgcccagctaatttttgtagtgcagattttttttttttaagtataatggggatttgttttaggctctccaatatgccataacctcatttacattggacaaagtgcgtttctatggaggaatgcaattttccttcttcatttacmctgaatgtgttrctaatctgccttctgtctttttttcaaggtggatcttatatgggaggatgcactgttcatgtttgagtattttaagcccaagacccttcctgaatttgacagctataagaccagcaccgtgtctgctgacttggccaacctactgaagagaattgccaccattgtgcctcgcacagagaggccagcccttagcctggacaaagtctctgcctacattgagggaacttcaactgaggtgggcccacaaccttgaggacgtgggggacagggctgggtcacactcttccgctctgccactgctgtatatgctcctttgcttctttttctgctctgtaccagactgaggggcaggagaggctggagagtctgtcctgtgactaaacagtcctgggtttactggtcacatctgagtccttgactccacctcccctcatacttttcctctcacctgccaggtaccctgcctcccagagggggctgacccctcccctccagtggtgaacgagctttactacctcctggctgattatcatttcaaaaacaaggagcagtccaaggccatcaagttctacatgcatgacatctgcatctgccccaataggtcagtgaccagatcatgaggctaggctggctgcagggatgactggggtgactccagctcagcaagctcttcagtgggccactttggggtttccctgtccattgcaaagagaccagggaaaacggaatgagagggtggtttagcactttgctgttgttaggaaaggcaggttttccataaaaagaagagcagaggagaaggcctcttttccaaagtcctctgggagggttattggtaaagggttattagagaaggtacgaagtgtccatctggaccctggtgtgcagggcaaggaggcgcaacctggctccatcctgttggttttgtgctgccccctttcacagccccagagtgtgtactcttgctgcttccactgcaggcttcttaactatggttgccttcttggggacaagtaatagaaaaactcaagccagagttctcttttttgctctgatgcagtgcactgttagcagtagcgattgtcatgatagtacatgtagaagagctcattgcacatgaagctcatgctctcttcctgtggaaccctgtttggctttctcttaaaatgtagtgattgcctggagcctctcaaggggccttctacatttgtaaagtttgatgcacttgattaagagggaatattttttcctacctaggaggtaagccttgggtgaaggtcaaaaggaggctaccctctgtggcagacctgcatctaaagggttcagagtagcatctgtaggcacactttctggaaggactcagaggccaggctgtgatagctgcccttgagccatgggtgagcacagagccaccctaactcagggaaaaccagagaattccaccttgtcaggatccatctggccaagaagagaagggactgggtgtgagtggaaaagccagtttgcaagacttgtgtagattgtgtgaaaggttctcacagaacttcttttgcttagcctgtggtttcttccagtcagggagccatgtggcagagccctggccgtcctcttggggtgactgggaaccagtgtgatagagcagacctatctatgctcagtctggctgagtgyttactgcgccacagttcaggtttcctcgtctgttcccctacttccacatctgaaaagtgagggtgataaaacccacctgtctttgcatggcacctctcacctgacagccccttattcaacagaattaaggctcatggcagcttaactgggcctccctccaaccttcatacctgcctgtttagagggtatcaacccatcagcctggcccattaggcaaccctgccacagaggcgtggtctcccgtgggattggccccagtgccaggaaagcacttgatggcttgatcctgggctccaggccttggccactttcgttctggccttaamaggcaggtgctaggcgagacttggtgcttagtctgctcttctgtgctagcagtgcattaaggacgattggcatgtgtgagggtggcgtctgtccatttgattgctgccttttctgttctttgtactagcattcagcaagtctcagactatcaagtgctcagagatcatcttagtcttggtgtctctgtggccattcctcctctcagacaggtttctgtgttctcactatcagtttctttcgggtggtctcagaawggtagggtctcagccatcatgtggtccctcacttttcattttactgctgagaactgagctggaaggggcaggatctgctcagggtcccagagagagaatggggtagaagctgggttgctggggtccaggggtctctgctgcccatgattctggttggcaaatgtgctaatgacaggctctgccagcacagaagtaggtaagatcacacctggctgagggtcttcctggtgctttagctggactgctgctgccttgccttgtagagcactccttttcctctccaccagagctgttctgtgggcaacccctcaaagcaggggaacagagtccaagagctcatccatwagagtacttactgcatgcctattaggcgctgggtgattaaaatacattttgtctcataatgcccacagctcttctcttgaggtaggtcttcttagccctgtgtcacaggttaggaatgaaggctcagagacatgactggtctgggtcatggtcatggcattagtgagtggcagagttgggctctgagccctggtgtgggaagggagtttccatggggtccatctgcctgtccactaggctgtcattatcttccatgcttttcatgtagtgttgtttttagctggtgcttttgttaccaccacaggtttgattcctgggcaggcatggctctggcccgggccagccgcattcaggacaagctgaactccaatgagctgaagagtgatgggcccrtttggaagcatgccacgcccgtcttgaactgcttccgtcgggccctggagattgacagctccaacttgtccctatggattgagtatggcaccatgtcctatgccttgcactcattcgcctcacgtcaattgaagcagtggagaggcgagctgccccctgagctcgtgcagcaggtgaggagggggtgctgcagatgggcttgccatccttctgtccagacagagtgccctcaggtcaacgaagctctgtctcattcgtactttattcttgtccacacatccatgctgggagctcactgacgaatctccscatgaggcttaagccataccatggtcagtgacaacttggtccctggtctttggacacccagtctagtgtagacaaattagggacaggctgttagacccagctggtcagccattagttatagtgtagttgagagatagggaggggagaggtgttggccaccagaagtagctatttcttccctgttccctcaaaggagcttgttggatccttgtaaaattcttgagcttaggttgggatttttgaagtctctcttggtaggggattacactagtgcaggatactgagtctggcccttaggtctctgttcagtagggtacccttggctccttgagatggaagtgaaggagccatactgacatgtttaggctagtgcagcagtagcagtagtgcagtagcactgcaccctagagaggataggggaaagaagtgtcagcaccgcctcctctttaacattaccgtctttaaaaaaattactcttggccgggtgtggtggctcacgcctgtaatcccaacactttcggagactgaggcgggcggatcacgaggtcaggagtatgagaccagcctgatcaacatagtgaaaccccatctctactaaaaatacaaaaattagccaggcatggtggtgcatgcctgttatcccagctcctcgggaggctgaggcaggagaattgcttgaacctgagaggcagaggttgcagggagctgagatcatgccattgcgctccagcctgggcgacagagtgagactctgtctaaaaaaaaaaaattactcttaaatcttacaagggacacaggcttctctaaatcagttgcagtatacaatattaagggcaaagctcaaatccctctggctgcccctactacctcagaaacaggcttgtttctttccagactgtaaaaaaaagtactttttatacataaatatgtactcctagaaaaaaacaccaatctaaatgctatcacactgtgtatggtactcagcttcctttttcactcagcaccacactgttgagttctatccatgataattcctgtggatctagtacattccttttaactgctgtaaccctattttattgtaactgttctgcactaaagtcccttgcgggattctgtttgtgttgcagtggccccagagttgggcaggctggggactgaagctgctgccctaggatgcagagcctgactccccaagaggccttccttgtaacagcaggagcaccattatcctctgctggggctcagtgggctgagctgatcatggttcttgggattttctccctaatctcccaccaatgatggcaaatgagatttggcagagtgggagttttccaggaaataaatagggtgagaagtcagagttccctttctgccattggcacttgtttgtagagctttgtttgtagaggttcccccaggaagggagcagggaagtcagggagtgggtaaggagactgagctcaagtttccacatactttttccctttgctttgttctttcctctacttaggctcataacctttgggactgaactcagtgttgatcttatggaagccattggcccaggaagctcaggtcctgaaactgggttcccaagccatcttgttggagtgttagggtggcaggagagagatggaaatccaccaggaatgcagatgtcccgacagggagggagggaaggtagggggaggtgtttcatagttgccgagggtgaaaactaccttgcagagctgccttgtgcctcctgggttttttccacctctggagagacagcttccaaccctgaaatgtgtcacgaggacacagtcccctgattgctacttttctgtctggatttattgtgtctggaggatgggctgcaggacacatgttggcagctgttcgagctgctgtgtgcttcagcttttgcccagaaactcctcagaggtggtggtgtaggagaacaaatgctttccccatgatgtcagttctcaggcaaggggaaaggctttggagccagagcgttctagctgtatgacctggaagcagtaacctgacattcctgttgtggttccttctccaaggcagtattgtgagagttcattgggaacacctgccatcagccatttcctgagcccctctcatgggcaccccatatgcaaggtgaatgaggtgcctattctgctctgaggatggcaaggtagtgagatggtgtctagtagagcttctgaaacacagcaggccctcagtgactgtccctccttttcctgtctgaggtattgtgacctccacaccacaaggacagggacattggcattgtgccctgtatggggaaggggtgggggcttagcctcttcccaagggtctgcatggtaccagatgccagcccagatgggccacttcacagctaccctttctttcttggcaggtggctgttacaggtgccagtggcagaacagggtgggcaggggggctagtgacttggtccaggtcacacagctacaaagcaattcaagtagaaggacatccttttagccattgccttttacttcagcacatttgccacagaatcccatcttgaaggggatgtgatggagtcacttggttggtcccgtgtttgaccctgcactgtgatgctttccactgtatttcacccattgatgatctcccacttcctgtgtggtcatttttttttttttttttttttcctgagaagtgtctaacagagcactgggtagcacattgctcccttatttcagtcctggggccattgctacagggttttcacataaacaagcacccactggagagacatccaagggccggctcaacctggctggatgagaacatgaggcacttcctgcaggccacagcagctgcccttgccagagactagtgcctgcagactcatcccctctcactggcccctgaggtcaggcaagaagagactttggcttccctgctatcaatccaggaccacagagaggagggatcagagacctgggctgctcagagcagctctgtgggcttgcacatgcaggcttctctctagcttccagcccagagttctggaatcaggggtcatgaatttggctggcagctgaccagtattggaaagtagtgcctcttaaaaggtgaccctcttttccttccttcctagctagctgtttccttccttcaggctgtgagagggtggctggaggtgcttgctgcaaatgcagactcccagtcagtggctcttaagtggggctcaggaatttgcccttctacaagtactccacatctgtcttaaagagcacagaggagatggtgggaagtcctcttgtaccccaggggtacacaccctctcctgtgcagtggaactgggtgctaaatacatgccctcttcagtgccgtagggctgggtgctgagtgttagtaaatgtcctctccagtgctgtggagcagggtgctaggtgaatctgcattagatgctgcagggggaaagcagaaaaaagtaccctggttgacatggggtgacctgagtttaagtcctgctctatgccttgcttggtgggcgcttttgagaaacccctaggcctttctacacttcggtgtcaccagctgtgaaatggtgagggcatttctgtgtcttggttgttaagaggagtataaacttgcaaataggtcggcagagctttgtacaggaaaaagtctgatccctgggcaggttcaggcgtaaggccagcccagtctcatgatcttcttacagatggagggccggcgcgacagcatgctagagacagccaagcactgtttcacatcagcagcccgctgcgagggtgatggtgacgaggaggagtggctcatccactacatgctgggcaaggtggctgagaagcagcagcagccacccaccgtttacttgctgcactacaggcaggctggccactacctgcacgaggaggctgcccgctaccccaagaagatccactaccacaacccacctgagctggccatggaggccctggaggtgacaccatgctggcccagggcggggaagcagggcaggggcaggctggtttctttatctccctgggcatgtggctcaaggttccagtgaccgtccttcaacctgccgcaaacttatctgtgttgagcagcttcatgtgcaattgaattaaaacatcatttcctctcttttcccaaggggtgtttatcatcctttctgggagagtgaccattttgttcttatctctcagaagaaaattgtctttcctcactaacacaggttctaagaacctgaccttggtgatgacagtcagtgctacatagcatctcccaggcccaggacattcacaccctgtagcctggcaggagggagggcaggcaccattgcctccagggtgcaaatgagacatccaaagcccagcctgtgcccaggctacccaggttggcaggggctgagctagggtgagcagcctgctctcttgacccccagtttggagtcttctgattgttgttcaagaaaagagcagttctttactccctggattttctctcatggtttccagagtgtttctgatgaatgctgtcactgttgcttatagcagtcttgtgaggcaggctgggcagccacgattgtcaattttgtaggcaggaaaaccaaggacattggtagagatccagatgtccaycatttggttcagcccaggacttgaagcttctgaaggccctgtgcacgttggctttgccctttctgaggctatgtgcccagtctctaccagtctcacgtgcccagcaagcctcttggagtgtggacagaatctgctgcttgcttttttctgcctttgtgattttttttcctgattataaaagtgtgtgtgtgtgtgtgtgtgtgtgtgtgtgtgtgtgttttaaagagattcaaacaactcagaagtgtacagtgtgaatgtgaaggcccctagtgattccagtatgcccctccataatccctaagagtttgctatgtccctgtatgtccgaattttttcctattaacatataaacatatagtaacattttcttatgattttgcagcttgycttttcgctggacaaaatttaatggaaggtgtggtgagcttccctgcctgccctagtgccctgtagtttagcagggcgtttgtttatctgcacggacccttgataggtttggtttcctctccacttcttgctatgacaaggcacaggcagtgcatgtctttgtacttgaagcagggagcacatcatgagtatttccaaggactagagtccaaaggtggaattgccaggttgtttagcattctgatcaacaatggctacttgccccaaggtcgtactgactgatgagagtgtttgctttccctcagccatattgatgaggttctctttttaatatttgctaattttgtgagcaaacaaaaatgtctcattttggctaggtatggtggctcacgcctgtaatcccagcactttgggaggccgaggtgggtggatcacctgaggtcaggagttcgagatcagcctgaccaatatggtgaaaccttatctctactaaaaattagccaggtgtggtggtggaggccagtagtcccaactacttgggaggctgagatgggaggatcacttgagcctgggaggtggaggttgcagtgaactgagattgtgccactgcactccagcctgggtgacagagtgagaccctgtctcaaaaaagaaaggaaaaaaaaaactcatttaaaaaaaaatgtttgggccaggcatggtggctcacacctataatcccactgctttgggaggattgcttgagtccaggagtttgagatatagagctggggatctcagagactagygggcaacatgatgagacccccccatctctacaaaaaataaaagattaacaaggcctggtggcacgcacctgtagtctcagaaacttgggaggccgaggtgggaggattgcttgagcccaggaggtcgaggctgtagtgagctgtgatcacaccactgcactcacagcctgggagacagagtgagaccttgtctaaaaaaaaaaaaattaaatttgcctgttttggggccatattcactgggctcatggagaagtgtggaaacacagcttcctgttgaacgctatctcaggagcagcagcttggctgcgctcattcgcggcgttggatctccgtccttccctgtcatagtgctcatactgtccacctgggggcaggtgccttggaagaactccactttgggggtgagaagggtaaggcccagaggagtgatgtgatgacttgccttaagtcacctgcaggaacagagaggagctgggccagatgcccactgagcccagcattctcatatggcacctctgggaagccactgaacctacgtgtggccctcaggaagatgatgtcaactctgtttttcctccatgtttttttcttcaagatttggcctctactactgcctgatagagcagatgagcaggcaggatggtagccccaggggtaccagcagcttccatatgaggaaccaaggccttagatgtgtggcctaccctctcccagcacacagtgctggctccaaggagagcaagcacacatagttaatttggggggcaacccattccatgcaaccattgtagctatgtaactttgagtcagctggtaaatatgtatatcttgtgttaaaaatgacatttctggccgggcgcggtggctcacgcctgtaatyccagcactttgggaggccgaggcgggtggatcatgaggtcaggagatcgagaccatcctggctaacaaggtgaaaccccgtctctactaaaaatacaaaaaattagycgggcgcggtggcgggcgcctgtagtcccrgctactcgggaggctgaggcaggagaatggcgtgaacccgggaagcggagcttgcagtgagccgagattgcgccactgcagtccgcagtccggcctgggcgacagagcgagactccgtctcaaaaaaaaaaaaaaaaaaaaagaaacaaaaatgacatttctctgaagatttttaactctgtcctgacaaaaattctcctctgctattgtgccttcattcaagaatctttactcgccacttggatgaactttaccagttgaatgctttgccctcccccaagtttggccacctgattgtgcatgggtgcctcgagtggtttcctacatctaaaaatggagttgctgggccaatttctctgggctccataggtgggctagaggtggaggggctctggatgtgagacccctctgtctgggatgcctccttgagagtgctgccagcaggttctcacctgggtgaggggggccacttagccagggcctgcaatggcagttctcagccctcataccacccactgtgccctccaagtgggagcctgcctcacacccactcctgcatgagaagatcagggcagacctggttttaacctggccctgggcattcccggctgtggggccttgggcagctcttcacccattttaaattgaggaatgtggtaaggacttgaggaaatggaggaaagcacagggcccaatggatgcaatgagctgcctgcccacccacccccccaccacacccacggggaagacgttttcgaggcctgtgggtgcctggctttgcctgggggctgggctataaacagaaatccaacctagtccttstttcagggagtccagagttcagtggggagacagatgtagaaactcactttctatgggtgcccactgaagggcacaaagagaacagcagcactgtggcgggaggcagtgcccagtgaacggagctgaagggttatcataatgagtggttattactctcatctcactaccatgtgcctgagttactgcgtgaacgtttaagctggaatgctgacagtatacattttaattttcacagcttgttttaaattagttgtaggatggttggtttaaaagctaacaaaaacaagcagtgtgtggcagcctgttgccctggtcatgggcccatttccagtgtggctgactggcctgtggaacaaatcttagcaactgggaaggctgctcacactagaggtgtcgttctcctaggtgtactttcggctccatgcttccatcctgaagctcctggggaagcccgattctggggttggtgcagaggtcctggtcaactttatgaaggaggctgcagaaggaccctttgccaggggcgaggagaagaacacacccaaagcttcagaaaagtgagtagcacccttyaggcgacccctagcagcttaccccatctgcatcccagatggctcgtttactgcaatgtgttgttcagagggttgctacacagtaaacagtaaactagaactcatggagtccctaggacccatctggaaactcccatttgctgggccaaggtatttctgttgagtctgagaaggagagggtgagtgtgagtccccttaccctgtggtcatgtgtggtgctaccccaccctaaggggaagtcctggggagaagctgatgccctcctgccctctccactggggcacagctctgttctgtgcagaacactgtagaaagtcagtttttgctttgcagactctcacccctgggtcctttgccaaggccttgtctgctgcccattctcctgagaagcagtgggaagtgtgggaagtgtgggcttctcatgtggtgccagagagctcggagagactggggctcaggtgtggtcctctcagtgggcctggactgaccccagtctccctgtggttgtaagtcatctccacagcccagacttctttcactccaggcccaggtcctggtgccgccccatcctcaggggcaagtcctagggagaaagatgggtttggggtgacatggggaatgttgcagctgcccattaacctgatggactcatgctgattcttgtgcttctgagacatgctcagggtcaccacctgccagcttgcccacatgggagccaggggagggctcagctcaccccatctctgagtccgctgcctagctgggcactgtgcgaaattcagctgacccctgcctgactgggcactgtgcggggttcagctgagtgccagagaggcctgcacccaggccctgtgcttgagggctgtctgcttctgaccacagatagcctgtgtgatgttcaccacaggtgagccagctccacagtcggtgtgcccctcaggttatggggaggttcacgtccatgcatggcaggccactcaggtgggcagccgctgtgctcagaatttatagctacccatttttttagtcacaaagggcccccaacatacaatgatactttctttcattggttataattctgttaaattttttttaattatacaaataatacatgaatactttcttgttatagaacattcaggtagtatataaacatgtagactaaaatgtgacagatctccttccaagagttagctactattcacagtttaatttcctaaatcattttctgtatatttataacacttaaatgcacacatacaattgtaaggtttcatttattttataaaaatgaactacagaaggtattgttttagagtttgctttttcccctgacagtgggtctgggcaacagtccatggagatagtaccccagtcacttcattctttctagtggctacttactataccatagtatggatgtaccatgttttatgtaaccactccaatggacatttagagtgtttctaatgtttctgctcaactatgttgcagcacatatccttgtacatgtgtgagcatgcagtaaatgcaratgtgtttctgtctgcccatttgtcaggtcttaagtttgtcaggctgtcacacagaaggcatagactttgcatggagagatgcaagggtgcttctgaagaaagactctttggctcctctatagagcctcttggggcctgaaattcagagatgcaggtcgcgccctgccagaaagattaggcagtgtccagttaggagccagagcctgtgtgggtgctgtaggggcaactatgggctctgtgacaccaggcagatggggtgggggccaccagaggtgcatgggagcagtgggccctgggaagggcattcacccttaccagtacacatctgtttcaatgtgaggtggagactctgacctgtgccccaaacctctgttcccacagggagaaggcctgcctggtggacgaggactcccactcttcagctgggacactgccgggccccggagcctccctcccctcctcctctggcccaggtctgacatccccaccttacacagccactccgattgaccacgattacgtcaaatgtaaaaaaccccaccagcaggcaacgccggacggtacagtccctgttctccctactgccagcccagggcggcacatcaatcacgggggggtgctcggacgactcattttgtygcttcgttttggtgagggggggtgctgggtctggggtgacacgggcaatgttgcggctgctcattaacctcatggattcacagtgattcttgtgcttccgagacatgctcagggtcgccacctgccagcttgcccacctgggagccaggggagggggcaggccaggctatggcatctcacatctttgagccttctttttctcgcctgcaaaatggggacatgacatctactttgaaaggaagttagaagagtgtggcctcctggaggggctcctggtgcagtcagcttagtgatgcctgcattgttcagcagcacattgttactgctctgtccttctgaaggttgagggaaggccgtgactagttctaagtctgtcacccctgagaatccagataagttgttaatgggggtcacctgggaccatatgtgtggccatgccatgtgggatggggcaggtggcgactgttcaaccacattccttactaacattaggaggcttgcatgctggcctgtagctcgatttcttcatgttctctcatttttatagtgataagctagtgacaaagtacttgctgggataagccaaattggtgatttaagaggaccactaaagtggagtcctgggaggtagtgacaatgctgaaagacacctgggccctcactcctatgtcactcatctcatctgggcttggggaaacaggccttgctctgcattccccaaggcatggggatgctagtaggtgggtagaattggtcccagggctctgcttcctgccagatagtctttatagagtggctccttggagtaagaatgggcactctagggcaccatggtagccttgaagttcagtcccagtacaggtctggggggggccaccaccttcgctctagtgccctgctgaggcccttgcccagtgctcgggttcctggatatagcatgggcatctgcctccaactttctgaactaagtgggtagggcttgagagcaggtttaaagaagtgctggagaaggatgacaagggggccaatgctccatttctctgggggcaggatttgctattctcaagaaaggaaaggagacctgcagtgtcccctcctgggtttggtttggatctacagcatgcgtgttgagagaggctgaggatctgagtgtgtgctgtgtctcttacctcctggaaggttcatgtcattactcccagtctcagcactgacacctcgctgcccaccccagagtgttaagcagagatgggaagaactgacccacctgctcctccaatcttcagttctgcagactttccctgttaagatcctctctccccttcttagttaagttaatcaccctgttcccaaacttttactcttgagaatattgagaaaacatactagcagcaaaccccttctcagggaattagtttttgccagctgcttcctgggaggaagcactatgccaaagttttcaggagaggaatgcctttcctggttgtccacatgccatgtggccgtgctcacatgcacctgggctagggaacccaagcactgtcctctgcagctctgcaggctcccactgaggtcacgccacatgcgccactgtgcttggatgtcagcccattagggttgagtatgcctctagaagcaggaaaggagggaggcaggagcgcctcagaaagggggccatgatgccagctgtcccatgttggcacatatgtgtgcatgaagctgttggtgagccactgcagatcactcaggcatgacaactgggcatgacaggtcctgggtgccaacatgctagttatttgttctggaagtttgcagagggagccatacaaataagttcaaatatggtttcagtggttgcacagttttgaacatttgtttaaaaaaaatgtcttcaaagtgattcctgtcaaagacacaaagccatcaggatcccatggcccatctttgcccagtcccagccctgcactggccacctgtgtgctctgcccaggcctggctgcataatgctttcagaactcagctgcctcacctctgagagaaagcagtgtctgcaacatgaaaatgtttggggtcctaaaatagctgtgatcttagaatgttaaagtggccctttcagcagctatactagttcctaggggaaggcccaggttccagggagaagcagcagattgctggtgtcaggggatgtgctggtggcctcaaggggccacactgcccacctctgttcctgcttctccttcctgggaggagaacatgtagttcctagtttccactcagcttcttggcctgagaccagccttgggtctactgtgagaggagaggggcgtcagcactgattgcaggccaccactgagcccttatactaccaggagggtgatgggtgcttctagccctggtacagctgaggagaagcagtcacggggaggtcagatggggaggtcagacagggaggcaagtgcacagcaggccctggtcaaaggatctgatttccagtcccagctccattgcatatgtgctctgcaaccttggacaaaggacttcacttctcaatttcctcacctgttgaatggggtaatgtcttcgttatgggtattaaacaaaagtgcttgtacattgcagccacctcctggatggagttctccaagtcattggtggaactagggtaagacctaggtagcactgcatagagggaagagcctgggctctggggccagtccccctcagtttgcaccccacctctctccagctagtggcatggcctcacaagaggtggaggtagtgtcctctgaagcagcagctcytgagtgggcttgggcatggggctttctggatcctggtttcctacccccacagaacaattaactttccagcagtgggagagggagccaggcgtcaggactttccttgggcatggttaggagaccttgcattggagctgccttcccacattggtatgcctttgcttcaaaaccagaaatcagctaggatcaattctgatttggtttaagatttagaaaagatttagaaaaatagctccaggtacatgtgggttgtttgacatttgataatagctgcttcataggacccaaatttgttctctgaaccaccctcacctgcaaccttgtgtcacctgcattagggtggggagcatcctgcagcctgtgcataactctggttaaaagcctttggaatcagcccctcaggtcactctgactctaccgcagcctggtgtcaaagccagcccttcacggaacagccaggagggcatcacagctgacctctggccaagctgagaaagagagcaagagagagaacaacagagagagaagctttgtcctctgctgtgctgctggcagctctggctggttgtgctccccatctgcctaacttctsccttccgtcaatctcttggaatttgcccacagggctgaaatccctaatgttgaagcttcctgaccaggaaaacgaggtgacccgaggagcacattgtgaccttcagggggttcccagtgattactctttatacatattcaagcaacataaggagatctttgaacaagacctctacccctaccctgtgtacagtatgcgtgtatgtatgtgtgtgtgtgtgtgtgcccgtgtgtaattacgccctaccactcaatgctgtgtgcttgctctgtgctgggctctgggcaggtgyctgcagggtagtagcatgtctccatcttcataactgccctgcaggctcggtcatgcccttgtttccccaagaggaacctgagctgagggcaggtaggcactcatccaaaactgcctgctgtagtcagggtatagccaagagatactgggtctgaatctccctccacccctagccagaggtgagactgacactaggaaggccctgtggttggccagcctggcagagactgaatctgtgtgtgtttcccttgtccttcagcagagggcccagagagcttagccattacagaatggcttggttcgtcacttggcctggctcagccctgctttgggatgtgttgatagtgcctttcttggactaaaatccttgctctctgcctgtcgtgctccatgtcacttcagaatgccagagccagaaaaggcctcagagctcggaggccttgtgctgtggtaagtctggggctgagcctctctatggtctttggccaacctgtagccatgcccatccaggtggttccatcagtgctgtgccaggtgcatagaacagcactggtccctgctgtagaggaggttggtgcaaatcagtcagttacatagctgagggttgggggtcaactgatgccagcaccagagaggtggggtttgttcatcccagagaaacctgggcctgttggtggggtaagaggcctttccgaggaggcaaagtttagccaagatccgaggggtgtgtcggtgtttctcttgaggggytggggagagggagcagccagggtcagaagagtgggagccttggaggctggtatccaccaagggtggtgatgcctacctagtcccactgacagcatgcacagagccgctgaggagtctcaggctaccttgagccccaggttgtagggtgtgggcctcactggagagcccagggtgccctgtgccaaacccccattgtggccatccatcctcaacctccatgctgtcaccgtctgtgtcgtgtgccgtctgtgctcatcttcgcctgttcgccccatgctgcctccaccaatattgcccgtgctgcccctaaccctgaccacactctgttctccaggctttgtctttctgcttgcacctgtcacggctcgcttcagggaacagcgcagacccgcatgctcagctctcagtccggctccctgctacccctgtgaccaggagcaccttcatgtctgctcgccctgtgatttggagagtgtgtttgatgcgcttggcttctgctgatggcctatcctcccagttctggccagaggcagatgcgrtgggggcctcttctccactgcccccctgcctgcacctccagcaggtgkcccagtcctatatttccattgctttgctctttcttgctttaaaataaacaacaaaggcaacagactctaacataccaaattatctttacaaggacaaaggtgtaaaaatgcaaattgtgcacagtagccttgatgctctgaggtgggtcctgtgtcttcagcccaccagggccaggctatgtaggacggggagctgtgaatgccagtcagtcctaaagggcaggcccaccctggcctctgctcagtgacctcccctcctagggctaaggggaggtcagtttctggttggagtgccattcctaaacagaccttctcaaagtgggagagactgtaagtggagctcagtttgttctgcttgttcctgacgggcaggggacaggggaggctgtcagcgaagagccactcacctcttttgttctcttctttcattcttagctttttgaaaacctttaggagttagctggtcacggcatttattgaacatctgttgtgtgccaggcatggaaaagggtgccatggggaaagtcaagatgatggtgccttgattcctgctcccaggttggatctgatgtcccatggtatcatgggacagtagttggtgccaaggaggagtgccatgagctggcagacgggagcaagttctggggtttggtgggttgggaagaattcctggagaaggtgagtctctagagaggcctgcaggcccatttagacatggagcttggagagtcctacagcttttggatactgaggtgactggggtggatgaaaaagagactttgaggggagagagcttgggaaagcagctgggctctgagggttgggctctttcctgtgggcagtagggagagtgatgtggtcacaggatctctctctctctgggctctaaggaaggcacaattttccccccatcatcctttgaagagccttcctgggaagctcactagatggctgggggatgccagcctcacaccttacagaactgcttcgcttcttctggcatttgtatcaagaggggctgttcacctgcctttggtcaggaaaatgtttaaagcctcccgaggcctccctggtcagtgcctttcctggctcagagggcaggatgagagatgcatgatgaggcctccgagcatcaggccccttcagggcagcaccatggtgtctacacatatcaggcttctgatatgtctgccaggcttcgaggtgcctggcagtgctcagttggccctcacctgtgagcactggcaaagaatggacaagtggtgcagcctggccctcacacaatgccgtcatgcccacctgctgcctgctgtgtatcttcctctctctcaggggcccccaggtttctggtaccacttttctttggcatccatccagtcttctcagcctgacaatgggcaccccgatttcccgggccagccttgcttctggtggacgtgttcttttcctgtggttggccaggattgactgaggcagcttttatctagtcagaaaatttctcaaaatactaattccacccaagtttacggttcttagaaacctgttgtttcctggtcggcaggacatttgtggtcttttctggggcactagtcagagctgttgcagtagcacaascatacatcttcttcctcaggctttcactgccccaggctgatggaacaaatggccgtgagctgtttctggtcttactgctggagcaaatggaggaaacacacttaaagagacactggaaagttgcatcttgtaactaaagagctcttttaggctggcctgagaatcctgggattgtccaagggatctgagctgagtcagacctgaacaaggaggactcagaacacagagtcttttctcacactgagtggggacaggcagcctttctgtcactgagccaggtctctttccctctgcgttgccagctgtcattcctttacagttgatcctgcaaatcccaccctggaagtagaaggttctggagcttagagggaggcagtttaataagcacttggctggcagacgcacatccccctaaggattcagagggaaggctggcgtggcccagatgcatagacacgaaacattccagtaattaacagtaacaataaaatatttataatcttgccacaaatattaattagtatgagcaggttttgtgtgggcagatttttaaaagaacattctgaaaaaaagagcaaggccaacctatagcctgcttgctagtgccattcttctttcctgttggcctccaagtagctccctaaagaaatcagctctcagctcctgagtctcaaggctagatacctggactgtggacagtccctggaggttccatccagggtgcctgtttccctggaaggctctctccacccagccccataggaagtttaggctaagtctggctctcctacatcaaagaggctttccatctgtctcttgctctgcctcagaaccagggggcccagaaccccctcctcacccaaaagcccctccacagaaaaacagcttgactctgacttcttccatctggccttgctctattaggcgaggcaggagaacaaaatgcctctgccaccaggcttggcagcttttgtctatagagcacaggcagacccagccggtcctctgagggctcagcacaggccattagcacacaaagttgcatgtcagcccatttgaacctagggccacaggatcccaaagatcctgtggaggaggtaggactggagccaggcctgtaggctgttcctgaggccagaattccctctccacacatactcaaagactccccagttcacttgggcagcatgagagtggtgcattatggtgctaggctgcgttcagctgtctgggaagcgggtggagtatggctcagggagtggtccttgcccaaaggtacatggctgatggatgggggtcctaccccagagaagaagcctttgacctgtgacctcttctcccagaagccttccctgtgcacactggcccttccttggctgcaggtctggtaacctgagagatgaccttgcagaggggcctgctgggagtagagagatgacagtagtcagcggcatccttccttttcctcctgcccctcttcaggggcctcccagagcaggggcttcctgcttcaggaatgggggtggctctgggttacacaccacagtccaaacaaccctccctgctgcctgccctgccagcttatccaactgcaggggtcctgttctccaagagctttttcccagcactgtggcacattgtcctccctaccttgactcacccagcccctgggctgtcccatccacagcagcccagctggtggcaggatgagggtccttttcacatgctctgcgatgttcctggcaaacttaccccactgttcatgtctgtctgtctgtctttctgtctgtctgtggcctctctgaggtcttcagtcagctgtaccagagaaagtttgcttccccagaagaggaggaatggaggctggggcactgtctgcccaggtagatagagccattctttaagagctttttcattcatcccttttgccctattgacgtgaaagaattgaaacttggtgttctttcagtctgactggcttgaaacttggtatgaaaccttgggttgacttttagtatttgaaatcagggtcattttaaataggctgtgccaaccctttcagacacacaagatctgaaaggagcagaaaatgggccttgggccttgagtcccttttggtggctctcatttgaagagataacacatccctggactccttcctgtggtgctgcccccttggtagtgggcgggaaccttggcaagcacctcccccacctgcttgcttcacaggccagttgggcatctcatctctgtgtacatagcccctgcctctccagctctgccacagcagcccaccccagcatcatgacctgcaggtggcacccaagactgtggtgagccccattagcagagccttcctcagggccacttaggtaccttgattaccccttaaacaagggtttgtctagaatcaccacaatgccccccagggccagtaccaatctctgctctctggttttttagatggttggcagttccagattctcacatctgtgtctgagaggctcaggaagggcctggcaaagtgtagtcagcagccttttgtccctgccaggtcccttggcttgtgcttgccctgttccactgctgtggatgttattttaagagtctcagcagagtccccactcaattggtggtcgttcttcagggagcagaagcccctgcacagcatgccgtcctttcttgcccacacagttcctggtgaggtctggccaccttcactgcctgctggatggatcctggttccttcacattgcagcatcaagagggtgttagcactttgagagtaaatatctacttgcctaaaccaatccttagttttcataatgatcacagctgggattccaccaaattggcaattcctttaggcccagagcccaaaagagcctgtgagccggtgagctcgtggggcagcttgccagtcggtgaaatcatcctagcaaggcttgcttccyggagcttgccgcaggatgtgctgctgagctgtgcagtgacttcagctagtctcaggctggctgaggagacccagccctagcttgtctttcagggagacttcaactgcggggcatggcctgctgtctttcagagactctgaggcctcacgagcattgtctaagccatyggtgttctcactgtcagggccagagtgaatgctgcagggctgtcacttgtgtgcagggcactagccacgcctttgtgggatcccatgtatgtgtcagggacagaggtaggaagacaatggcaatcgtgttaaaaaacctgaagtgggggcctagagcagcaaaatcatttggccaagatcacccaacccctaagtggcagatctgggatgggaatgtgggtctgggagcccaacccttaagctcctacaatgaccctgcgtggcctctagagggtccccattgctaatcctccctttacacacagccagcaaatgggctgccccacctcttcttgatcccctcatgctggggactcaagtttgggacattttgtgagggctgcaggcctgctcataactgccattcagtgctcatggagccttgtattctggctttgtaagtcagggaagagcctttcacaagcgtgagagagaggttctggtcaggtctgtgctcctccactcaggggtcttatacacgtcccaagtcctcatttctcattgttctgtcagcccagctgatactgatgatccatcagttcctgggcagtggacatggcaaaggcagctatgaaggaagggctatggcagggatgcctacaaggtcactgtccccaaaccctggtatatgatgagacatgggtaaagaggccagagcagcagggcaccctttggagcacagacctgatcctcagtatcctctgtgcaggccatcccactttgacaggcctgttgtgtcaatgttgcccccccatctacatggtgctgcttaggtattggctccaatatggcatcagcaaaaccctctgctcattcagacctaaagctgtaatggcacatttgagacataagagataaaacatgctcaggttctctgaaataatagtattgataaactgacattttgtgaacctttactgtttgttaggcactgattcaaacactttatgtgtattaacctagttaatcataacagttctgtgaagtgggtgcttatgttatcacagttttacatgcatggaaactgaagtataaataattatggcatttacagaggctctcagagatagtaggtgacagagcagaatttcagttctatcagcctggatcttccagagtccaggctttcaacttttttgaaacaactttatattttgcttttttttttttttttagacagggtctcgctctgtttttccaggctagagtggagtgcagtggcactatcactgctcagtgcagcctcaacctcctgggctcaagtgatcctcccacctcagcctcccaagtaactgccacgcctgcctaatttttttttttttttaattttttgtacagacgggcatctccgtatgttgcccaggctggtcttgaactgctgggctcaagcaatcctccctccttggcctcccaaagtgctaggactacaggcatgagccacccagccaaaacaagtttatatgttgtttcaagtttgcttaccaggcagctcatgcctaccctaccagtaggacccagctgattagcactaaaacatggaccaataccaggcttttaaggtagctgagcaaagggttggtggaccctaggggactgtgtctgcctttctccttgtgttccccaagaggccagtgtggcatggacctctgtgagatgatatgtggttgcagtttttaggtgcgaaagggacttaacttgctcatggtctcagctagtaaatggcacaagaggaacttgaacttagctctcttggttgctagtttattgagcttcaccttgaggtatgtaaagttcaagacaaagttttattttttaatagttctcagccgggcgtggtggctcacgcctgtaatcccagcacttcgggaggctgaggtgggtggatcacctgaggtcaggagtttgagaccagcctgtctaacatggtgaaatcccatctttactaaaaataaaaaagattagctgggtgtggtggggcacgcctgtagtcccagctactcaggaggctgaggcaggaggattgcttgaacctgggaggtagaggttgcagtgagccaagatcgtgcaattgcactccagcctgggcaacacaagaccctgtctcaaaaaaaattttttttaagttctattttatctctactattggtttattatagtatcatttttttaaaaaaatgtagttgttgccttagggttaacaaaatacacctttaattcattgcagtctgccttcaggtgatactgtactacttcgtaggcagtggaagagctgctcatcttttgcactcgttttcattcatttcacttttacatatgctctaagcccacaatacattgctactatttttgctttagaaagtaaacaataatgttttagaaaaatcgaacataaaaagatcttttatatttaccataactttaaccatttctgggaaactccatttctttatgtagatccaagttttatctggcttcatattcattctacctgaaaaattacctttaacatttcttgtaactcagatctgctggtaatgaattctctcagtttttgtttgcctggaaaaaaacaaaccttttttttttcctgcaatttttagatattttcactgagtatagaatcttgagttgattattttattctttcagcactttaaagatattgtcagatatgtgtaatttctaatgagaagtctgctgtaattcttaactttgtccctctgtatctgatgtatctttctctgactgccttcaacattttgtatctttgggtttcagcagtttcaaaatggcccacctaggtgtgatttttttttttttttaaatgtgtgtggagggatctttcccttgcttggtgttttctgagaatcttggtgatttgatgtcttttattatttttgggaaattcttagttattatgtctttaaatatttctactgtcctgtttcaccctcatctccttttgtgactccgattagcatgttggatcatttggatgctctgttctgattcctcctgtccactctttttctctgggtttggattacagatgctcctcaacttacaatggggttatttcctgataaaacaaaagtaggttgaaattaagtcagaaatgcatttaatatacctgacctaccaacatcatagtttagcccagcctcatctaaacatgctcagaacacttgcgttagcctacagttgggcaaaatcatctaacacgggggtccccaacccccaggtcacagactggtaccagtccgtggcctgttaggaactgggctgcacagcaggaggtgagcagcaggcaggcgagcactaccacctgagccctggctcctgtcyaatcagtggcaggcatccttagattcttataggagcgtgaaccctattgtgaactgcacatgtgagggatctaggttgkgcgctcctcgtgagaatctaatgccagagaatagtttcatcctgaaactatcccctccagcccccacagtctgtggaaaattgtcttccatgaaactggcccctggtgccaaaaaggttggggactgctgatttaacacaaagcctattttatgataaagtgttgaatatctcatgcaagaatattgtactgcatatcactagctcaggaaaagatcaaaattcaaaatttgaagtgtagtttctactgaatgcatatcacttttgcatcattgtaaagtcaaaaaaattttaagttgaaccattgtaagttggagattgtcggtatgtctagtgacctgttttcaagttttgatttccttttgctcctcagctgtgtcaggttggctgcaatgtctgggaaaggcattcgtcatctctgttactgtgttttttatttctagcctttgcatttgactcttgcttttttttatctcactgctgaaatttcctgtctcttcatgcatattgttcagcttttccactacagcctttgacatactaatcatatttatgaatcatattaatcttagttattttaaattccctgacatgtagtaccaatatctgggttatctgtgagtctggttctgctgattgatttgtctcttgacgatgtacttttttctttctttctttgtgtgtcttacaatttttacattgaataccagatatcacgtgtaggacagaagaaactgaaataagtaatatttatgcctggaataggcttccctcttttgtttctaggcttttagtagggaaagttgagttaggctagtcagaaattgagctggcttgggttttgttgttgctatggttacctttagtgccccagtggtgcaatcatagctcactgcagccttaacctcccaagctcaaattcctttcatgttaccttgtgcttagtaggggagctggtttgccacaaggtttttctcaacattccagttccaccttcagccttaggcctttgggagtacctcagggagggtactcctccatgttcttgccttctccctgcagtagactcccttgcttgttactcagtgcatgccagcctagggttggggacatggggtagttctctgttgtcttggtcccagcctcagacttaggtgggctctgtgttcctgcatctcaggggtggtgctttctcagtgattctgcccgtccttcagtggtaggagacctctaatgtttggaccctagatgatttcctgcccctcccttagaatagaaggtttttccttttcccttccccagctgcagtgggtcttcacctgtaccctgaaagcaacaaggtttcctcccccacctccatgcctgaaggcttctgttcctccaggtaggctttgtaccttttccatagcatcaactactcctcccctccagatctgcactactcccaggaaggtttcctcaacttccctctttgccccgccccttttctttctcatgagcacctgtgaaggtccgaagaaggcagccagtgagtgagtacaaactccttttacatctgtggctcccagagatctagagttcttccagatcacacctggcttttactaacaggttaaaaatgtttcctgaattctttcccacttcatttgtttctgttatatttatatggtagaaaaactacatagtggtggctactgtgcatctcttcctaactccacatttgacaacagcacgttggtaacttgaaaattgccatggtgggaatatttacactccagaaatcagtaagtgctattaatcagggctttctttttccctgagagccagttgttaaacatttaccagaataccactgtttgggggaaccccaggagggttgaccatggagattggtgcatttggtgagttgctccgtggcctctgggatgggttgggcccagcagtgtcgaatggctgtgttcaggccatctcctgcaaagcagtccccaggccaccggcagggagactcaccataggaaggccccctgtgttggaggtggtgtaggttaatgctctcgccctctcttcctccttctcccctcagaccgaagccaggacagcacagccgtagcactctcagactctagctcaacgcaggacttctttaatgagcccaccagcttactggaaggctccaggaaatcctacacagagaagaggctgcccattctcagttcccaagcaggagcgacgggtaaagatcttcagggggccacagaagaaagaggtatgaagccctaactcggtgaattagaaccactttgatgtcctgtggcaatctgggcaaagccgaaggcttcgtggcccagggaccttggctgggcaagtcacttactccctgggcctccatttttctccctgtaggatgagaatggtcccagtgcccgccctggggttgtgagggttgagtgaggcagctcctgagggtgcacacagagcccagcaccacatgtgctcagggatgctgcctgttgttgttatgaccctcacaacccagcccgggaaagccatgtctgtgatatcagtgtgctctgtttttgttgttgttgttgttgttgttgttgttgttggtaaatggttattttaaaagtctttggatcctaaatgtcacaaatgtgttttccttttagtttgaatcatatgaggtcttcaggaaaaatctctcttttttggggaggggggcagagagccctgatttaagcctgggggtgtgcccaactctcctggggggtccaggccccctttatagaaatcagttggcagagccccacatctgggcttactgggagatcacaggcaggctggggctttcctggccccactctgaggtgtggctggtcagctatagatttgagagctttcccactctggccagggccagggcttacacgtgttcctcaaacagtaataacaacaacccagccccgtactcttttctgtgctgggcactgtgttaattcatttggttctcccaagcaccctagaaaaaaagcacaatgactattcccattttatagctgaagaatatgagattcagagaaggtctggaatttgccctgtcagtgtacacccttaaccattaccccacgctacctctccgggtgggatggatggatggatggggaaaaacgytggtgataaactgcctccctgagggacccaggccttgtcccaggaagtctcagagcaagccctggatgggagctcacacataggtgtggcagtggggccagagccatttacactaagaagacctctcctagctctctgctccctgccagcctcccctggctggacttagaagggcatgagaccacatctccagtagattggaagtatccccattaggggacacctgatagagacactagagaagagggcacagaatggaggacttactatgtggatttacttgtatctggtcctcatcaagagatgaggccaccaccccactctctaaccaggcagtcactatgcartcgccagccagtgttgacattctgtaactgacataaacacactgtaggaagtttggaatgggaaggaaaaaggtaacttacactcttaacactataatacagcatttctgtttttaaaaataagatttttaaaacttatcagacaagtaagacctaccatgtgtgctctgtggcctgtcaagccgtgactgctgtaggtgccattgtgtcatcatgagcttctttcccacttaaatggggaaggggacatgggtgttgggggaacgaagcagagagtgagttggctttggtctggcacagcctatacaggcccttctagactcatgaagagtgtcctgcctcttccctccttccattagagccagtggtttaagcagacagtttgtggggctggccattggtgaagaaagttagggtaggaccaaaggtcaccacaatagctgataagcatgaaatgaaacctcttgcttccatggccatgttgctcctctctaagcccagcttttcttggtaaccatggtggtgaagttgatcaacttcctgttgtaagagcaggtatggcagggaatgcttcccaagcccacagccagcagatagttctgggagcagagcactcatccaggcctagtcttggtcagtggtggtctctaacacgcactcccctgatctcccattgggtagcagcctggccatcacagtctgcagtacttgagcagcctttggcctccctgcagaaagctgggacagcagtgcctaggcagtgttgagtgcgggccccaagtgtgctccacaccacttgccttcccagcacaccctcatggagagtcctaccaccagcctgctgcttcctccatcattaatgttgtggggtacaggccctcactcacgcgtatttgttatcaagcagcagggcacaacaggtccagatctgcaccatgcactgggtaccgagggaaagcagaaacagatctgactgccacatcctgcctggcatgagatgcgctccctcccaccgtgtctagcaggcacaagctgtcacactgcccgaggaccagcctccttcctttaattctccagaagctgtctttctccactctggccttgaccgaggtgccttgaggaaagagcctttcccagaagtgactgttgcagctagcggaagctcacctttgcagggggcagagcttcaaaaaaaaaagtctaaaatatgaaggtcgcaagagtagagatttatttatttgatctagggagaaagttgtccacagtttcatcacttaaacacaagcccactctatcatatcgttctgagggcaagagggtaaaacccaaagcagagttgacaagcacctgttgtgatccaggcagtggacacaaggacatgccagagtggccacatctgccccttcctggtcaactagaggcctagtgacaatgcccatgcaccacatgcaggatagggtgataaatggttgtcggtggggggaggccaccctgggggcagttgacctgccaatgcccagcttccttcccatcttgcctgcccaccctttgtggaaagcatcctcactgggctcttttctcaggccagtagagtttgagtaagacgatctcagaagtcaaaagagacagacttgaggtccttgctggggcatattttggtctgggcctctcagctgttggtgtcttgccaagatgtgtagccacctgagggccaggcttttccataatgaggccccctgagttcactaggccatcagtacacatcagtccagaggctcagctgggggcatgtctgtgccttattcttcttaggacctccatgggctgatgtggatcagatggctcctgtgctctgttggccttggcatatgcaccacaggcattccaagccagtcttccctgcctgcggcaggcaccagcctaggctagagcagccagaacacacattttacttgctttttcttggtagaaggaagttttctcatcttcacgcagctagggttagaattggacatcctggccgggaaacgtggtgtagtcctgttggcatttctgaccctctttcttccagtaaggaaatggagggctctagtgacctgtgaggcctgttcagcagtgggagtggatgctgtgtgtaaggcagctcgccccatctctccggggccccttaggccacccagacccytaggcaactgattgttgttgttgttgttgtttctgagacagggtcttgtccttgttacccatgctggaatgcagtgatgcaatcatggctcactatagcctcaacctcctgagctcaaggatcctcctgcctcagcctcccgagtagctggaactacaggtgccaccacacctgcctaatttttwaatttttttgtagaaatgagatcttgctgtgttgccccaggctagtctcaaactcttggcctcaagcaatcctctcaccttagcctcccaaagtgctgggattacaggcgtgagccaccacgcccagcctaaaactgggttcttgtttctcaggggtttttttgtttgtttttttggggggggggttaggtttaataggcaaaagaaatagaaaagagaatagctgtctctctgagagaggggcggctgagcgggtcttccctgaagctgggtttctgactcagtctaggattgctgttttcttcctctttatgtgttctaaggactctggctgaattcttgaccctctgcctgctttccataaaaattgtgctctgtgtgtctttgtgtccaagctctcagtgcctgatgtgaaccgctgagaggcctgcatcatcatctgattcctctgtctcccccgtgcctagcacagggctgatcccagcattatggcttaccctgtttggtgagccacattttgaacacattagaaacctggcacattttttaataaagtgatggtatcccctgtaagatgggtgccagccctaagctgtgggacgcaggcaacttcttgagctcacatgagaagacagtgtagtgtggaaggagctaggacctcctggcattcagtcattagggccacctcaaagggtagggggagggggcagcccatggtaggctctgggcctgggggaggggagatgctcttatggcttttctttgccaacaccactgggggcagcgatgcaggggagggagaagggcaatggctccaggagaaggagtgatggtggagaggcaaggacactgagggagagcagtggggtgggctgcaggggagcagggagggaaggtcagactaatagcaggtggctgaggggaacatagggagtgaatgctcagattctttcctcaacgagaatagtgatggtgggcaacctggccacacacctgatgtctgcagataggcttygacttagcatgcggagaactgggggccttggttgttgctgactcggccctgccccagcaggccccagctatctccaggctgctactacagtagggagagggctcagccatcgcataccacctcagagctggtgctgctggctgcttctctggcctcctccaggcaggctgtgcagggcgtgccgtgctcctgagtgcctaaggagccacagaccacaggaccccttgcctttatcccttgctccccasccctttccatctgtcccaccctcccgggccagatagctttcttcttctgtagccaaggagcctgcacctcagggtctagcccaaggtcatccaggccactgtcatcatcctggggccagccgtgcagcaccaccacccagcctgggctatcctgatgtgaactgctgccccatggcccctggtggagcaaggctgggtgttcaggagctgggctcatgtcacatgagggcccatgtgggagcacttggctcacatatagcagcggcaaccctggagagggagttggggcaggcagtgggctgagcactgmgcaggggagcaggtatgatacttcgtgaaccctggctgtgttttatgcgatgctggtggtggcaacacctgccctttgtgggctgcttccccataccccagccccagaggtgggacagcctgtgccaccgttcagaggggaagacccagagcccagcccataacttcccctctctgtagcctctgggtccctcactgcatgccagctgggacagcctgtttcatggagcgggagacctcggttggggcagagccagcactgggccctgtgcctcctgctgctgggtccagcatccactcagcaagggcattgatccmgccgtgctgatcacttcaccaaggcgcctccgttactggtggtagaccactgcatggacagggcctaaaaccagggtgactttctttcccttcttctcaactgtaggaaaaaacgaggagtcattggagagtacagaaggcttccgggctgcagagcaaggtgtccagaagcctgctgcagaaaccccagcctctgcttgcatccctggcaagccctcagcatccacacccaccctgtgggatgggaagaagagaggggacctcccaggggagccagtggccttcccccaggggctgccggctggtgctgaggagcagcggcagtttctcacagagcagtgcatcgcctccttccgcctgtgcctgagccgcttcccccagcactataagagtctctaccgtctggccttcctctacacctacagcaagacccaccgggtgagtggctgccgggccaagggggcttggatcttcccagggcagctgggcatctttgaaggttggtgggcagagctaagacagattggagcttcacggtagcagcacatgggagggatgggcgaggagagctgcaggaggcagggccagccccaggagtgggccagcttgccagggaacctggtggtgagggcccagggtcacagccaggaatggagggaggagtgtagggggtctcacagtctcagggataggctatggggtgagggataagggtccataggctcaactactctttcctgtgagggctgtgcagcaactcaaactctgatgtcgtgctccctcacccctgccattcacccatcgtctcagtgacagcaagcccgtcttccaggtgccctaggggccctgcttactctctgttctggccttgcttgccctaggccccatctctccagctgcatattgcaggggcctcctcaccataccctgcccctgggctcttgtcgctggtgcagctgccaaaaccatcttcacagcctctgcttcatgggggttgggtgctgacagcctcctccagctctttttggaaagcggatgatgtagcgatccttaacagctgtgcyccaggcttaagtgcttccaggggcttcccagccagacctcttctgctggcgtttagatttggggaggtaatgtggcctgggcaggacgtaaataataggggtgactttattttcctttagtctctcacccaggaggtgttggggagtgtcctggtcgttgtcctgcaccatgtagctacattctaagggggaggcagacttaaaaacatacagatggccaggcgtggtggctcacgcctgtaatcccagcactttgggaggctgaggcagggggatcacctgaggtcaggagttgaagaccaacctggtgaatccccgtctctactaaaaatacaaaagttagccaggcatgctggcatatgcctgtagtcccagctactcgggaggctgagtcatgagaattgctcgaacccgggaggcagaggttgcagtgagccaagattgggccactgcacttcagcctgggcaacagagcgagactcatctgaaaaacaaaaataataaataaaaaataaaaacatgcagatgagtaaagcaagtctcatttgaacaataccacagagaaaataacggggggcatagaggggtgagggtgctgttgtgcctctgcaaagacaccttttgtgctgagacctgtattgtaggggacagcattggtctggaaggaagggagagcacccagacagagcaagcagcccaggaaggtggccattctgggctggcattggtgtaggcgagggccagagagggccaggtatgctgggcaagcaggggtgacctttagggcctagctgtgaggactcagtcaggtcctcctcctagaggtctcctgctggctccccccagcatcctcagtggaatgtttgaagaaccagaatggacagttggccaagagatgggccctggcttggcactggctatgtgcaggaagtggcacttcacagaattctgtttgggggactagatacaggggtccaagaaggtaagtgctgtgtccccacagtgaccggtatgctcatgtgacttggttgatttcctcagggcacagcaggtgacacaggtctgggagggagggagtctcatcatctggggctttggtctgtagttcaaggtgcagtgcatgctagcaaacgatggccagctccggcttccctggctgttggtgccacactggagcctggcttgctcactgctcagcctccacttggcagtggaccttacctctgtatcccaggccttctgcwcccaggtggacctgggtcttaataaaccccaaccagcatgtcctcactgctgaagccgtctttgggcctgaggggcaatggctgatatgaactctgttgggctcaccattgctttgggaactttcccctttccctcttttgggagcagcagagcccactgcaagagcccacacacacatcagtggaacggacactagtaaccattgtcctgtcctcccccacctctggtgtccttctgttcaagtgcctcctcaggcagccatgcagccccctccagctgtggtcagctctgaccaggatctggtgttccctagtagtgagctcagacccttcctcatcctgttacagggtaccttctcaagaggcagatgtcgagatggaatttcgggtacaaaatatgtattaggaattggcacctgtgcaagggaagtggggaaggacagcaggtttgggtgggaggagagttgagtagcgatacgggccccacccacccaccctccacttccctgctaaatggctttatgttgaatttgaaggagccagtgcatataaagtgcttagctcagcactagacacaaaatgctgttattacagcctgccccttctcttgatgatttttttagaagtagaaaacagtatttatgtcaaaattaaaagttggagggaggtaaccacaattctgccaccctaaaactagctctcttgggtctagtacaggttgaatatcctttatacaaaatgcttgggaccagaagagttttggattttggcttttttcagatcttagaatatttgcattatacttctggctgagccatcgctaagccaaaaatctgaaatccaaaatgctccaatgaggctgggcacggtggttcacgcctgtaatcctagcactttgggaggctgaggcgggtgaatcacctgaggtcaggagttcaagaccaccttggccaacatggcgaaatcttgtctatactaaaaatacaaaaattatccaggcgtgatggtgcacacctgtaatcccagttaatcaggaggttgaggcaggagaatcgcttgaactggggaggcggaggttkcagtgagccragatcacgtcatttcactccagcctgggcgaaagaccaaaactccctctaaaaaaaaacaaaaacaaaaaaccaaaatgctccaatgagcatttcgtttaagcaccaaagtttcagattttggaacaatttggattttagatattcagacttaggatgccctacctgtatttcttctcaactccaatacacatgccctgttgattgtgtgctttcgagacaccaggtacaccaggtcccagaggtgggatcataccccttctactttgcatctgggaacctgttctgagggtcacacagagctgagtgacagagccagacatcagccccaggcaatctcatgctggcccagttgctgcaccattccccacaccctgtccacactcatagtttgccattttgctcttaccatgaatgccccctcgccaggtcattttggtcatctgtgatggtccagggtaggcgggccagttgacccagccatccccacccagtagcagggatggaggctgccttgggctgtctgcaccattgatgtcagtatccccagacaacccccagtagccattagcctcagtttctgccagcttttctgttcgttgcattcccaggctgagttccttggttctcagaaatggaatgctatcttgaatcttagaccccttaagcagcagacactccctacccacagccacactgcctacccacagatctgcttccaggaggcagctctgcaggtgccaagtgtgcctcaggtagcctcgggccactgagctcattctagaccttgcatatgctgggtctagggtggttcccattggcttctgtgtttgcttcacccagaaacctttgctgagcaccagttaccaccaccaaattgaatgcaggttgttaacacctagctcccctgagagcctgagttaagaccttcctgctgctctggggcatgccatcctgggggctgcatgtggctctgcccagacctggggtgtcagctctgctggcagcagcttgttcacagatctgggggacacaactccatgttgtcactgactaatgtggaaccattaactgggaagtagttaccactttccaaacacagctgtttgttaacaaacacttcccgctgtgtatatttgacagcagcacatttcttcataaaatcctgcctgtgggcttggcagtgcctttttcttgttgccatctcacagctcactggtggactggagcatccgatgtctgcctcttcaaaggggcccacaagcagagcctgcctggagctgtgtggttgactcctgaaccctcaggtctttcacagacacctccaggtgaggctctgcctgcccaggccttggaaagaaaccgccttcagggcacagtgtgccacttgcttagttgctgacagcagggcttttgggggaggaggagagaatgtgggctctgaagctggcctcacctgggttcagatcctcgctccgcatgggaactcttggaggtccagggctcttctttcctcgatgagaatgatagtgatatgaaagcagaattattgtgttaatgaggtgagggatgcagtgctggggcaatgtccaacataccctgcactgccctcagccaacaatccttctcacccatatagtgagacccatttcttcagtgtcagcatctcccatggctccttactcctctgccaggccctctgagggctccctgcctggggcatagtggccaagggctaggtctgtcctgagrgacctttgttgcctgcctgaggctgccctccctcccaaggttggcactgctgcacacaggctgcccctggaccccccaaggcagtccacctgttgccctgcacactgtgcacaccttagatggggatgatcatttatgctgatagccataagggccctaattctagctaccgtatcacttactctctggatcacaatcttcaccaagattttgaggcctgagtctacactcatagaaacctggctctttgagcccatataggcaccccaggagagagagcacatggcatcagacacctcttgtcatgaaggttctggcctttactgatgggtgtccaggaaaaaggccaaggcatagacacccctgccctgctctcccagttgcctcctgctcagctgggagctgagccccttcacctcctgctacttctgctgcaaggggttcaaggcagagggggttggttataagatgttccctggagccaataatcttgaatgaaaacaaagctggaggactcatacttcccagtttcaaaacatactacaaatctataatatactaatcaaaacagtatggaatattagccttaaaaaggggggaaattcggtcacatcagacagcatgggaaacctagaggacataatgctaagtgaaatagcyagtcacaaaagacaaatactggatgattccactcagatgaggtatgaggagtagcagcctggcagcgctagcccaatcagaccccatttctttggcccggtacctatatgggatgagcccaggcccagggtttggttagagacagactcctgccaggggggccccacaggggtgctgtgtgctcagctgaaggatcaccagggaatctgctgacttttgacttcagggtcagctggtgctctggtgtgagcctgggtaaaggacaggtcagctgggtgtgaacccccaccccttgcccccctgttgtgagtacagtatccccacctgcctgtgctgctggctcatgtgggggacccgtagaagccaggactatcgtgcaggttaaacgagagggcctctgaagtgggccctgcaccattagactggagcaggtgtgagggcctgctgttgagaccctgctttttgctcacaggcaagtgttcggggggagctggtgagctttgagttgacactgactgagccaggaccacacagatagtagaaccaggcatcaggagggcatgctggccacaaagcagggtgttcgcctgcctttaacctttgctccctttctgtggacataaaagtggccccttccacaaaatggtggtgtgccctgcatcctcacatggatgtcctaggctgctgcagctcccaaccagccaggttcttgtcaagctttagtttgtatagtttgcaaaaggagaacttgatatttttctgaacttaggaatcttgattttgtatttcagtctgtctgcctcatggtttgaagattctactgggcccttaggtgccagaggaggtgggacaggttgcccccatactggctgctgctttcctggtcctctctcctgcaaagaaatgcagattccagcagtttgaataggtttgagcactctgccagcagcttttattaccaataatattgtttaagcttggaaaagagaatgaaactacccacaactgtcccacaagccatgacatggcagaagtgtttgtgtttcgtgtgctccccccagtgtgttttctgtgcatctctgcaggttcactcattcagcagctgtctactgagtggttgtcacgcaggaggttcctgtttgaggtgctggggatatagcattgtgtactcactgggagaatagtgtgggcagctagtgatgagtaggaagaaaaacaaagcttggtaaggggttcgaggtgtgattgtgactatttagacagggagattgggaagacctgtctaagcaaggacctgaatcaagtgagggagccctgatggccacgaggatattggggaagaggcttccagatggacacacacccaaaacacatgcctagagacagaaacagtcttggtgtgactagaatctgctggaagctggtgtgactagaatctgctggaagctggtgtgactagaatctgctggaagctggtgtgactagaatctgctggaagctggtgtgactagaatctgctggaagctggtgtgactagatgggcaaggaggagagaggaagaagatgaggtcagaggctttcagggcaagttttggcaggggaggatttgaggggacatcatcctgaattaggttaaagctgtcgcaagggctgggcatggtggctcccgcctgtaatcccagctctttgggaggccaaggcgggcaaatcacttgaggtcaggagtttgagaccagcctggccaacatggcaaaaccccgtctcaactaaaagtacaaaacttagcctggtgtggtggtgtgtgcctgaaatcccagctactcagtaggctaaggaaggagaatcgcttgaacctgggaggcagaggttgcagtgagccaaggtcgtgccactgccctccagcctgggtaacacagcaagactctgtctcaaaaaaaaaaaaaaaaagctaaactaaaaaaacaaaaaactgtcgcaaggttgtggaagaagacaggctccatgtggcctgagtgtgtcagagacactactgggctgatatgtaaagagtgagttgggggtggcctgtcagaggcctagcaggacacagatggccccatctaacaggaaagtctgaagagcacttaatgaaggagcaacttacacaggcccaggcagagagtaggaattcacaagggaggaggagtgtggtaccctggaccagccgcggtgcctgtcggggctggccattgatggctgcccctcatcaactccacagggagggaattcaaggagtgagtgctctgatcaaattccctcagtcaaacccacccagtagtcagaggcccaggagcttgagaatgtgtccacacaggtggagaagaagtcagtgtggcagcagagatgggaggaggccacagcaggatatcaggaagtagtctgattctagatggattcagacagaagagctgaatcaatggatcagacaacatgggaaacctagaggacataatactaagtgaaatagccagtcacaaaaggcaaatactgaatgattccacttagatgaggtatgacgagtagcagcctggcagcgctagcccaatcagaccccatttctttggcccaggacctgtggggtgtgaaggaaagagaaaagtcaaggtcaatccacagatagtcattcatcctgcttctgttctgattctctaatgttgtgaatcaggtgagaaagtttgcacatctatcatcttcaacaactgtatttaacttttcatatatatatatatatgagtgatctagaacagttgtatatatatgagtatatatgaataacgtagaacagagttccctcctgaggcactattgacatttgggaccaaataattctctgttgtggggatgttgtgtgtgcactgcaggactttcagcaatatccctggtctctacccactagataccagtagccttcctctagctgtgatgaccaaagatgtttccagatattgccagatgcctccttggggacagacccccacccccattgagaactattgccatgagtctccctccccaggcaactctcaggaatgttgggtgcatttcctttccatcttctgcctactttctttacacacaaacagacacacactcacagaaatgtatgcaaatgtggttctgcttttttttgcttctcgtgtactcataaactctttgattgcatgacttctaatgcctacacaggattctcggggcggggggagggtgggcacagcttttacactaactccttaatatttggctttatccaaacagacattctaattataatttttcatgattagaagtatcaggaatggttggctttaagtctaccaggtctagctatggggatattcatgtcctaggttgctggggtgagtttgcagtaggtatgtgcccgcagcttatggrtgtccccagcagcccactgagtctcccatcagcaggtagccacacactcctcttcctctggcctatagaacactactccaagggctcccagccaattccccttcacacagggcaagaggtcctgggtggctccaaaggctgcagaaggtcttccctggccaagccctccaccactcctgtttcctccatttgtcatggaacccgtgagcaccatctgtgcccccgtgccaatgcctgaggtatggctaggtgaagggctgaacacagctgaggtccatagccaccttcctggcagccctgtggagccctactggtcttgcagataggctggcactgctccaggatccccaccagacagtttgcacacctggagtcaccatgtaggagttgtagagcctgacctctctgagccccaccatctgtcccttgtggattcgtgaggcaggaggtagttaagtggtgagtggatcatcatcattggttgtggcagggagacagcccctgggggcagagaccctgggtgacacaggcagagcacatcctccaggccaccatacaatagtgacagatggcacctgggatcaggtctgccttacggctttgcacatcttgggacagcaggtgtccccagagggtagtagttgttttcccatctccagctgtcaacaggctttgccaagcccccactacatgcagggcccatggaaggctacaggtagggatgcaagccacctcaccccaagcttttgcttcctgtgtgaagagaaagggagcgtggggagttccaggagctatgacagtcagcccaatgtgtgctgtagtgaaacgattgctggcagagtagtgcgagttagtgggcgggggctggcattgaaatttagcctcaagggcatggactgttgcttagctggccccagggagcatagtgctggcaccctggccttgggaaggacccaagcagccccactcacgccccatggctgttgccctcctccctcaacctgacatacgcttccttcccattttatgaaaggtcagactgctcagcttcttttcattcttcctgtgggcaactattgcacccttttctgtgagcttcaaactagacttgtcctggaggagccatcagtgaagtcagactgtgtccctgcccttatagggctgatagagaagtaggggcagacagcagacccatctgcgagtcagtggaaaggctatttaaggtggccatggggctgtgggaayagtattccaggggagcatcagggggaaaggtgaggtggcaccaggtagagagacctccagggaccaaggtgggaacaagtgtggctggagggctgttcacaaagaggggttggagggtatgggggagatgagccagcgggtaggcaggtagactgaggcatggagctgactcttgccctgaggcaggtgcagcccaaaggcctttaagcagaggagttagatgtcccctctgccttctgctgtgaagcagggatggtccagatagtaggcaagggaggacataaggtgcctgtatgcttctacgattctttgccctacttctcttcaggaccttacagccctccatctgccctctgtcacaggagggtctatgtgcacaagcctcagggccaatgcagccaaggaaaatgtgccgttatctggcaagtggctccatgggcctcctcccattctcagaggtgcctatgagccagcagtgtgacaggttgcatgaggcctgagagagggctggccatgatggctggctcagtgttcagcacacagcacatgcccaggcggatttgtaaagtaacttgcccacctatagtggataggtcagggggcaggggaagagcccaggcctcagagtccttgcagcctggaccagagtccagggatggttctgccacttcctggctctgggaccttgggcaagctcttgaatttctctgagcctctatttcctcattggtaattctgtgaggtgaggggttatggcactgtgctcaacccaggaggcatcatgttgccttacctcactacaccacgaagctacagggcaggttctatgctgcaggtgcaccgtgcaagtcagatccccttcccccttgcagaggttcagcaagggcccaatacagtctctgccccctcccctaccccaccagcctggcacccatgattccccagacaggtctcagccctccctgtcagcacctatctggggcctcaggcatgaatcagctaagggcccccataagctgtctggacactttgtgccttagcattgatcagctctctttctctggtgggcctgggagacagctggagaaacacactctccaccagtacacagtagccaggtctgcaggaagctaatttataatccaggttgggtttgacaggctagtgctttctgcaccctttgccccagaaacctctcccactgccttctccctttctgctccaatctgggggacaaactggcttggtgcaggtggagtggtggaaaacaaaccagagaggaatgtccattcccgtcccatggccacagggcctgcaacaaggcagctgggcagggaagcagagtctatgtgactccatcctggcctctgtgctttctcttgtgtccccagccagaaggaagtctttgtcgaggctttactttcttggtattcttaggaaaatgatggctactggagatgcttcttcaagtcagggtctcacatctcctcctgctggcctcaagtgctgccacttaaagaggtcttccggacacttttccaagttccggaggagccccagaagcagctctggggtcatgactcttgggtaacttttctcaggccaggcctgtgccctgggtcatgaagtcacagctggaggagtggtctgccacagcattgaggccagggccatagaggagagcaagggtatacacaggctcagtcccctaggcagcctgcctctgctctgggccctgcagcccatggtcttagcacttactccctgcctcatagcaccctggctccccactggccttatgggcagccacatctgatcccctccacctccttggctaggccctgactgccccaggtgtctgggcacttgcttcagtgagtcccttatccccataacagctttgtgcaaaccacagcccaggtatcaccttctcccagagcctccctgaccttctcagactgggtaaaagggaggtcccctttgcagcctacctccatggtcagatgtgctcaactgtggtattagaagtgcaggtgayggaccaggcacggtggctcgcgcctgtaattccaacactttgggaggccaaggcgggcagatcacttgacgtcaggagttcgagaccagcctgggcaacgtggtgaaaccccatctctactaaaaatacaaaaattagccaggcatggtggcaggcacctgtagtcccagctactcaggagrctgaagcaggagaatcacttgaatcacttggaggtttcagtgagctgagagcacaccactatactccaccctgggttacggagtgacactctgtctccaaaaaaaaaaaaaaaaaatacagtgtccyacatcaccttcttgagtccacctatggctgattagaccaggatggacacctgcctgggctgagcctctcagatctcctttgggaaatactttgaaccaagtgtcgcagtgggtcatggctgagcactgatgcaggttgtgagcccctttcttgggcttcctgagacctgagtcttcctcttggagccctgcyctactcactaatctttgagctaatctttggttttattccttttaatgaagcatacctgaagccccacccctttctccccaccctgtactcagtttctctgcagctgaccctccctccttggacctgctgtggagcaggggcatgtggcctgggatagggtggggtggagtgcagaggtgggaagcattatgtgagaacttggaaccagcctcaagaggcttctgaatgagtggcccgggaagcaggctttccaaagcctggctgccaggcattgctggggacgtttttctgtttgttttgctttgttatttttttgttttttgagacggagtctcactctgtcacccaggctggagtgcagtggcataatctcggctcactgcaacctccacctcccaggttcaagtgattctcctgcctcagcctgttgagtagctgggattagaggcgtgtgccaccatgccaggctaattcttgtatttttagtagagatggggcttctccatgttggtcaggctggtctcgaactcccgatctcaggtgatccacccaccttggcctcccaaagtgctgggattacaggcgtgagccaccgcgcccagctgctggggacacttgaaagtaaactacaggttgttcctcctagggtgctagagctcagaagttgaaggtcaggactgggtattttactgttttctgtgagtttgagcaaagtggcctctgttctcagttgggagcctgcctccagggtctgaggacccttttgctgcccaggttgttccctcctctgcctgtctctccttcccctcagggtggggcaggcagggggtccctcagcagacgggaagctcacagtgaatggagcctcctacatacagccacagggccctccctgcccagtgttcaggagcagccctcagtccctacagcatcccggtgggggcagaagggtagccctcataggagcaaaggcttagaggcaggctagcatgggccccacagccagcgagtcagggagctggagttgcacttttgcctcatgatgattaggggaatggttcagtatgctcagcctggccagcagtgggcagaatgggaccaggtgggacaagcttgcaggccaagaagtgagagggctttcggagcagctggagtgcaaggtgatgaaggcctgcgcccagcgctgggaaaggcgagcaagggacctgagcgggaggggaggacagattggctgggacagtgggtgccgtggaaagggtagagggtctggcattgtgcagtcccaggtgccaagcccagctctgcccattgccagcccttttcctttaggacagcatggtcctgaggtggagtgagatggccagtgcaaggtgcttggctgctgtggtgaagaccagagagggaggagtggctggccaggcagctggtgggaaggcctgctctatgggccagtgagaaggccccagagaaggcagaggcagccaggcccacactcaccctcttaccctacaccattctcccctgggcctggattccaccaagaggctctttgcccagagatcactgacctaagcactgtggccagagtccagccctccgagcctaaagcagctgtaccactggccgtgaataaggaacgctactgattcctgacaaataagtcagggctgctatttgggcttgtgggggccccctgacagaaggcgggtactgggtacatgtggcaggtttgtagggttggtcaggccaggggtctgtcagtctccaccttgaggagtcaaagactacactcctaaaccagtggtgctgggccagagatcagttctgaaaatgcatcccacagcctgatgatcaaagcccatggccagagcagcctggagctgtggaatcgatgtctgcaggaactgctgctcatcgtggtttgccatgcagccaggaaggaggggacygcctgccttccctgtgggcgccctgagcagcccacacactcactttcaacctacttcttgtttccccagaacctccagtgggcccgcgacgtgttgctaggcagcagtatcccgtggcaacaactgcagcacatgccggcacaggggctcttctgcgagaggaacaagaccaatttcttcaacgtgagtactttgccttgttgatttccaaggctgtttgttgccactgcttttcactgaaggygcatgaattgaccccctaggtgggtgttcccagggcctcaagtttgcggcatcctcagagggcaggcagggtggtacagtcgagagtgagccagactccggtgtggggctgtgattgctgagcgacttctggcaagtcactgccccctcctgtggggagatgcatggatgagcttggtatgttctccaaagccccaggtattctggggccacacaggcagtgatgacaggggtacaggcccaggtttcctcctcctgctggagcagctcctgtggtctcaagcacgtaggagattctgactgcttaaaaaacaagtgtgggccgggcgcggtggctcacgcctgtagtcccagcacttttggaggccgaggcgggcagatcatctgaggtcaggagttcgagaccagcctggccaacatggcaaaaccccatctttactaaatatacaaaaattagctgggcgtggtggcgggcgccataatcccagctactcaggaagctgaggcaggagaattgcttgagcccgggaggtggaggttgcggtgagccgagatcatgccattgcactccagcctgggggaccagagcaagactctgtctcaaacaaacaaacaaacaaaaaaacaaatgtggcttaggcacagtggctcacgcctgtaatcccagcactttgggaggccaaggcgggcagatcatctgaggtcaggagttcaagaccagcctggccaacatggtgaaaccctgtctctactaaaatacaaaaattagctgggcatggtggcaggcacctgtaatcccagctactcaggaagctgaggcaggagaattgcttgaacccaggaggtggaggttgcagtgagccgagatggtgccattgcactccagccggggagacagagtgagactccctcttaaaaaaaaaaagagtgtgaccaatattgggcttttagtgaacttcagccctgatattgcgtgtcaggtggagacttactccttgagcagggcagggccaatcacctaggcctgcctgcctctcatcccaaaggcctacatatgctcctcttgataccccacctggatctaccctcccccatttcctctgtcctgcatggagacagctggcccctcactcccctctacctccaagtccttacctatccaccgcccctcccagcatggccagctcccagctggatgactttggcaggtcatacaccccctctgagctttggtttcttctgtattttccttgattccctcttactcatggagaaactgaagggcagaggtggcctgaacaggagctgaggagagcaggtttcaggtctggaggggtgtaacaggccaattctcagggtacgtgggcaggcaggtccccgctgagagccagccagctggtgggagtgtctggatccatggctcctcctctcccagggtgtggtcttctggggtcagagtaggagcttgagatcctgaaagccctgcatctgcccaccctctctgttttggtattttatagacaagtaggggtgttattggtaatcaatctacatgataccaagggatttgctgcaaaagagaggtgctctcttatctgcatgcccaggccacagccacctccccacagcagaaactgtttcttgtctcatgtgtgtccttctagagggcatctgcccatttacaagctagtgcacatagatgcgcataaaaggcaaaagtgcacacacttctgccccttgtattttttcgctaaacaatatctctaacagtatctcttggagatactgttagaacccacccattctttttgatagctactgcatagtagtcccaacatagggatgtcccacagtttacctagccatccctcctttttttttttttttttttttttgagacagagtcttgctctgtcacccaggcttgagtgcagtggcgtaatcttgggtcactgcaacctccgcctcctgggttcaagcaattctgcttcagcctcacaagtagctgggactacgggtccacactgccacgcccagctaatttttgtattttttttttttttttttttttttagagacaaggtttcaccatgttggccaggatggtctcgaactcctggcctcaagtgatccgccctccttggcctcccaaagtgctgggattacaggcgtgagtcactgtgcccggcctcccatcccttattgatggacacttagattagtttgtcttttttactacaaacaatacatcacacacacacacgcacacacacacacacacacacacacacagaaaggctcagtgcttcacctatgaagcactgccttgactgtgacattacgttaattttaacttctatgcaaatttcttgtccttcatgttcattttctagtggattattggtccttttcctattgattaataagaactctttatatatcaatgaagtgagccctttgtcagtgttttgaaaatctgtttttctgcagttgataggcgagttggagctagacaagttgcttaatttccctgtcctgggttcctcaccttgaaagtgggcttctattacctggcttgaagagtaactgtaggaatcaagttagataccggggtaatatttctaacacaggatctggcacatggcaggtacttaagaaaatagtttccctccctccctctcttcctctctccttttggtgctttgcccttaaagcctgtgcagtgatattggaaggaaggagccaacctccatgtcttcctcacaggggaagacctcagcctttctaatgataaagctggggaagccggcccctcagatgcctgccccgcagagcacatccaagttggcagccacatgctccaggcccctttcccactgggctcactccctgcacctcctccttagtttctgggaccttccaaaatgagtcttgcagaaaagcagtctgaggttgtgtgcctgtgggagggaaggctggtacagcctcatgtaggcctggcacataggcaatgccatccctgcacctggaagcccctgaagatcagggccaccccagcccagactgggtgttttggtggttttgccacttccaggacagttgtttgttcctccatgcttcccagtgacctgctgcttttaccatcgtttggggcctctgtcctcctctgctttcttacctcttctctttagagataggtttgggctacttgtgctccttgagctatgcctagtgtccagtatgtcaagaaatgctgggcagttcctgaatgctttcagcaaatgagtctatctggcatattcccaagtctggggaaactgcatactaacgtgtttatgaaggagcatttagggcagcccttggctgactctgctgggatggggccatgtctctggtagatagcctttaggctgggatgagcagactggctcacctctcttctagcctgcactggggtttactgcttagtctagtgggaagcaaaggcagtaggtgggtgctggcccttgagaggagataaagggaggttgagactggggacatcagcaccctaatccctatccctctcaacccactgtcctgggccatccacactgcccagcctttgtgttgctcagcctgtcatccttagagcttgggtsgggggcacgtgccttctgttattttttaatgataatttttgaaaattgtgagagttgtagtttaggaaaaattcaaaccccttttcctttgttctcacaccaacacagcagtcaacacaaacagaagacttctgtgaccaaatggggggcagatttaagagacagcatcgtgctgtgtcacctaggcccttgggggccctacctcagcctgccagatagctgggactacagacatgcaccaccatgcccagccaatttttaagttttttatagagacagagtcttgctatattgcccaggctcaatttcaacacctggagatggtgtcagatcccacaggttgagggcttagtcctcaaaacatcccccacatcagtcactagtcacaagtctgggcctccgaaatgtctaactgactggcttcaagttgatgttcctacaaccccctttgggtttaatttgccgaagtggctcacagaactcagagaaacacatttcccagtttattataagggatgttataggagggtacagggaaggctctatcctcctgtaattgtttctctccaggcataccacccaccaggagcttccatgtatttagttatctggaagctcaggaacctgtcctctttggccttttatggagacttcacaggcatgattgaaacatggacaactatgtcaaaatgttattggacaaaaagattatgatctaaacccaacaaggcctgtctgttcagattcttcttgccctctctgcagcattccttcctccaggatgtggggcaggactcttatctggaatgaaggtcttatggcccacaatcaaattagagtcctgtcttgggcaagtggaaagaagggcaggagaaggtcagaaaaagagagattctctttacagtaacaagggctatgggagttaggagccagcaaccatggatgaacaaacatatatatatcttgtcatatatatcataatatcacagtgatataagaccacattttcactgccaacagttcagacacatagagtccacatacctttgtttgcccatcgccaggcactgtgcccttctcagaggtgcttctgtgatcagccaagctgttatctttttctgggtctgtgtgtacaaaaacagatgygtcgtgcggctttttaaaaagtgcgtgtgtggctgggtgcagtggctcacgcctgtaatcccagcactttggtaggcagaggtgggtggaccacctgaggtcagaagttcgagaccagcctggcgaaaccccatctctactaaaaatacaaaaattagccgggcgtggtggtgcatgcctgtagtcccagctagtcaggaggctgaggcagaagaatcccttcaactcaggaggcggaggttgtagtgagctgagattgcaccactgcgctccagcctgggcgacagagcaagactccgtgtcaaaaaaaaaaaaaaagtgtgcgtgtgygctttttagcgactttgctttttccatgacaccaagtcttggagaagtttccatgtgagaaggtcaggtcgttttgctctctgcagctgctgcccagtctccttgggtggacacatgtatgggcccagtgtctgctctcacagtctcctggtttgtgcgtctttgtgctgttgctgtgttcctaagtcccctggcctggcccagaggagatgcccacatgaatatttgtggattaatttcattcatccctttcccctcagcagttggtctccaagctcattctcctggatcagccagtgctggatgttgtaggagtcaggcaaagccttggccctggccacaggatgctcaaggctgacagtagagcactgcctgcatgtctccatgcggggccttcataacrtgctacagggcatgtaggagggacagggagctgggctctcccatgcagggtggggtgctgctcagccagaaagggggcaggagaggaaggctaggattagaggcaccctcgggggaactccttaggctgggctgctgacagaaccttcctggggagtttaagggaccagagaatgggatgggtgctaaggatcgagtgagtgggaccttgggttcctatgtcagctttgctgacaggaactccttgcaaatgggaactgccccatgactggctggcccccacagcagcacagatggacgtgtagcagggctcagcactgtggttgaacatgaggaggagtgaagatggcatgtcttgggtcccactgttccacacaccgtcctccctgagcagaggggaccaggaaagcaggcaccaagctaggtggtaggtgctgctggggtggctacccacaccatggaggctgagggtttgtgtctgggtgcccagaagcttctggggctccccccgcaggcatacacacctctggcaggcaagcctgcatgggccagagccaggctgctttgtccagggtgaacttctctccctgtcttgtagttgattcagaaacgttcccatagtaaccaaaccagacagagatggttctccttccttccccaaaatgtttgcttattttagcaggcagggttttttcttgtttcaacccagtttccagcctctgaaagaagcaaagggagctcagggccaggctggtactgcctcctgcttctgaggccgtgtggggcaggcagcaatggtggcctgagtgtgagtggaagggaggtgccggcctactgtggcctccctgagtgtggtgtctcccctaaagctgctcctgccgctgctcaggtgggcagcccccaggtcccaagatcactgagaagagcacagattttgggcacaggcaggcacagctcccagccactctaccccttactcagcttgggctacccgtaagcagagtggtcccgacaggtggatgaaagctatcatcacacacttggcatgccacacaaatcacccttaggtctggagatgggcctgcatggaggccttggggcttatctgtggatcctagaggccagtgctaggatgtgactgaagcacggagcaggaggagctccaactcacacctggctggggcctccataagctcaaggccctgccctggcttgaatggagcagcctgagatgtggatggtggccttagccgtcacacccaccacacaggtctctttctgtgaggcctggcccagtctttggtgcctgtggatggtggtcaaacttcctgttcttggtcactgctgcatagcactccactgtctggttgtcctggtggtctacctcccctcttcctagcggataggtggcttttggttttccactattagaaaaagaatgctgctatctctgatctcctttctcacctgtgccggggtctccaggacaaatgcctggaagttggaggccaggacacaggtccccacagccaagcgcttccacaccttgccaggtgttttggcagagccaggccagatgccctcccaccagcccttgccccaccccctcccaggactcagaaccacagatgactttcattttggcctatctgtggagtgtgccaaaaaaccccaggtggtttcagtgtgtgtctcccatgtgagtggggaggctgagcctcttcccacaccggtagccagtcccctttgtctacccagggtctgccatgttctctcctacttggcggctgccacaggtggttctgtttgtcctgactgtgttgcttaaactgatgggaggtacagtcatcatgagctgtctttgtttcttgaaaacatttatgccctgtgctgtcccagccctggagcctgagtgctcactgaaggccttgatgtsgtctggtagggaggaagggcctccccacccaatttctggtaccccatacctgccagagttggggggaaggagagaaagtctccaaagcccagggtactgtccttctcagcaagaatcagtcatgcccattgtactttaattckccaccagttggttgtgtaaccttggaggaaccccctccctgcacccagtgagcagatgtgaggtatatgttaggggtgggtacagtggacccaccttccagagcaggtctcagccagtgcctctctcctcagagagagccagtagtccagaaggaggctgttggagcccagcagacctggacaccccaaggcagggacctcatctaggacagcattgccattgccctcccaaaacctctcctagctcagcaggcagggagtgcctagtgactgaattcctctcatcctcaagaattccctaggacgaatgactgggaattagcagccccagagcaaggggaacaggtatatcctgactcagtcacccaggaacccagctgtggccaggccccaaggtctgtgcctgagacatctgtctcctgttgcagggccagacctgacatcacctccctgaccagccccagcctgacttgccccttctctctctccatccctctggcttgtaagagaggtaccttccctggtgggcctgtggtcagcccctgcccccaggcgccagccccaggttcagagcctgttgcaggcagacatcagtgaagaccaaagcacaacctagggaagaagtgttggtctccactcaattcctggtgccccacaccactccaggctgcaagcagatctgagttgcctcccagcaggtaaacaagccccaggactgtccacacagggtgttcctgcctaccttctctcatcagggccagggaacatggggataggaagagctggtttgtaatagcctcactccttcccccaagtcagtcccatatcaccttctcccctctcaggaccagttgtgaccaattttcatgccaccgctgcttgtccctttgctcacacttcaaggagcataatacctgctgtgtgccaggccctgggccagctgtgtggtccaaaagggctcaggtccacaggccagcctgcaagcctggattagtagtcacctttcaaagaggtgctrggaagtaaagtgacttggccatggtcctatcacyagtctgtgctggaggaggggtgtgtacttcactatgtatagtgtggaagcccatgcgttgtgactggtagcctcaagtcaggggccccctggttcctacaccgggattggcccagctgtcctagacaggagtgttatctgaatggcccattggctggatggggaggatggaattaggtagcagtgggcagggggatgtgggcatctagccctaccataggaggtgaggctgggattccagactgagagggaaccagtgctaggctgtggcatcaagcagggattcccttgggttgcgggactacactgtctgctagcctgagcccccacccccttttggtgtggctccaactggctggctagctgggttgtaccatttttccttggtagcctacaggcgtgtcctgggctggggctcttgaggctgagagcagtgacaatggaggatgctaccctgcctgcagtgccacagcagctgggcctggctgtgcctggccttgttgggggcctggcagagagtagcggcccatagtagcagtggcaggaccagcacttattgggggcttgatcggggggtgcctccttaggtgacatagcatgtccgtgaggcttaggtactattatcatcctcattgtacagacggggaagttgttaccaataggctctgcaggctgggaaaaccaaagcccttttctaccctctgccccctgggccatcagaggcctcgctcttccccttggacagcagtgcttatggctgttttcaggccctgggccagctgtgtggtcaaaaggggctcaggtcagtgccactccccaactggttggctgctctgggtgccgggagagaatgctgccaaagggatgcttgtcaagtgcttgtcttctgcagcagcaattgccagtattcctgacacagtgggccagggccccatgggagcctggtgctattgtgtccctttgaacaaggtgcagaagcctagggaataatggcccaagatcacaagctagcaagtggccaggctaccattcaaggtctgtctgaatccaaggcctgcactctcagccactatgtcgytggaaattcagaggtcacatctaagctctctgttccagcagtgatgtctgctgtggacatgtgatggggagggacagcaagagtgtcagactgtgtccttgctcctccttgyctctccaggaggtggactctcttgtccctcccttgctttcaccatcagagagcagggctgagacctcctggtggtgaagcattctgcccagcccttggtcacctgatggtgcatgtcatcttccactaagccattagagaggcccactctcaaggggtgcccaggtccctaggggagatgatcaggtaaacagagcacatgatccagcagccatggaacccagagctcacagtgtcttttgagaaggcctgtggtagatgggaagatcatgggcacaggggcagctgggctgcactggccccaatttgtagaaaccacaagtaaatctcctccacatttgacttccctctttggggcctcacctggcactctgttgcccctcctgcccacctctccctcaaggccatcctaggcctgttcagactgttggtggaggccatttccagtcagggctttcctgccaggtgttgctgtgctccgtgttgctgtgctcaatgtgactgcacagcccagccttccccaagcttatctccagccctgcccaggctagtgttggatcctgcctgagcccctatgggagtcacttttgcacatgtgcttttggagacaggcctgcccctcctggagcacaggccccatcacctaagtgagcagacagtgtgagaatgacaggagagtgacgttagaggacatgcctgtgaaggacagaacagggccaggcttctgagcagaagatgcagcatgaggcacagtgtggggcacagacagtgccacatgcacatcagggagggcctcgcagagttgcatgctatacgcagtggkkggtggccagctggccaccactggaccctgttttcctgggccaggtgcagtttggtctttctcacaaagaaagggggactgaattgaggagcgtcttccaggtgttgcactagctgccctgaatgcactggaggggctgggctggggctggggctggggcagaggcagcaggagcactgtcaacccaccattcctcagggctccaaagtgctgtgtttggcacttctacatacaatggcttgttgaattctcataattcatgagatgtaggtagtgccattgtccctgcctcgcaaattaagaaaacgagacaggcacacagcaagttygcacctgagccaggatttaggtgttctgagccaggacccagactgcctgtggactgatgggatgaggggaagcggagtacaagagggccgaggaggtgggcttgggggacctggtgctcagccctggcactctgatgctcagatctgtcgtcccgtgtgtctctgcctggtgtgccaggcatgtggccctgggtctgcgtgcatgcatatgtctgtcctccaatggacagggcgctaggatgcctctgagggcaagcagtgtcctcagtggaggatggacgcaacacagtagagatgccactcaaggccgtgctaggatggaagggtgctgcttattatcccactctttccccaagggtagtctcagctcctaatgcgcaatgtcatctggttttcagaagaaattgggattgattgtggcttttcctggggtatccccatgataacaagtcaccagtggctgtagacatcccaccctggctggtgaggaaatgggctgggcttctgcctctggctctgcccttggctgtgacctaggcaggtcatctggcctctctgagtacctcctctatcactaagattaactgaggtatgcagcagcccttaggactgtcaggggatcaaaggaaacccagtcacataacagtgggaatcataggacagaaaagaaagaaaaaagtttaaattgaggaaataagagctacttggctgtagtaggaattgctgcactagcactatttttagcattgctgagatgatctatgggccagttgcacaagcagagtaaacaaaagaaacacttcaagttctccagggaaaaaaggtcctgtttttaagagtcttaaaagagttagcaaacttgtgtggattctaaatgtatccccgagctctccttccttcccacatcctgggctctgcaagctttgtggaacttcacagcttccggcttgcacagcccccgtgttcagcctggagcaggtctgaaggccgccctgtctggggaggggcaagcctgagaggcagcaggtggagagggggtgcttcctgcctgagaagctacagtgtgtcctcaccagtaggagaggtcagtaggaggaagtacacacagaggagtggcagggacaaggccacaggttacccaggcccctgccctgacaggaccacagcaaaagccaggccacctgcattcacagttagaattttwaaaaaaataattaaataaataaaatgtaagcagcctttagaccatcgttcctggtataaattattttctggctatccggagacagttttcatctccagatgtggattcaaaattctggcaaagccaggatgcttgggcagaggaagatgatcttgttaagcccttagcattcatgatcccatggaatccccatgaccatcctgctaggaggtgcagaatctctgcagacagcgcactcatgacttgcctaaggtcatatagccagtaagtggcagagcccagactgggaacccatgtcccttgggccagcctccatgccggagtttctgcccagcctatcagaagcagctgctattttttccctagtgggatgccagtgtttgtatatacatccaccacctcagcccacagccccctctgcccccagctgccctgggtattcagtcaggagctcgctgtttaacattcctgaatagaggagcatttttcagcatgaacttcatttcccaccacaagttatttttcagaggtttgttcttggaatgtatcccagcagcacctccctccctccctctctccctgcctccctccctccgtccctgcctccctccctccctccctgcctccctgcctctctgcctccctccctccctccctcctctcctccctccctccctgcctccctccctccctgcttccctgcctccctccctccgttcctcccttccttccttccctccacctctccttccctcctctttcttttcttttctttctttctttcttttttttttgagacagggcttcactgtgtcatccaggctgaagtgcagtggcttgcgtgatcacagctcactaaatctcgacctcccatgctcaagtgatcctgctgccctagcctcccaagtagctggggctgcagatgtgccccaccacacccagcgcacatctttttttgagggacaggtctcattatgttgcccaggatggtgtcaaactcctgggctcaagcaatacttcttccttagcctcccaaagtgctgggattacaggcatgagccagtgtgcctggccctagctgcatctttctcaggcctgtgtgtggcggtctcagcttgggcagagcttcctgttctacatgctttgtcctcgtaggacactgctctgggcccaggtgcactgtctgcagggggaggtacacttgcaagcggaggtgtgggaccttcagcaaggctttggaaagtagactgagcaggtggcccactcacattcaggaaagcctgggcaaaggcagagtctgggtgtgagcaggcaggaagaggctgagggagggctgtggccacaagaagctgcaggacctggcaggggcagggactacaagcaccccatcttgggaccaaaaggaggagggggttgctgttagaagtttccctcttgagagaagacttggcagtgccaccactacactgtcctctcagcccacagagcactgggtgctcactccacatgggtattgcccgtggaagtccaagcaaggggcccaggtggtacctcccatggcccagagatggacaatgtttgagctgttccaatagaagagtgtgtctttatggcagggccatatggattcattctcatggcagccaagagcctggggctaccccagactctctaagggccctggctgacttttgagccccagagttaaagggcacaagcagtcctgagggctcccatcctttgctgtgcatgtcattagggttgccctctgtggcaggagcctcagtaggtgtggctgggacttgtagacagcaggaggggctctgaagaccatagcacctggtckaagtccagcataatcctctgatcttccctgtttgcctgctcccagtgtggacactgccctgtcctcagaatttagtcctgctgtgacttcctggtcttggccccttttaccttagtttctccatytccaaaggtgggccagttggatgakatcagtggttttccagtcctttttccaaaagaagcctttctgtcatgcccaaatggaaaacagatgaaagggcagctgttccagcagaggcaggaagggccaggccccacccgctcaggctgcacccccctgcagcctaggctcctgagcaggccgggtgtgagcccagcggaggctgtgggctctcctctgccctgccaccagcggccatcccagagaagtcaacccttaggtcagtggccagcctcctttctggggtggcttcagtctggaaatttgccctctttccctttctcttccctttttcctccctctgctttcccccaaccccacacacaacttttttcctatttggcaagtttgaccaagttgcatctgagagagctgcattgggattgaaatccaaaagcagagcttggtgcctgatyaccatgatgacaggctgcagctgacaagtgctcctggggaccaagaggaacagaccaaggactccctcacacatgggcctctgtgatgggtgtcctatacccacctgtgagcccggtgaggatcaccccagccagcctcaggctccaatcctgacctgagtggctttgagcaagctggtcagtgtttgtcagcctcagtttctttatctgcaaagtggggttgaccagacccacctcttagagttatggggagggtcacgtgagaacactctgggaaagcatgttactaccatgggcccccagggcctgcccggcacacaacactgccattgtgtccaggggacttgtgatagggaaaaggaccatggataaaggcagacatgctacagataggctcactgaggtcagtgggggagaaggtgagatggatcagggccaattgagaaggccacatgaaggaatcgtaggaatttgatttattcaaaatacaagttttgaaatgctgatctctaaatatgagtaaatagtctagaattaagttaggtcagagcaggtagagcctcatggctcttccccgtggactccaccccatcactgggcacatcactggagaactatagagttctccaaactcccttgctgcatagggatattgagtcatttgtttagactgctcagagcctgctattgggaaccccaggctggagaaagcacacagcaagaactggccaccataggtccagctctgagctttatttccagggaggagcctacctggctatattcagaggaggggtggaggagccttggactccaggccatgcctcggcttaggcccagactccatacagcccagccaggcaggcacatgaggcctcggcctgatggggaaggaacctggccctgcctcacgggtgtggggcaccaaaagaggctgcgttgtggaggcctttgacatggaaggctggctcccaagggctacagatgaggagctcctctcctgggagacaggagataactgtgcttcgggaaacagtggtaagagggagggctccaactgctgggagcccaccgcccttagctttactttttgtgaggctggttatgagcaccacttccagctcttagcaggtgccctgagtgtactactgtgtgagtctcagggcgctgcaggtacaggaaagaggtggctgccagtcctcagcaagtgtgcttgggagctctcctggaggcctgcrctgaccttgcagttggccagattgtcagacagactcagtagaaggcattccaggagggaaaaccaagagaggcagtttgcagcgtgagggtccctcatggggtggagggaggcagcagtggggagggcagactaggccagtcctgaagggctgcctgccaccaccatcagcaggccggctctgttctaggcagtgaaaccacctcggggtgtggaggcccgagtgctgtggctgctggagggagctctgagagcagcggactgcatagcttagagtgcaagcctaggacaggacagggggctagagagaccaagagagtgctgaggtgggattgagaagaccccaaaccctggtggctgagagagtacgttttggccacagataatcagaggcacttctggctccgctggtggaagagtgctgggtttggagttagacctaggctaaattctgctattctccagtgggagcatcttgtcagtgtgggagctggtccgaaccagtgaccctcttcctggcagatggaccctgtcccattccctcacataaggggtgggaggccttggtgccgtaatggagggtgctatgcttgggtcaagtctttctggtcacatctcaaatttgtccctctagtttgggggtgactctgtagggcaagcatgggcaagtttgttccctttctgaggcaacacaggggattgaaggatttctccctagagctgtcatgaggcagtaagaggtagtgggatgtgagcctacttgggaacccgaaygcccttggaggtaccagctctgcctaggacctcacctctggctcgtggtcaggctaacccatgctaccagagtgcctgttcccgctacctgttcagcttggccccctccctgcacaaagggggtctatctgacaaagatcctgtgcaggccgtccagggaggacacctggcacagaccatggcaactgccaccattcatggcctgaaaccacagtttggttccaaggaattctccctgcccccattgcttccccatgaccttccctaccttgcagcctagccagaggagccagatccccacaagcccacaaaagccattttttagggaccaggggtcagaagatggatcgactgccctacttttctccatgtgaatgtcagatgtggcttttctaagatccgggctcccctcctgagatgaaacagaagcagctcagcagtcttccaaagagtgggctattctagaagcctgggcagcaaggtgggggtggggctcagaggggcccagtataagcatcctattgcctcagggaggctcttgattccatcagatcacacttcaggcctcagctcacaccaagaggccttggagcctgctggccagtcttctctgcccaatctgttccccagattccctgcaacccctctctctccacaaaggtcctcacccagatatggtacccactgccacacgcaccccctttgcatgyactgcctacccacctcttgccctcctcattctcctgtctgtcctaggcccctgccatcctcaccttcctccagtggcccatccttcctccactcagtcctccaggctgtggctgggtcactgcccatccacaagagccctggtattggtgactaagatcccagttctgcctcctggtgatggagaactgtggggacagccatcttggggcatcttttccccttcagtagggcactggtagcaacaacagccctgtgcacaccaggtgccgcatgtgccgtccccgtggatgtgcacgtgatccaggcacagctgtccactgagatggaggcagccccagactgagggacagggatccttgagtcgatccctgctgtggctgacccaggaaggtcatttctgtcttcctcatctctgcgtcctcactcatggctcacacagagcatttggactcagtgacatctaaagttcagcacaggctggacaatttctgagtagcagaagctctagcctgcaagaatcaagtggagctgtgggcatctggacaggatggtttttgggggtctgtgggtctagggaggagaaacgcacttcactctgtctcgaccgttggggaaaggagaggaaactggctgactcggaactgtaaggctcagcagtctctgctgtcacactctaggtagaaaaattgccagacacaggtcacacagagccagtgtcccacagcagggaggcaggtaagcagcagcaaggccttgtgcctccaaaccaactggaagcttcaaagctcccaggctgagaacggggactgttaacactgaggaacattcttgccacggcaagaaaggagccagggccaggcacggtggctcacgcctgtaatcccagcactttgggaggctgaggcaggtggatcatttgagattaggagtttgagaccagcctggctaacatggtgagaccccatctctactaaaaatataaaaattagctgggcgtggtggygtgtgcctgtaatcccagcaacttgggcggctgaggcaggagaattgcttgaacccacgagacagaggttgcagtgagccaagattgcaccactgcactccagcttgggcgacagagcagagaaaaaaaaaagaaaggagccaggagaaatctacaggtctgcacccactcaggccttggaagggatggctatagggtgccactggggctatgaggtcccctgggcagctcagccgacagcacctttggcagcagcctagctctgggatctgggccttggatttgcaggaccagaagcccaccaccactggggtggggggtgtgaaggtacttacttggaccagccacgtgagccaaaggccaagcatatatttccaaggagggtgtgaccacttaagcaggctcctgctggcctgtgggtgagcatggctggggtggcctggtctcctgggctccttaggttggcagagagctgcaacttcataggccttcaggagtggccctgaggtgggtaagcagttctctctctggggcagtggtcagaggcttgtgtcctggacatccaggtgctttgtgggtaattaggtcccacagggttttcctgcatagggtgctgacagtgccagtaagcgcagctctttgagcccagagaatcctcaaggatcagggcaggcagtctcaccagcctctgattgtcatagcactatcacatgacgctccagggacctcttggtatgtacacaagcacttcctggggggttggggggtgacagggtaaggctcagcttagtgaggaacctccatgctcagggcctgagtgtttttacctgtcagacatggcagtatccatctgatggggctttggagagggctggcacagatacaggcacagagtgcaggacatcgtgtggtgctgggagggggaccaaggaagctggaacccacaaggcctcggagcccagctgggagcaacattctcccagggaagtctccccagaggctttactcagcagaggcttagcacagaagccctgagctcccctcttccaccacaggactccctcctgctgtgatagccaggcactgggaccccaagctgcccagcccattctgagcctcagtgtgttcatctgtgctggtaggtggagtggtgcctgcagatcccttctttggcaatgtgtctgagagagcacctatccactctactctttctgtgggaaggcatgcgcgctggggagagctaggtgctgcccgtgatggacctggaggcctctgggatgcaggggactagtttccagagagccacacactcaccacagacaacacacagtttcttcctggcctgggtgtgatgagcagatgttctcagcttcctttggtccaacttgatcttacaggaagtagataaggtatgaagtaaggtcatgagctgtgcaaggtgtgagtgtcgctttggtcctcgtgtctgctacagccctgtggacagccgggaagagtggcccaactagctctggagcyagtcgggccttggggacaggtcccagccatagtggccttattgctgtgtgactgcaccagtgtccagtgtttctgaacctgtccctatgtgtgtctgtcaaatgactatatgaatgtaggtagatggcaaggggctgttgtggcttgagcaacatgcagatttagaactccttgcttaagaccctgaccatggtgaggagccccttgtcctcacacagccttgaggtagcttgtgctcattgtgactcccctgcaagtgaatgatctctaggtaacccagcctccttcttctgtgtccccagcagcaagtccagtgcctggcagggagcagtatccctcgaggagatcctgaggcactgcctcttgagttcctcctggagggaaggaaggagggcagagagtgtgacattacccaggctgaaggggcaggttggacctggggctgatttggactaggggtacctggaaggggcacagagtaagccttggaccgctggctccaggaaccagcccaggggtaggccaggtggaaaccagccagctcagagaggagatgtcactaggacaggtgtcaccaggataggggctaaatgggtctgaggcccctgggtgtctgtggagggaggaacggcgctatgtgataagagagaagctcgctatgtgataagagagaagctcatgggggcaaagggttgggggtgggtaagccagggcttggggcagcatctctctcacctagcccgtgcaggttggcccatccctgcctttccttggcctcccctcagctggagtgggaggagcagccaggagttggtagactgtcccagtgcagcctaccttcatgggaaatcaggaagatgctgtgtgcacactggagctgtgagtaccaggggcattggccagacgctgtgagtgaggccctcccctcctgagcctgtttctcatctgtagcagggtacagtacccgcttccaggccggagagcgaccctccctgagctctgcaaagctgctcatgtcctggggatggggtactgttgctgttcttggaatactgaaactgggggaaggggtgtcctgagagctgcctactactcccaaccctacccctcaaacccagtgctttctctgtgggcctcacagcctagctggaagatgaggccccttccagctgtaaaacccacttaccatggcatctcttttttgccctccgccctgaggacattactccagcggtcttcactgcagcccccctgcccaactgtaacagcaaggacagctcggctgtggccagtcgtttcccccacacacctacacttctgcctgccacagggcactactggcacaactccagggggcgccattcacataggcaccgcctgcagaggggggatataaccctcacacacagttggccaatgccatcccggcctgccgcactcctggccacccctacaccatgctctctggggccccacagcttcctgcagtgagagctgcacccactttgcccggcagcggtccacagcccgccaccagcggccagtccagggaaccggagaggattggccggcaaaagtcagttgcgctcctgggcccgcttccagkagagtgccggcgccccgtccggccgcgcctgccccgccccggcccgccgcgagcgagagagcgaacgagcctccgcggccatggcccggcgctcgccctagctccactgcacagatgccacggcggagccggcgggtaggaacttggcgggggcgggggccgggactggggccgggactggggccggggctggggctgcgcaaccgcttcgcctccgctgcccgtctgggtctccactttgctggcgcttttgctcaatcgtcccctggtgggctctggcggccgccccccgcctcggcgcaccaggcgcagcaggaagcccgtgggctgtggtttccccggcgcccccgcggaggaaatcggccggcggcggggtgctgcgcccccatgcccagggcgggctggcacccggttcagcgtcaggtgggcggccaagccggcttgggcggcggcgcgcgggggcggcaggcgctggtgaagcccgcacacgcgccagcgcatccagccctaccaagccccgggctgggagctggctcgtgggggcgtgcgctgcgcgaaagcgaaagccgcccgccagagcaactttgcggcggaaggcgccgacgaggagctgtgccgtgccgctcttggggatggtgagctggccgcccggccgggtgggcagcgcgtccgggcgcggtgcttcgctagctataaataggtgctgtgcggggacaggaagatggttccagccctttacaagcaccggcccgttatgtgcgctgggctaggaccytgccccgcagcggagtgggaggagtgaggttaggggtaacggttgcatgggatggggggtgggcacatagagcctacagcagagttggcggcggggctctcccatgcacttggttgtttgtcgtttctgcttttcccgggagggggaagggaggaacagcccggcagttctggggaccttagcgctcmacgtcttatttggcaggagaggctggaaacgagcgggcgccagctgcaggcaaattgcaggctttcccagcccttgtctgcagagagaatcattacctgtggatggcgcggggaatcccttgccctcagtagccccgcctggagagacaggaccgcgttgtggggggtggggtgtaggagtgggcggaggccagggcgcccctggtggcctgtgtacaaccctgcggccagagaggcccgccctgataggtttgtggtagaagctgcaggaacttcctgtccctaggggtgttcaacctggcctgcttctggggcccctttcctcccaaccttaggggaggaacaggactgcgggaggggccagaccctcagctcctcagggcatcaggaagatagggagctgctggtctggaaactcagtcctgcctctaaaggcttcgggactcctgagtagggaggctccakaaggggcaatctgggccagggctcggaggggtgctgcccagccggcctggctctgtctgtgatgctcatcttccttagggacaagccgggtagagtgcaaagagcatgataggcttagttcagctgtagtcttggctccctgcaggctggctgccctggaacaagtctctcccccagcaaggtgtaagtgaaatcatrtgttaaaggagctgggcaggcagcctgtgaagacggttggccccaggagatgaagtttgccctacacgccccacgccatcccctccttttcctccaagctgtttcgccgctttggtgacttgtgtgggtttgtgggtaacaggggtctccccaggactgtagaggattttggtattttccccacagctgctcctgacctcagggccagattccatccccttcctggctccgcttgaggtgcttaagaataggctggaaccaggaggaagtttttatgcttttctgggggggcggggaggcccctaatctcctctcccagcagccctctctgctgagaggctccatcgctctctagctgcagccacccactcagcagctggccctcagctcaatgcagtctgctcctacaccctgtgcccactgctcttgggaatgggatgccaacaggctccccgccctcgcctgttccgagcactgagtcaccacgacacccgtgccacgggggatgctggaggaatccctccaccaggggaacgggctctcccttggttgctcacagtgtcgtgttttctgtgaacagagctggcagagctgagctcctccaggaagccttgcccacccatcttaccaygggcatacagggctggcttggggctaggagggcccaggaagacagaacactcacccactgtgtcagctcaggcacccaggacctgcttcctggagaccagcctgctgctgcgtgcccactctcgtggtcccctctgggtgatctatcttgaagagagggagaaaagctttgtggagaagtatgttcagcccagcattcttcatcagaatccttaagtcccagagccagatgctcaccagtagcccacttcactgtgcagtgaagggctctgtggtcattttgaatgatgtttttggtgatgtgggaaaatacatgtactgtatttgctgagttaaaagtcaggattaaaattacccactttccgctcaggacgctgcgggtgatggggaagactctgagggagtcactgctatacccctgactcggctgcccatttcctcatctgcttggccgacgcttcttctctggcaccagctgcatcctggtttttttctggctttcttcaaaaaccccccacatcccttgctctcctagcccattacttcttgttccagcttctctcctgtcccctcaccctggatcactgggaagttgggcttccccagcatccttgaaagggatttatctgtggcataaactctccaatgcctactcaggggtagcctggatgtggcgctaggaacatgagggaggacaagacacttttccagccctcttgggaatcagagtcaccttagggctacaccaagggcaaagggatgtggaggccaggatttgtgggttttacctggaatactacttttctgggcagtctgcaggcaggacccaggggcccctgtctgtcctgactctctctgcctgtgggcttctcttccccccaggggcttcaggagttctctgagatttcatcttggctcacagatcttgagtctcccaggaggccaggctctgctcaaaggccttgaggtataggtgtgagccagagagatgcagccctcctgcctgcaccacccatctgctccaccctggggagcccagagtccaggggactgtggcagggcagctattcccgttcaagactcaggcccttgaaactggctgctgacgtcagaagctgggggcaaccctgcaggcagtgcctgaccaggccgggccaagcccaagaaggcccctagcagactcaggctagtttggattggacaacctgggtgagctggagaggaaagagactgctgtgtgaagtagatgaccacctgcccagctgcctgcttgctcccttgtcaggccaggtgccctgggtctcccaggtggctcctggcacctcatggcctgttccttcctcagcacccctgtgcagcgcccaggcagctccttcacagccattctgtctactcccaagtatggttcctccctcttctgccctcttgcttgagcctcacgtggcatcccagctgggcatggccctgggaatgacagaatggggcagggggttgcatctgaatcctgtgggtgtggcagcaggggacagctggaaaaggccagcagagagcttgcttagaggccatttcctgcaacattgcccaagggacttaattatgacaccctgaggcacccatggtgctggtggaagacactggccacctgccagccaccccgtccacaggcaggcattccagtggcagcctgcccctgcartgggcctttgcaagtcttaagaggcaccttttcaaaaccgaggtgaactggcatcactgcattctccatgcttccatttctacatctgtaaaacagggaggctrccaatttcttgttcctctgagtgttaagcaggggtgtaggaagagacttgaggtgggcgagtctggcccctgggtcctgtcccactttgcatcactaggcagccttggcaggtcacctgaactcagtttccctctctggaaaatgaggggtgagttgattacatactcaggttgtccctcccagtgtagacataggatgaatctctatgtccctactcagcccacacctgaccctcgtccactctgtgacaagctcgtgccttgggtctgagtactgttctgactggcctgctcctcttgcttacccttctttcttgccttggaatttccaggggcayttgatttcctgaagagcctttgcctgtgccctagaagtggaggaagctctagaaggagtcatgactgaaaggtggggtccgccaaggtgacagatagagctgggaaccctcagctcagggagcctcagaacagccttgggctgtgccactaaaaatggcccaagcagtgacccagcagccagcagtggggtttacaatgagaaycagaacagtgtttgaatttgtggcatcaggctgtcgagccccgggttggccctggctgagtgaaaggctgtgtctggcagaaaagagagcccctgcccctccaggagtaagctcccctgagaccacagtgtgctggagacagcatgagccatgagccatgggcctgggcatggccttggcctgttggccgggaatagcagtgttctataacttcagggacacttgtcacctcgaagtggtgccacctgccaagactgcacagccctcctgcccccaggcacttcaccctgcttcccagccccctcataaatggacagggcaagagcacaggctggcccggcagcatcctaccacctccacttaaccagctctcagttcccccaggaaagtcttcgtgggttcccaaatcatagcagtcatgccctccctctgtggacccctaggctcactctaccatgggactcagtgtttgaggctctgtttcctcaagagcagagggaagaccaccaaagtcttaaggctgtaggcagggtttggtaacttgtatcaggcactcagcttagagtctggggcttcataaattattcagattgttaaaatctctctctgtgacctcatctgccagtgaggagcctagagccgttctgaagggttgggggattgactgagatgcctggaaagagatgcttggcatggaggggaagcctcaagcacaatctcagtgtctttaagtcctctgaggctattggtgtgcacccccagctgccctcaactctataagcaagcattatcccagccactgtggccatcagggaacccagccctggtgacaccagggcccaggaatcaagtggggcaaatctgaagacagcaagtgtgcctgtggaactgggagaggcgaggcaaggggtacggccagagcagcgggacccagggctgagggagaactaggagagggccagaggagaccctcctcgcggcgaccctgcttctctcagctgctacttatggcccctgcccatctatgatcctgcctctgcctttccctcagatgccgtgggggtgttggcctggtgctggctccctccacctgccctcagccaggcctcttggtcactgctgcctatgcccttcttttctggccctgacttagctttatccaagctcacccctggcacattctccacaccctccctgaggcccgaacgtgagtccctgggctgaatgcagtggggcttctgctgtggcagttggaacctggccatgccccttcctcctgtgtgggccgtggtgaggaaaaccaggtgaagcaggggctgtcccttgtacctgtcccactccaggagaccctcctcagcaccttggttctctaggagcttcatagccctccacaggcccggtgttagagggacagtggagggagagggctgctgtggctactgcccctctgtggggaaccgctgtgtccaggtcatcctggggctgccagtatcatccttctcatgggtctcttgctgcaaacacagaagcccagctccacctggtgtaggcagaaagccagttggcttgctaccaccctgctggctcgtgactctgcctggtggcttcactcttcagaccagctttctctggaggccagcctcatggccataggaagtcccctcaccgttcgggaggtatgtccatctgcacaccgccccaggccacagagaagaggggttattcctaaaggctctcattaggaggggaagcctgactgggatcctggggcccatctgctggctgaattcccatggctggtggtgggtctyaggcctggccgagcaggcaagggggccaatcctgggggcagggaaaggacaagcccacaacagaaggggcttctgggaatagtgcccagtgcaaggtaaataaacataggagcccccatactggggcatgtgaatgaagatacagtaaagagatgaacaagggcacactagctggcctgaccctgcccgggaaacgtgcccttcagcacactgttaccagaaaaaggccaagcaagatgccagaatgaaaccagagcacatgcaaatgtaaaatgctgcctttcaagcctctcagggctggctggggaagttttgagagtcacaatagcatgggggtggccaagcgggcggcggtgtctatggttcccttctgattttccatggactcactgcctgatttgtttggtcttccatcctttctgaaatcagcagtgttatgttacaaaaggaaacggaaaggagatagggatccaaactgtgctggtgtgtgtgatgcaaactagacccgtcctcacgggtgtgtctgttggtgtctatgtgccctgggaggtgcagggatgggagggtcttcagcgggacgtactgctgcagcacagcggatggagacccaggagacagtgtctgcccattctggtgcctactgtagatagaccctgtctgttggaaagcaggtgtcttttcataagctgcttcaggatccacatctgcatggtaggaagatgcagcattgatgtttgctgccctggatgtggatagcctcagtaccctggttttgtccttttcaggcactgccaggaagtagaaggtggctgctggcctccacatagtcccccagcctgcaggtggaccctccatgtcacaacaggagccagtgtagaggccacagggtctcaaggctgcgagttttaaactcctctcaggccttaacagctcagggctggaggtgccctggctttcctcccagggctgctagagcagggtgggcccacacctgtgtacagatactgtggataatcagcaaggacccacagggacagggccctgagaggggtaccacctagacatcctgcagtggtccctgtagctgggggcccaagtccccagaatcctatactgcagcatgatgtgggccaggccccatgccaaggagaaagcaatgtcactcataaccttggtccattctgggcagcagtttcttcagcgtgttggctgcagggacccatctaggagccagttcacttattccaggcccctgaggtcccaccccagagatgggcctccttaatgcctgtttcctcatcactcactccctgctttccccacaccctgcctggaccccgagtaggtgtcagatgccatgctggtcactaggacactgcagggaaccaggccctggagctagtgataggtagggggtgccyagtgctgcagcaggtaaagcaaggaccaagggagataatggggggtgctccccaaagtcaactttgccctggttaagccttcaaagaggagtggggtaggatggcaagaagtgggaagagggagggggaccccaggcatcccaggagctgcagatgattctctgggcactgctggagagagtgggtgagggcagagcctagccagagcttccctgcagcctgctttgactcagcagttccacctctaacaaatggtctggtggctgggtaagcacctgtgcagggaggtgtacacactgggcctctcactgtctgtcctcacgtttgatcaggccccacctgagtgcatcccataggggacaggtccagcaaacatatgagatgcagccatacaaaagaggaggctgcagagcagtgggtctgtctgtcatttgctgccactcatgagaaggaagggggtggggatacacttctgtctccttgggacagtgagaggggtccaagaagcccctggctgggcagtgtcccctttggcactgtggcagtttccaggggataccagacagggtgtccccgaggctcctgccacaaccacccccctcacacacctgtgccatccatcccacagggcatctggcggatccccgtggacgagattgaccggccgggcagctttgcctggcacatgaaccgctccatcgtgctgctgctcaaggtgctggcccagctgcgggaccacagcaccctgctgaaggtgtcctccatgcttcagcggaccccagaccagggcaagtgagtgcagccaccctggacacagcctggcatgctgtgtgggtcaggggcacacacaccccaggaagcctctccactgctctggcccagctgtgaggaccactggctgggagcctggaccagctcttcattctccttgggggcctctctgtcycagtgtctagaacctaaacaacacttcccacccccaggcaccctagggcagacacagcctgtccccactgatcctggttccacgttgagactctggactacccagcctttcctttcctcctgcttcccccaactcagggctctcggggtgctgtcaggttgtagggaaaacagatgttcagaagatagctgtggttccccagacaaaggccagtaacagtggggtgagcgacaggggtgcctgggcctcagtggtaaacagggagctctccgccagaaagggcaggacagataacagagccatctgttacagctgccatttacagggggtgttggggggatcctggaagagacgcagctcagatgtagatgggcctggcctggaggcctcactccgtcagctggactgggcctcctcccatgcctgcactgtctcaccctctggctgtctcactcacctaccacttgccaggcgatgtgccaggagttcaggggcctccagctggggcctggggcaccctggagccagacctgagggagcagctataggctgctgagcacagcacacagggtgggcccactgcagagggcctaagggcaacaggctggtgccgggtcagaggcctactggctctggatagagggagctcaggggaagcttctaggggagcagccccaaacaggtggttaggtggaacactgaggaacaaacaggcatcctcaaggcagggatgggcagtggccaccatccagcagtgccatgtggtgtcagatgccctcctgtcctctctgactacccctgtatgaccgcaggaagtatctgcgagatgctgaccgccaggtcctggcgcagcgggccttcatcctcactgtgaaggtgctcgaagacacgctgagcgagctcgcagaggtatgccacctgtgtcctcctctcctccacggcccatgaacacgcttccaagcccttcccaggtggtgggcccgatccctctatttgcatacccttaggcaggatgtgcctaagggtccccatctgtgaggtagcacccatcctgtcttcctaggcagggaaggtcagccgtggtaatgaatgcacatgaattcagtgagtcatggatgcacttggtgattagtaagagccatagtgactccatgaaactgagctccccaagggctgcaccacccagggcggggtcccaagccctctccctggcaggctgaccaaggcctatgagaacaccatgtgtgtgcatcgtcccttttcagccttgaggcaggtgcagcagtacctccttctcacagctgagcacctggaggaggccagggaggttaagcagccagcctacgaggtggggctgttgggagttgagccaggactgcctccaaagcttatgcctggtagggctggctgtggcttggtagagggcatcaacttgaggctgttggggaggagtccttgccagcccccaaccccaggcctcgtgcattaagggccaggaagacttggctctgcagcaaacatgcttggtggccctgggcaggtcccctcccataaaatgcccagagctgcccggagttcacgtcatggagtcaaaggggagctgggcaatgctgccccagctcagcccaggcctgttattcaggagcagtgccacctccagagtcccgtcagccccttgctacctggaagagtgtggtggggtagccagaggtgcagaggagggaaggcctttctcaggcaggtctctgggcccagtgtccttctctgataactgaaacacagccctggccagctggcagatgtccggagccacacagatgtcaggtgggagaggcccaggttgggctcaccagcccccagaggtgactcattgcagtggagacaccagcgacacagcttcttacctttggtttctttgtaggggtcagaacgcccagggcccaaggtctgtggcctccccggagccaggatgaccaccgatgtctcacacaaggccagtcctgaggatggccaggagggcctcccccagccgaagaagccccctctggctgatggctcagggccagggcccgagccaggaggcaaagtgggcctcctcaaccaccggcctgtggccatggatgcaggagacagtgcagaccaaagcggggagcggaaggataaagagagcccacgggcagggcccactgagcccatggacacgagtgaggccactgtttgccactcagacttggagcggacaccacccctgctgccaggtcgcccmgcaagggaccggggccccgagagccggcccactgagctgtccctggaggagctgagcatcagtgcccggcagcagcccaccccgctcaccccagcccagccagcccccgcccccgcccccgccaccaccacagggaccagggcagggggccacccggaggagccgctctcccggctcagccgcaagaggaagctcctggaggacacagagtcaggcaagacacttctgttggatgcctaccgtgtgtggcagcagggccagaagggtgtggcctatgacctgggccgtgtggagaggatcatgtcggagacctacatgctcatcaagcaggtgggtggcaggcagaggcctgggggcactagtctgctggcagcatccccactcttgcctttctatcctcaaggagggtctcccaggcctgcccttggggcgggttttaggtgttgttcccacaccatccctgctgttcactttctgcaatgagctttaaaaagtcaatattcaacctggaaggaagtgagagcccgtcacagaaaccttatcacaaccagcgcggggagtctggaccgctgctcccaccgctgcgctgggcctctgggtayatcttagggcatttccttcaagacttctgtggctgtcatctaaagatggctgcagtgaccagagatccccttgtcattttgccttctttttttaaacattttattttaatgtatcaagcactttcctttttctccatttaaaattattcccataggaagaatctccaaaactttagtgactggttcagatgggatgaccatccctgacatacagtattccctctaatcatgtcagtttgcaatgcatcctacccccaactgccccatatcatatggaccttgggcactgaatccctagacacacttgacacagcatggggctatcaccatcaggcctgggattccgaaaggcctctcccactctaatcatggccctccatcctgcccacttaaagggcaggttctagctcagaagactcccctcttcccctagcaactgagcctcagctgaatttgaaggcttggttggagcccttgagtctgcctgccagcctcagcttgtgaggatgtaagtaactcagccatagaaatgaacttggtatagccagatgggctcagaggaacagctgggtccaattctggcaccagtacctggtggtgtggcacctgagcaggcacccccacctgggagatggatgggcatctgcccctgctacccacgaagagctgggacgtaggggtctagatgcggacagcagtggggacggctggctattcagcagagtctggggtgttggggggcacccgagccacagggcatgccccctacctaggctggtctgtgctacatacacagacagggctgggggaggctaaccacartggcctgcgccccctgacttccagcatctccctgttaaggtggatgaggaggctgcgctggagcaggctgtgaagttctgccaggtccatcttggggctgcygcccagagacaggtaagcccaatttagcctgtgccagcctcatcttgcggagcctgctccatatcaaggccctaggatgcaggctgagaagcagatccactcttgggactgttcttgtggtcagcttgggctgaggggagatgagcagggggcagctgagcctccagcacgtggccatagtgggcaggaacttgacggcccagaccccagttcagacatgctgaggggtcccctcacctcagccaccttttctgtaacaaggaggatggcccctagccagctgacctcaactgggaaggtcattccgtttggaacagaagtagaagcagcaatgttagagccagtctggttaggagccaggtggcaggggaaggtggagatgcagcctatacagggactgccccccgccccaccgccccaggggaggacttgtagggagcaaggtgtcctaagacagggtaggcaggagtcctggagtttattaagcagggaggaagcaaggcagcaacactcctgagtagggaagatggggttrgtgcaaggtccaggccagggctggggaggggggggcggggtccaagatatggcagggagtagggagttggggaggcccctcctgggaggaccccaagctagaggtgggagggctgggatcagaattcaacaagaggatgtggcagggaggggcagacatggcaggcagagagagcaggtgtgccctgtctaaaacataagcctccaagccagagggtaggtggcatgccatttgagtaggtgcagtcttttgtccccaggggtgtcccgatgcccccggtagcctcgtcccaggtccctttgttccaggtcccctagcagagggctggtagctgcctttggggtccagacgggcttccttctcagtggaatggagcctcaggcccccaccacctgcctgggctattacgtctgcggaagccctcgaggttcagctttgaccaagcaggctgtgggccagacgaggcatgctgtggggagtaggtgggcctggtccccagctaagggccagagtccttgacagggagtgccccaacccccagcagtccccaccatttcattgtccagctaggcagagtgcatagcacagctgtctgggccccagtgctgggcgcaggcccaggcccaggtccaccagggtgcccctgcctcctccactggcccaggtggagcaggtggacatgggagtggtgatcactcaggagataggagggctgtttctgcttttgacgtccttaaaagatagacccacacaggaaacccccccacaaccccacactgtagcgtgagaagaaagggctactgagttggcaggagccagggctgggccagaccccattttgccgaggcacatgcatattggggcccctgagggctgggtgagcagagatttccgtcagagacctcggaagacacagcctgggttatgggggtggccagagccaggggacccaggtccttacctttcaggttgcctgctgctgggcgacgccaggccaggccccagcagtctcctcccagtttgtggaggggagtggcagggaggaggccctaatgaccctcagacctacctgcctgcttcccagaccctggtgcggtgggggcgccttggtatctgccgtgggcagatttgcgtttcctacctaggattcttaccctgggcccagagaagatgccactgtaggggctagctgccatcctctggttctctcctcccttaagcccaatcttggaggccatttcctgccatcagagcccatagctcccgcccctcagggagtgtccattttgctcacggcatgtccttgttgccatggcagccctgaacccgcctggagggtgctctggacataattagaggctcagtgcccacggctgaggcccgctcctgagcgagcacagggacactgcactcaccttcctccagcgtgtctgctcacgctgccagctaggctgctacaacaccactggtattsccgcaggcccgcagggcccgagagacaggtctgtcctcctgccccgcactcccacaggatgggctgcccacaggacaaggctaggccccagagcaccggcctggggcacatcccagacacccagtatgtggcagagtccacaggggcccgtcctgaaccatgtggaattgaggaacagggcattttagcaaaaccaatgtcagaagagacagggtcatcggtggtagcaaactgcccccccccccgcccccatgcactgaggtacctacctgcaggcgtgtgactctcccacactcgagggggtggggatgggggtgctgtcagccycatgtgggccagctcccacagtacagtcagcctggtgctggggagggttgaagggtggacccactcctctgctcagctgtgagaggctgcctcagggctgcctcacatcacctcaagacatgctgtcagggcactggagccttcacacctgtcccaggagggctggctgggggtgggagcaaaagtagccctgtgaaaagaaccccaaaagggcctcrtggcagagggaattgtgtggatgaagactcrgaggcccctagggcccggctcacctggaaatcgaaggcccatggtgggagcagttgccaaggccaggctgcagggagaggccaagctgggggcagcactgggtgccgtggcagtaggtcacagtgggttgtggtatcaagcccaggaagcaaactcttgcagcatcccactagctccctcaggactctcccatgagtggccattgggaagtcaccctccaagactgaccacctgttcctgcattccctgggttgggagctgcacccatgcctagggtcctgcaggacataatcctcccagactggcaccctgtggtgtgagggcaaggccagctggaggtccttccactgagtccccaccagtacggcctggacattctcccagggaggggttctgggtctccagctgtgtcctagcatcagcaggatcctgatggggtgcctctctgatggaccttgttggcagcattgtgggggctcagtggtgccatatgggcagtgttggcagccccaggcgcacaggatgtcctgtgggacagcactggtcggctggcgggcagagcagcgtgggctcagggctgcctagccagcctttctcacctcttgtttgtcctcacaggcctcgggggacacccccaccactccaaagcaccccaaagacagccgagagaacttctttcctgtgacagtggtgcccacagcccctgaccctgtgccagctgactctgtccagcggcccagtgatgctcacaccaagcctcgccctgcactagctgccgccacaactattatcacctgccctccgtcagcatcagcttccaccctggaccagtccaaggaccctgggcctccccggccacacaggcctgaagctacccccagcatggcctctctgggcccaggtgagtcccatcccagtccagagctgggcccaggcccctgccaccatcaagtcctccctgcggggagagtgtgagtatgggtaagggaggcaagcagtgccctcccgcccagtcgatcccacagggtggcggggcaggtgaccgcgggtccactcaccagtcactggcagcctcggtggccctggtcagcacatcctacatctaccactcttaacctaaccctgggtgcctcagtctgtgaaagggggtggtgaggagggagggagcaaacaccatcacggacgtgtttgctactgtttcctccccacaaagccttatagtaagtaggaaggatggcttggtcaggtaggaaaaggatactagcccacaccaggcctccctcagggcactgggaggggtcctgaccttcagcatgctgcaaggccactggtatccggcctcagttacctgtgagcagttcctgggtaccaggccctactgggtgtggggccagcagatctgctcaaaccccatcttgcctcatgggcaagacagaagccagccaggatgagggcaggggcaggtcagggggcttgtgaaggaaaacagagaggacaaaggtgcgggcagtagagggccctgctggcctcatcggtgaaagctcctgttccttctaaaacccaggatccattggaatggcagcctgcagacagctaagccacagatccttcctttggggaggggatgtagaggcagcgctgctacagccagtgagtgagaggggagtagacaaggcaccatccccctcgctggtcctgacaccagcagctctggcagctgcaattctgccagactgggttcagctcaggcctgggccaggttccacctgccacccagggcagggagcccttccctgttggttcccaggactctaggaccatgtggccaggctctgaaggccctataataggacagggatattccctaactaatttgtctccccagctggtggggccccaggagagaccagcgtggtcagagggttccctgtgcccctggggacatccagcgatggaccagtttccccaaccctccctttcaggccctcccctgcttctccctccctgcctcaaggacccagcctgtttccttgccgcagaccctgcactggcccacagcctgtgtcacccctggaggctcacctgtcttcccagttgaatttcctacccatctgaaaaacgagacagccactctgcagaagtgcccagcagaaggcaggcctaagagcccccacagactgtgcgcctgagtggaggttgagttgagaagtcttcctcagctctttcccacggtggctcaagcagcaagcaggtgctgatgttttcacctgatgccatccacactgctttgaggattgtgaacatgtaggcatcctctagcccagtcagcctcggttgcactggtcgtggccctgtgagacaaagaattacttccctttgggtcagaacctgtggccatttgttcccagaggagcctgtgaaggcttcaggacaaagagccgtaaaagaagtgtagtgctggccaggcgcggtggctcacgcctgtaatcccagcacagtgggaggccgaggtgggcggatcacgaggtcaagagatggagaccatcctggccaacatggtgaaaccccatctctactaaaaatacaaaaattagctgggtgtggtggtgggtacctgtaatcccacctactcgggaggytgaagcaggagaatcgcttgaacccaggaggcagaggttgcaatgagctgacatcacgccactgcactccagcctgggcgacagagctagactccatctaaaaaaaacgaactgcagtggttctaccagcatgtgaccttggccatcccttttcttctttctgcctcagtttcctgcataaaatggataagatgaagataatagcactgcaggatttggaatgctgcttggcgttaagcagagacttggtatgggttttttttttttttttaatttttattttttatttttagtggagacagggtttccccatgktggccaagctggtcttgaactcctgacctcaggtgatccgcctgcctcagcctcccaaagtgctgggattacaggaatgagccaccaagcctggcctgtttgttttcctcactctgttgcccaggctggagtgcagcagtgcgatcatggctcactgcagcttcaacctccctgggctcaggtgatcctcctacctcagcctcccaagtagctgagactacaagcatgggccactacgcctgggtaatttttgtattttttgtagagatggggtttcaccatgttgcccaagctggtcttaaactcctgggctcaggagatccactcgcctcagcctcccaaagtgctgggattacaggtgtgaaccaccataccccgcctgaggatggtgacgtcaaggtgtgggggtgatgggagcccagtgccgtaatcagttggtcagtgttggtagctgacttactcccacgaagacccagctcctgtccctctgcctggggctgtcttgccttgtaccagtcccatgctctcgtcttgtagtttttgagggtcaggaatttacagtggctttgtggggtaaagttggctcagggtctcccacgtggttgcagtcaagctatcatcagtgcatctgagctcccttggggtgttggcagcctcaggtcctcactggttattggccagaggcctcagctcctcctgtgggcctttctataaacagctgagtgtccccggatcatggtgactggttctccccaragccattgaccccaccgagagaacacagaggaagccatgrtgtcttttataacctaatctcagcagcaactgagatctctgtaggccacacacacctccctggggtgtgggaaggcctggtggatgccagggccaggggtagcggagtagggggctagagactgcctgctttccctctgcctgcctgtcccaccatcaagcaggccaaagctgtaattcatgtccttctctcctctgttagatctaagaaagaggatctgtttcctagcataccttcttcagcctggagagttgatccttttctattcccattcccaaaaccaaattaaatggccttttgccaggatggaactgttgaatgacactgggggcagggggcgagggggtggaggcttgagacaaggcctcagccagcctggggcaggagcctcaggcagagcagctggatggggatggccatggccgctgaggcctctgcctagcccagcagtcgcctgctggccccagctttgtaccgggagctgtcactcctgctgaccaaggaggggagctggctccccctgctggagaggatggagggcctcctggcagaggagcgggatggggaggcggtggggtggctggaaaggcagtggttgatgaccagtgtggtgggagagtccagacctgagtgagaaggtggggagcagcaagggaagtgagggcctggaggcctgggaaccggggaccgatgctgagtagtcacctggccagcagccacaggcacagcatttgcccctcaggcccatcccggccttggcccaactgagcccaattcctggcccctgcctcaggccagggaaggtgtggctggctgggcaggagccatagtgccagcgtctactttggtcttagttgggttgtttggattttggtcctgacctcgtttctgaatgctgcttatgtgagctggagggagagtggacactgcccccccatcccctctcactgccttgtgatgggatcttaagagaggctgggcctcgaagactcaggtgtggccccactgggtcaggtgtatagccctctcgggaggcggaggagccctctgggggtggggagccagcccctaccagtgtcctcttgggtggtgagtggtttcttggcagcaccaacctggactgcctcagccaggaccccagcattggccacactcccctgcccagtgtcccagggcacaacctgggcccataggacctgacacagatgcgttggagcctgcggggtggatgagtctattacctgcagtgagcccatgtccccacagagggagaagagctggcgagagtggcagagggcaccagcttcccgcctcaggagccacggcacagtccgcaggtgaagatggcccccacaagttccccggcagagccacactgctggccggcagaggctgccctgggcacaggcgctgagcccacctgcagccagggtaaggcgagttgggagcagcccagcaccagcccccaggaggctgcctcacagctggcagccagggtgggtttcccggcctggccttgaagggcagggcctggggatgccccatggaatgagatgsggaggaaatgggggtagtgcaggctggacaggggagccaagggagaggcccaggctgaagagtttaatgcgtggcccattgtgtcaggggctgggtagagagggaccccagaggcttattccacccctggcatcacggaggggtactagcgagggcaggcggcctgcttgggcccactgcagaacccaggctgagcccagagtggggaaagaggagtaggcatggacagggcggagcatgggcctggtgacagacacttgagggacatcagcagcaggcagaagggtggacaggttgggctgggccaagcaggcgtccccgtcgacagccacgtcagattctagccctggcctcagtccggcctgttcccaccagctgccccaaccagccagaccccttggggactcctcctggcctgggcctcccacagaccacttgggatggcaggacctggcgccagcccctgggggccaggcatgggctytgtgtaaaccccattccttttaaagccatggggctgcagaggaatgtggagacgagccaggccagccgggtcctcccagctcgtgcagctccctagaggctgccaggcctgcaactggcccagccttcaggctctgggcaaactcagccccttgctcccactggaggatgaggcgaaagtggatgccctggggccagctcagtgaccatgcctggctgagcgaccagctctgggcttcagtgtcctccctggggcatagacaccaataggacatgcatcctaggatggttgtggaaatacgacagttcatgcaagcatgatgcctggaggtcttacagaacccagcaaggctcagggagtctcaggtcctgggctttgagttcatggtgttactgggtaaggttcacagtcccagcaccccacagctcagagccagagttgggtccctgcaggcctgagccaagtatttgcccagggtagaagccttggagcctgccagccagcacaaactacacagcataaaggcccaggacctggggggagcgggtgggggcgagataaagtgctcactgtgtgatgcgrcaggcaggaagtgctcttggtacctttgtcttccagaggggaaactgaggcctgagccgagaagggatggggaggctcaggaggctgcgagtgagactcagcccctgagctctcccccaacagctgccagctccaaggcccccagcagtgggagtgcccagccaccagagggtcacccaggcaagcctgagcccagccgggctaagtcccgccccctgcccaacatgccaaagctggtcatcccctccgccgccaccaagttcccccctgagatcaccgtcacgccacccaccccaaccctgctctcccccaaaggcagcatctcggaggagaccaagcagaagctgaaggtgacctcaggggctgggctggagccatgtgtgggtgggaggcataggttacaaagggggcctaggatgggggtgggggtggcaggagggcctggggtgtgggtgaggatggcataggggcctggggcaggggtgagggtgggaggggggcctggggcaggggtgaaggtggcagaggggcttggggcagagcccagccatccttgaccagtgccccgcccggccctctccgcagtcagccatcctttctgcccagtctgctgccaacgtgaggaaggagagcctatgccagccagccctggaggtcctggagacatccagccaggagtcctcgctggagagcgagacagacgaggacgacgactacatggacatttgaggggccactgcagccccaccgccacgccccaggggaccagccaggcctggaatgccccctgggcaggaccctgggcaggaccagaggcccacatggatgccactccccacacagcccccaggcctgcccagcccacctcctcatggcatcctccctgtacccaggtcaggctgtccacaccacatgggagcccagaggaggaggggcccgccttagccatgtgaaggtggattggtcgccatctgcacgccaggcggcatccttttctatgaagtgttgactttgtaaatctgcccacacccagctggccatatccacccctcgacgccgggatgagccggctctgcctgtgtcacagtggaggggtcctttagggccaggctcacccctcaccctttttttggttgcttttctaataaagatggaacagttgtctttgcctctttgctcacctctagggggcaatctggcagagtctctggcggagagttgctgtccccagggattctgggcctttactgccatagtccatagggcagggcctagcccccctccttctccagcatctcagggaccagccaggcaaccaaagcagcggctgggggtgcccagtggggtaaggagagagccgactcggggctgggccaggcagacgcctctagtgcagctggagccaggcttcaaaggggagttaggtgcatccccagaacgcacctgggtgccagtgggtgggaggctgtacggtgggagggcaggcagggctggggcagctgagaggctgggaggagggggctgtcagggagggaaaggggggatggggccggcagggagggtacttaactcccatcacagtcgccctaatggggccagtcacagaatagctgggctcagtgcaagacataaatatgaagctccttgatcaaaaaggattaaggatttttttttttttttttttttttttttgatatggagtctcactctgtctcccaggctggaatgcagtggcacgatctgcagtggcacgatctcagctcactgcaacccccgccttctggattcaagcgattctcttgcctcagcctcccgagtagctgagatcacaggcacacgccaacacgcccagctaatttttgtatttttagtatagacggagtttcaccatgttggccaggctggtttcaaactcctgacctcaagtgatccacccaccttggcctcccaaagtgctgggattacaggcctgagccaccaccatgtctgaccaaaaatgattaaggattttaaggcaggccccacagagcattaagcccctagagctggcacccttcacaactctcttcccctcccagcaccgcaggggccctcctggccctgggacctcccatggagcaggctctctgtccaggatggagatggggaccctcctcactgccctgtgcccctcatgggctggacatgcccaccacccaggaggaaaggcgtaaagggctgggcaccgcccttttggaaccagaggcttggtggccccagatgggtctggctgaacccgcctttcggggggctgagataagccagccccagttactcagctgacgccccctccctgcagggcctggggtatggagcttcccagactgcacacctagcccctaccgcacttccattgtctccagacacgcgcagcaacggtgcccaggccaaaaacaggaagcagcagctctccctcctccagttcccgggaactgtctcagccgatcccccagcacccctccctggagcctcacctataggaggacggacacctcggaccctcccctgcacccagtgctgtagggagcaacttcagccctgggcctgggatgaatgccctcgccagcctggggccaggagacaggctctccctggctcagcacctgagcgtccacttacaggacactcacctgcagaggtgccctgagcgccattgtgggttaagggactttctcccctctggagacagtccctgagaagctgaaggtcttgggggcctctcaccaaatgtctttgggaggtgggaaaacatcaaatgcgggtgtggcttccctggaacagctctgtgtggggactcaggagccaagtcccccagcacacgcctctaacactttcagtaggggccacctctctggagccacgggtggctgccaacaccctgtggttcccagcaggcaccacccaggcaagagagagaacaggccggggaacaatgggctggcctggccgcaagcgctggggcagatcacagaccggatggcctaagctcatgccctggggccacctctgactccctgcaagtgtggcaagggtcccttttggacaccttgagaagctgcagctgggagaggaccacccgcctgtctggatgtccagcccaggtgtcagggtccaaatgaccagtcccaggccgcagcccttaccacccgccctggctgcaggggctcccagaagccaccaagggcctggctcggccttgcctatccgcatctgagcttcagtttcctcatctgctcaagaagggaggtgaatactgattaaattatgcaaactcttagcggcaggattaggtgtggctgggacagccaaggctccccagggtggtggcatctctggagcccggggatgggccctgtctcccttccgggccccccgctgggcttgggtaccttctctccccttcctccttcctccctccagaggggacccctgcagagctgcctccgccccagggctcagcctgtgtctgacccaaacagctcctgcctccccctgaggatgagttgggtgcacctccttcctgcaggaagatgagggctagagatggaggtctatgtcagggccacagagtctggaatcctccctggagctaaaacagccctgccttattcaccctgcgcatcccatcctctgcttcagccccgccgggctcgccctgcatgcaaggcggggctgggacccagggtctgagcttcgccctctggacatccggctcatcgcctgccaaaggtcctgtggctggaggctccggcctcctcaccctcccacagggtcccagggccgatccaggcctgcgggccaggaatgtgctaacggggcaacttgggccttgctggtccacgcaggcacctgtggactttgagaggggactgggtggggaggggcggggaggggcggggcggggcggtgccgcagagtgcagggcgggcggggccaggccagcagggagtgagcttgtctggccgcctcgcctcggagccactgcactgctggctgcagacacaggctgcaccatgaagccagccctcctgccctgggccctgctgctgctggcgacagccctcggcccgggccccggacccacagcaggtatgcctccctgcccttctgtgtccccgtctgtctgtccatctgtctgcagccaggcctgggctgacatccctctgggctcagcctctgtccatctgtcaggccatctgtggctgtgctaggggtgatgggaagaaattctgagggtccatgtggaggggcagcccatggggatgggaggtctgagccgggcccaccctaaacctgctggtagctaggagggaggcgggggagaccagcagaggcctccgcctgtgtccccagccctgacagggcgggatcacggagggggagccaggattgtgggtcctcatcagggtggggctgaatccaggaaagtctagggaaagccccgaactccagaaccaggacactggtcccaggctgccccccgtcccccaccccatttcccatcgaccctcttgccacttatctcacttgcaagcatctctcggcctcctcccccgacccctgtgcgccaccaaatccttggccagtacatatttattgttgcttttaagtgccaggcactgcacttggtgaagtggggccagcggggtggctcaggcccaggcctggccctcgactggcctcttttgatgggggatggggaagggccagggaagtgcaattccagcctgggtgcatgcacctgccccagtccctccctgcaacccttccttcatgccagcccctggaaatatggccttgcccaccggtcttatggcccataggagaagttttgggcccggcgcccacagccccttgtggtgtgcacccccacttccctttccccactgctgggacccctgcttgaaatgtccctcctctccccagaaaggaggggagcggccctggccttctgccctgagcacggagctctctttggggtctcaattgcagcccctgggagagcgagaagtgtcacgttcagaccctgcaccattccctaccaggcctcaaatgagactcttggcagccatatcccccaccccagtccaggcaagcaagaggggttcttctgcaggcttcagggcccccagaaggcgtgctgaccacagacaccctggggagccaagagaggtcgagggctccagctaccgtggcccactgaggacccctgcctgtgggatagaggacttggtggctgaagggcagtcatgcccaggggcttctcctgaccctgcagggctgagcggatgcagctttttgcctcttctcgctgcattctagcccgtcagtcagggcaacagccagatggtctgtgctaagattcatcccatccccacgggccctgtggctttctactgtgtccacctggtggcctgtgcagttcctggccagcgttctcctggggatgctgctgtctaatgggctgtgggagaaacagagacaggccctgcacatggggcagccagtccagtacccgccgggccaggccctcagcatcctctcctccagatgcccaagagagctgctccatgcgctgtggcgccctggacgggccatgttcctgccacccgacgtgctctggccttggcacctgctgcttggatttccgggacttctgcctggagatattgccctactcaggatccatgatgggcggcaaggactttgtggtgcggcacttcaagatgtccagccccacagacgccagtgtgatctgcaggttgggaggcccaggaggccgggcactggggccccacgcccccatccctgtgcatgctgagggctcagacccactgactggctgagtggagcccctcggacccaggacaggcaggagggcacagggacagctggctggttgggttccccagggaggttgggggcccagaccatcgagaggctcagcctgcaatgacccagcccctcccaccaccaccacgcccacaggtttaaggacagcatccagaccctcggccatgtggactcctccgggcaagtgcactgtgtgtcacctctgctctatgagagcggccgcatccccttcactgtgtcactggacaacggccactccttccctcgtgcgggcacctggctggctggtgagccctcctccctgcccacagcctgcccccacggggactttccccagcgctaatctatgcacaccgagacttggcctgtccgtgccctgcctctctggctgaaccagtcccttgggaggcctgcccgcctgcgagagttccttcagctcctttccactccctggcatccagaccgcggtcccagcccagagtgagtgggagctgcaggggtccctagagaggtgggccagtgcctatccactgagctccgccatgccagggcaggggagaagccaggtcgaggctagaggcgtgggcagtggagggagggcaggcccctgcctctgcggcctcagcgtccttttctgctgtgcgggccagagagaccatcacccagctgctgccatgcattggccctggaggctcccacagcccttgaagcctcagggcctcctccctgcttccctgggcccaggccctcactcacccctcacctcccctgcccagtgcaccccaacaaagtgtcaatgatggagaagagcgagttggtgaacgagacgcgttggcaatactacggcaccgccaacacctcaggcaacctcagcctgacctggcatgtcaagtcgctgcccacgcagaccatcaccatcgaactgtggggctacgaggagacaggtgaggccagctgagggctggggtggcatcagagctttgggcccccagagggggagaaagggggtcccagctgtgtgggaggaggaagggagtttccaggtggggttgaggagggaagggaattccaggcagagattgaggattcggatggagggaagtgcaggtcaggggggtcaggcaggtgggagggggcagctcatggggcctggctccaggggaggaggctcatgaggaacccctgcacggctggcatggccctgggcccagcttccagcagggacagggatcctggagtgtggcaggaggtgatggtcacccaagccggg

SEQ ID NO: 98202 - DNA, 15583 bp, Homo sapiens
ttaacactcgcaagtacaagggactttttttttttttttggcaaagtacaggggacttcattaatggtacatgacaaggtgggtctccgtaggccccaccctattcaggggtctgacatggaaactgtgtcgaggggagatgctcagtgtggtgggggctgagcgcagcagggttccccagcagctgagggcccccctcttcctcttgtgctctcactgggattggtggcctggggctcttactccttggaggccatgtggaccatgaggttcaccaccctgtcataccaggaaatgagcttgacaaagtcattgttgagggcaatgccagccccagcattgaagatggaagaatgggtgtcactgtcaaagtcagaggagacgaccttgtgctcagtacagcccaggatgcccttgaggatctccctcaatgcctgcttcaccatcctcttgatgtcactgtatttggcaggtttctccagatggcaggtcaggtccatgaccaacatgttggtggtggggacgtggaaggccacgccagtgagcttcccattcagctcggggatgactttgcccacaggcttggcaggaatgatgttctagagagccctgcagccatcacactacaatttcccagaggtaccatcagtagtcttctaggtggcactgaaggcatgaactgtggtcatgagtccttccatggtgccaaagttgtcatggatgaccttggccaggggggttaagcaactggtggtgcaggaggcattgctgataatcttgaggctgtttccatacttctcatgattcacacccatcacaaacatgggggcatcagaaggggcagagatggtgactcttttggctcccccatctaagtaagtcccagccttctccatggtagtgaagacactggtgggctctataacataatcagcaccagcatcacctcctttgattttggtgggatctcattcctggaagatggtgatgggatttccactggtgacaagcttcgcgttttcagcctgatggtgctgtggaacttgccatgggtggaatcatactcgaacatgtagaccatttagctgaggtcaatgaaggggtcattgatggcaacaatatccattgtgctagagttaaaagcagccctggtaaccaggcatccaatatgtccaaatctgtttactccagccttcgcttttcccttggtgcctcagggacgcaattggtgctgcatgagaagatgcagctgtcagtcgaacaggaggagcagagagcctgccattgcttcagactcaataactggggcaggtctcagtgttatagcttgggatgggaaatacagcttctgcttttggagaaaatacttcacccatgaggaccaggaccagctaataaggactgggagaaataaagggactatgtgtgggagtggatcttttttttttttgagagagggtcttgctttgtcacctatgctgaagtgccattgtgcaaacacttctctctacagcctcaatctcctgggctcaagcaatcctcctgcctcagactcccaagtagctgggactatagtcgcatgtcaccatgcctggctaatttttaattttttgtagagaaggcctcgctgtgttgcccaggctggtcttgaactcctgggctcaagcgattctctcacctctacctcccacagtgctgggttacaggtgagagccaccccatctggccagaagtggatcttgagggtgctagatgatgcaaatataaggttgaaaggagagagttttggccaggcgtggtggcttatgcttataatcccagcacctcgagaggccgaggcagtaggataccttgagctcaggagttcaagaccagcttgggcaacatagcaacaccttgtctctacaaaaaattttaaaaaccaaaattagttgggcgttgtggcttgtgcctatagtaccagctactcaggaggctgaggtaggaggatcacttgaaccggggagtcagaagttgcagtgagctgaaatctcaccactgcaccccagcctgggtgacagagtgagcccctgtctcaaataaaatgagtaggccaggtgtggtggctcacgcctgtaatcccagtattttgggaggctgaggctggtggatcactggaggccaggagtttaagaccagcctgggcaacatagtgagactccatctctgctaaaattagccgggcatggtggcacatgcttgtaatcccagctactctggaggctgaagccagagaatcacttgaaccaggaggcagaggtttcagtgggctgagatcataccactgcactccagcctgggcgacagagcaagactctgtctcaaatgaaaaaatacatacataaattaattaattaaaaaagaaaggagatagtttattgacaggggagaactctcctgcaacacaggatgtagctggagccagtcctaacatgcttctgggatagctccatgaaatggtttacaataataaggtggggatgctgggatggccattgcagagttttgggattttttgtgcatagtaaaatacacataaaatttgcctcttcactttatatattgtggtaggatatacgtaacataaaatttaccattttaaccacttttaagtgtccaatttagtggcattaagtacgttcacaatgttgtgcagccattatcactgtccatttctagaacttttttttttttaagatggattttcgctattgttgcccaggctggagggtaatggcacaatctcagctcactgcaaccctcacctcccgggttcaagcaattctcctgcctcagcctcctgagtagctgggactacaggcacatgccaccatgcccggctaatttttgtatgcttagtagaggcagggtttcaccatgccagccaggctggtttcaagctcctgacctcaggtgatccgcctgccttggcctcccaaagtgctgggattagaggcaagagtcaccacacctggccagctacacacttttaaacaacaagatctcatgagcactcactcattatcacaaaaacaggaagggggaaatctgttcccatggtccaatcacctcccaccaaacatgcttcctcacttccttaaggacttttctggaagtgcttctcagtgaggccttcctctactgcaaaaagcttcccctgccacaaagagcttctttttttttgagacagagtctcgttctgtcacccaggctggagtgcagtggcgtgatctcagctcactgcaatctccacctcctgggttcaagcgattctcatgcttcagcctcccaagtagctgggattacaggtgcttgccaccacacctggctaatttttgtacatttagtagacacagggtttcaccatgttggccaggctggtctcaaactcctgacctcagtcaatccacccgcctcagcctcccaaaatgttgggattacaggcgtgagccactgtgcccggccaagactgatcctttcaaaacatgtctgatcatgtcttttctcagctgaaaaccccctggtgactcccatttcccctaaaggcaaagccaaagtgcttatactggctggcaaggcctggcagaatctgcccttcctgctccttcctctctgatgacagctcctgctaatctctactatagccacagtgctctccagagtcacactgcacactcctgccacagggcctctgcactgacaatttccatggcagggaatgctggtcctccagaatatttcttcttcttttttttttttttgagacggcgtctcactctgtcacccaggctggagtgcaatggcatgatctcggctcactgcaatttccacctcccgggttcaagcgattctcctgcctcagcctcccaagtagctgggactacaggcgcccgccaccacgcccagctaatttttatatttttaatagagagggggtttcaccttgttggccaggattgtctcgatctcttgacatcatgatccgcctgcctcggcctcccaaagtgctgggatttcaggcgtgagccactgcgcccggccactccagaatatttctaagcatgcttcctcacttccttcaggacttttctcagagaggccttccttgatgatcaatcctctataaaatggtaacctccacctctcttggtattcctgggccctctcaccctgctttaagttttttacagcaattgccaatatcataagttatctttatgtggagtatatattttttcttttttttttttttttttttgagacgtagtctcgctctgtcacccaggctggagtgcagtggcgtggtctcggctcactgcaagctccgcctcccgggttcacgccattctcctgcctcagcctcccgagtagctgggactacaggcacccgccaccacgcccggttaattttttgtattttttaatagagatggggtttcaccatgttagccaggatggtctcgatctcctgacctcgtgatctgccagcctcggcctcccaaagtgctggtattacaggtgtgagccactgcgcccggccatattttttcttttttctgagacagggtctttctgtgtcgcccaggctggagtgcagtggcccaatctcagctcacttcaatctctgcctcctg[450 bp omitted]aattgccaataccatgaattgtcttttgaggggttttctgtctccccccaacttgaatgcaatcttcatgaggacagggactttatcccccaccccacccccccttttttttcttttttttttactgcaaaacctagaacagtgcttggcaggtagtaagtactcaatgaatgtttgttggatgaacccaataagtaaacaagatagaggacacatgtagggatctgcccgtgaacctcgacccctggctcctgagtctggcagtgggtgcagtggcagctcctgtctgtgagggccccagaggctggcagcaggatgcctccgtggaaaattcccttaacgcctttgcctctgcagctgttcctccgggatgatctctttgggggatcatgctcagatatttgtctcaaagaatcccaggccaaacctcagggacctcagagcgtttagaaaaataacacctctgtgagcttggtccaggcagatcccatgcagagaggagtttgtccccttccagtccccgaggtcctggctattgccagcatggagtgacctgtgtcacctctgagtgccaggcaagggttcagcagctgacgactcagcttctgcaggatgctggcagcatagccagcgagatagttggaagccgtcagggcacagggaaggggccgagggtgccctgagtgtgcatggggggcagccctgctgcagtccaagcctttgattcccaagctatgtgcacagtttcctctggactctgccatgtggcccagccacccatacctggaataggggctaagccaagctgctctctcctccaaagggaggcagcctgtgtgctttgtccgtttgcctttgcagagacctcgatcctcacgcaaggcaagcagcagcccctgtaagcacacgagacaatcccaagtgtcagtgggaaggagatccctttcctgatggggctgcctgtgtccagtccctcccagcttccccagggccctggggctctgcaggcattcagaagtggaagccagccacagcctgggactgaagaggttaatgtgcatctgcctccgaatgttaatgtgtctaggtgatgtcagtgggagccatgaagaagggagtggggagggcagttgggcttggaggcggcagcggctgccaggctacggaggaagacccccttcccractgcggggcttgcgctccgggacaaggtggcaggcgctggaggctgccgcagcctgcgtgggtggaggggagctcagctcggttgtgggagcaggcgaccggcactggctggatggacctggaagcctcgctgctgcccactggtcccaaygccagcaacacctctgatggccccgataacctcacttcggcaggtgagttgactgggagccctccctcctctgggctgtgggtggaaaatgggaaggtttcacccctgagccaaactgcttgggaaactttatcacagttcttggggacaagatctgtggtctgctttgctctgaggggcaggagaaaagggggcaatggtccgcaggggcagacgggcaggagcagagcagggggcgaaggcatattcagaatggcaaggaaggggggccagccgtgagacagcaggggaaggctcgctgctgggttccaaagatgcttggcagaaaaaattccaggctggaaaagcaagcgagagaagctggagggtggtatgtgggagacagctgggggctcactcctgcactgttagcctcagctttttactcccacttggatgatgaggtctgagacatccttactgccacctgggagaggccctgggaagggaagacttcacagagccatgaggggattaacttttctggtgaattaagcttcctgacatttccagagctgcggtgccctgggattccagctttgaaggagaaaggaaggaaggaaaagaggaaaggcttatgtagataatttttccaggctgctgagctccaacagacagtttctgtctctgcttcactcaagaagcccaggctcagaagataccaatcaaggaaatccccgctaggaagcctggggtagggagagctgctggcttgaccagggcacagccggcaaaagcctctacaagacagtcacccacagatatgcccaagaatcagtacacagtttccaaccagagatctccaaaatgaaacactcagggctacacataggaaaagcacgcacacacacacacacacacatacacagacacttacttttgtgtccttctggctatgctgacgagttttcctggtgaagcccggggctcacagagtaatctctgcagacaactgtggttcttgcctctggtgcctgcaggaggcaggcatgttgtgtccttccaagacagatggctcagggcactctggtaggattcaccaggaaactcatggagaagggaaaagggacaagattagcaacagtgaagggagggagaatggtgggagaggattccagatgaacggtgggtcgctggaggctgagcatgccagcaggatgtcagttctcagagcaaagcccatgtcaaacagccaacgcttgctccttctgtccccaggatcacctcctcgcacggggagcatctcctacatcaacatcatcatgccttcggtgttcggcaccatctgcctcctgggcatcatcgggaactccacggtcatcttcgcggtcgtgaagaagtccaagctgcactggtgcaacaacgtccccgacatcttcatcatcaacctctcggtagtagatctcctctttctcctgggcatgcccttcatgatccaccagctcatgggcaatggggtgtggcactttggggagaccatgtgcaccctcatcacggccatggatgccaatagtcagttcaccagcacctacatcctgaccgccatggccattgaccgctacctggccactgtccaccccatctcttccacgaagttccggaagccctctgtggccaccctggtgatctgcctcctgtgggccctctccttcatcagcatcacccctgtgtggctgtatgccagactcatccccttcccaggaggtgcagtgggctgcggcatacgcctgcccaacccagacactgacctctactggttcaccctgtaccagtttttcctggcctttgccctgccttttgtggtcatcacagccgcatacgtgaggatcctgcagcgcatgacgtcctcagtggcccccgcctcccagcgcagcatccggctgcggacaaagagggtgacccgcacagccatcgccatctgtctggtcttctttgtgtgctgggcaccctactatgtgctacagctgacccagttgtccatcagccgcccgaccctcacytttgtctacttatacaatgcggccatcagcttgggctatgccaacagctgcctcaacccctttgtgtacatcgtgctctgtgagacgttccgcaaacgcttggtcctgtcggtgaagcctgcagcccaggggcagcttcgcgctgtcagcaacgctcagacggctgacgaggagaggacagaaagcaaaggcacctgatacttcccctgccaccctgcacacctccaagtcagggcaccacaacaygccaccgggagagatgctgagaaaaacccaagaccgctcgggaaatgcaggaaggccgggttgtgaggggttgttgcaatgaaataaatacattccatggggctcacacgttgctggggaggcctggagtcaggtttggggttttcagatatcagaaatccccttgggggagcaggatgagacctttggatagaacagaagctgagcaagagaacatgttggtttggataaccggttgcactatatctgtgagctctcaaatgtcttcttcccaaggcaagaggtggaagggtactgactgggtttgtttaaagtcaggcagggctggagtgagcagccagggccatgttgcacaaggcctgagagacgggaaagggcccgatcgctctttcccgcctctcactggtgcgatggaaggtggcctttctcccaagctggtggataatgaaaaataaagcatcccatctctcggcgttccagcatcctgtcaatytcccttttgctctagaggatgcatgtttatttgaggggatgtggcactgagcccacaggagtaaaagcccagtttgctaggaggtctgcttactgaaaacaaggagacctggggtgggtgtggttgggggtcttaaaactaataaaagctggggtcggggggcttttgcagctctggtgacattctctccayggggcacatttgctcagtcactaatccagcttgagtgtccgtgtgttctgcatgtgcaggggtcattctagtgcccggtgtgttggcatcatctttttgctctagcccttcctctccaaaataaaatcaaataaaggaaaatctccacccacatcactctggatgttcttgtggacttgggggtgggtgtgggctggggcggggaaggtgggcagcagaaaagagaaagaggggtcacttggttgtggaatttagatcttggttcatgctgcatttttaggaagcatgaagcagggatctgtttttctgaacccacagggaggattcagtggcataaatggaattactggggattcattagattttgcagttctgctgctgggcttgttcttgggactcagcttcctgtcttctgcacaaaatcccctgggctttgttgtcatcagtgatgagtcctcaggccccaagtcccaacccccactcccccgcctcaaccctcacccccgctgagtcaccagccgcagagccagctcttagggcagctgaagcctctctgctttctacagctgagatctggtgtgggcaccttgaacagaagattacagccggggccactgggaggcagccacgactgctgcttggctgctgcttcttggtgtcttcactgagaggggactgggagccgtcagtgcagtgctcagcagaccttactgagagagcgggagaaagctgcaagcatcctgaaagcaggggcagcagcacagcctgttcctcttcagagctgcagcagggagcctcttcagaaaacttctgggcagcttccttgggtcctggggactttttttttgagacagagtatcgctctgtcgcccaggctgaagtgcagtggtgtgatctctgctcactgcaagctccgcctcccgggttcacaccattctcctgcctcagcctcccgagtagctgggactgcaggcatccgccaccacgcccggctaatttttgtatttttagtaaagacggggtttcaccatgttagccaggatggtctcgatctcctaacctcatgatctgcctgcctcggcctcccaaggtgctgagactgcaggcgtaagccaccgtgcccggcttttttttttttttttttttttggacacagggccttgccctgttgcccaggctgtagtgcaggtgacatgatcacagctcactgcagcctcgacctcccagattcaagcaatcctcccacctcagcctcccaagtagctgggaccacaggcgcacaccatcatgcctggctaattttttatattttgtagagacaggatcttgccatgttgcccaggctggtctcaaactcctgggcccaaacaatcctcccaccttggcctcgtggaatgctgggattacaggcttgagccaccacatccggcccctggggagctctttatcacaatcattagtatttcctggcctgtgttcccctccacccagcacctggggagtaaagaagctgatggttattttccttactcactaacagtagggtctccagctgccacccgtaacttgaaatctattttagacgcacactcaataaaagaagattctggccaggcgcgacggctcacacctgtaatcccagcactttgggaggccgaggcaggtggatcacctgaggtcaggagttcgagaccagcctggccaacatggtgaaacctcatctgtactaaaaatacaaaaattagccaggcatggtggcacgtgcttgtagtcccagctacttgggaggctgagacaggagaaccacttgaacccaggaggcagaggttgcagtgagccgagattgcaccattgccctccagcctgggcaacaagagcgaaaactccatttaaaaaaaaagaaaaaaagaaagaaaaagaaaaaaggattcttagggaagccttgaggcaaatccaaaaagacccaattcctagccacaaacgtgataaaaggaggtcttcctgcatcgggtttgtctactggaaggcttccctgggtgtccatcagccccagcccctgcctgctcctcactccctctcaccttccagcactccaaggaggaatcccagagaggaaacaagtgagacggcctctcccagggaatgcacatcaccaagtcaacagctcacagtgggtgggtgggtaggcacacgcccagcgaaagccccagcagctcctggggaagggggcatcctgtccttcagctcttaaccccacactgaaacaactgaaatggaagcagagtgggtggagtcatgaaagtgggtgggtagcaatgtaaaccttccggaggggagaggcggaggggagagatgagttagggagaacaggtggtcgaggggagaagtggggcagggaggcttaaagggtgggggattacgatgggagctgccaccaccacatctctccccagcctgattccgcggtaaccgggacacacttgcgatgtggatgaggggaagcacaggcagaggtgagcgctgggttgctggcgaggcattttcctgacatcgctggtggggatggtggaccaagtgcagagctggggtctgaggcacgaggggaactttcttttcctcttccttaagcctggggatgtggccagaaccttggggagctgtggaggccactgtgagctgcagacagagtccaagaagcgggtgaagaccctgcggtccatctctttgctcctttccctcttcccacatttaacaattagtttctcccatgggggccccatcaagtcatctcctcaaacctggccagtgcttcatccactgctgccttatcttctccccagaaaatacttcttccccaactgtgaggattatgctccgaaactaccccccagcacccggtagactttcacagctgagagacattgacctcaaagtttaggttgcaagtgagtccacagaaccacttccgcacattgctgttcacaagagaagcaagaagagcaccaaacacggcaactggcattgggtttgtgtttgcttgttcctttctgaatcatcagttttcatttaattaattaacttatttttatttatctatttattttgagacaagatctggctctgttgcccaggctggagtacagcggtgtgatctcagctcactgcagcctcgacctcctggactcaagcaatcctcccccaacttcagccttccaagtagctgggactacaggtgcatgtcactatgc[135 bp omitted]acctggcctaatatacatatttatttatttatttatttatttatttttatttatttttgagacagagtctcgctctgatgcccaggctggagtgcagtggtgcaatctcagctcactgcaatctctgcctccagggttcaagcaattctcctgcctcagccttctgagtagctgggatcacaggcatgcgccactacgcctggctaatttttgtagttttggtagagacagggtttcacactgttgaccaggctggtcttgaactcctgacctcaggtgatctgcccaccttggccttccaaagtgtgggattacaggcaagagccaccacgcccggcctcttttttattgtggtaaaatacacctaacataaaatttactattttaacaatttcaagtgtacaattcagtggcatgaaatacattcacgttaatgcgcagctctcaccaccatctatctccagaacttttccatcttcccaaactgaaattccataccaattaaacaccaactggccattcctctgtccccataactcccagcaaccaccgggctactttctgtctctggatttgactgctctaggaacctcatataagtagaatcacacagaatttgttctttcgtgactggcttatttcacttggcataatgtcctcaaggttcatccacgttgtcatatgtgtcagaatcttcctccttttaaaggatgaatgaatattccattgtatgtgtataccacattttgtttatccattcatctgttgtttctaccttttggctattgtgaacctgactgcacaactatctgttggagtcagtgctttccattcttttcagcatatacccataagaattgccagatcaggccgggcacggtggctcaggcctgtaatcccagcactttgggaggccgaggcaggcagatcacgaggtcaggagatcgagaccatcctggctaacacggtgaaaccccgtctctactaaaaatacaaaaaattagccaggcatggtggcgggtgcctgtggttccagctactcgggatgctgaggcaggagaatggcgtgaacctgggaggtggagcttgcagtgagctgagattgtgccactgcaccccaacctgggcgacagagtgagactccatttcaaaaaaaaaaaaattagctaggcatggtggcgggtgcctgtagtcccagctacttgggaggctgaggcaggagaatcacttgaatctgggaggtggagtttgcagtgagctgagattgcaccattgcactccagcctgggcgacagagtgagacttcatctcaaaaacaaaacaaaacaaaacaaacaaaaaaaaagccagatcaggggccgggcacagtggtttatgcctgtaatcccagcactttgggaggccaaggcaggaggatcgcctaagctcaggagttcgagaccagcctggccaacatggtgaaacctcatctctactaaaaatacaaaaattagacaggcatggtggcacatgcctgtaatcccagcttgggaggctgaggcaggagaatcacttgaatctgggaggtggaggttgcagtaaacagagatcatgccactcatactagcctgggctgcagagtgagactctgtctcaaaaaaaaaaaaaaaaaaaaaaaaaaaaggaaaaaataattgtcatatcatatggtagttctattttcaattttttgagaaactgccatagtggctgtaccatgttacattcccatcaacaatgtgcaagtgttcccatttctccacatcctcatcaacacttactttctttttctttttaaaataaaagacattctaatgcgcctcaagtggtttcattgtgattttgattcgcatttccctaatgattagcaatgttgagcatctggtcatgtgcttcctgactatttgtatttcttctttggagaaatgtctattcaagtcttttgcccatttttaaaattgggttgttcttttgttattgttagcaactatattttactcaattcaaactagtaataactggttctgcatgacttgttactaagaaaaataaaaataaatgtcaaaaaattaagctccttctcctctgcagttcaataaattacttttttctttttctaaattgagcactgggatggagaaccacttgttcctcaaacctcttcttcctcccatacctatgatctgtaataagtcaaactgacccagtagctggagctgaggagatcagaaaaaagcaaggcagcaaaacagtgatggacaactgttcccagaccaaaccgagggtcgggctgcttattcttgcggcacaataacgagatgtggatgaactgggaaagaaggaagtttttatttctgtaaccagttttagggagaaggcctggaaaatattgtgagaccaactcttaaattacaaagctttccagagcttacgtacctcctaagctgtatgtctacgtgtaggtgtgcattcttctaaaaacatatatagtgatcaactcttttttttttttttttttctttttgagacagagtcttgctctgtcgcccaggctggagtgcagtggtgcgatctcggctcactgcaaactccgcctcctgggttcaagcaattctcctgcctcagcctcctgagtagctgggattacaggcgcccgccaccacacccagctaatttttttgtatttttagtagagacagggtttcaccatgttggtcaggctggtctcgaacccctgacctcttgatccaccc

SEQ ID NO: 98203 - DNA, 240013 bp, Homo sapiens
  misc_feature (1)...(240013): n = A,T,C or G
agagtaagaccctgtctccatatacacatgcaaaaagtatagtttaatagtagacgtagggagtcagaccgaggaaggccacaggctcacggtactgtttggcagtcaggtcaggtcatacctgagcactttacatagttacatttttgctgcaacaataggaatgtgttagcccacagcggacaactcaaatgatgcctcctgagcaggtaagtgcacccatgccccagctgctgtgagtgttggctgctaagggttcccagctgcacaaaatttcagagaattgccctcatttgaagggagtggccttggggaccttaacttccttagggcccacaaccactgacatagactaggggacaaaaagctgtccatgcctcaaggtgagtgactgtggtgttgtttctgcccagagctctcctatgtgcatcaggccaaggaaagatcaggctgagccttactcgagtctcttcccttctctgtcttgctcatcttcctcccttacaggtttttcctccctcactaagtcctgttcattggctctgtcttacaggctctgtttctaagggccctgacccaagacacctatgaaatcaaatagccagaaaagaactggatctaggttctcaaacagagctatcatccgtcatggcctttatgcgtatttcagctgtgattgtttggttttgtgttggctttattctccctgtggtcctcactgttaatgccaggtgtacagccagacagttcagcaaccctcctgtagagaaaactccatcccagtagttgttttttttaagatggagttttgcttttgtttcccaggctggagtgcaatggcatgatcttggctcactgcagcctctgcctcccaggttcaagcgattctcctgcctcagcctcccaggttcaagcgattctcctgccttagcctcccaagtagctgggattacaggcgcgagccacaacagccagctgtatttagtagagacggggttttaccatattggtcagactggtcttgaactcctgacctcaggtgatccccccgcctcccaaattgctgggattacaggcatgtgccactgctctcggccccatcccagtagttctaacaagatgccaggactcacgctaactggactgtcttgatcacatgtctttccctaaatcaatcactacaaatgatggcaggcaagggttggagtgctttcattggttaggactgggccatgtgatcccccccaccccccaaccccaaggtgagtagtgagtcatattcccaaggcagctacagggatagacagtggggcggagtggttctgttaccagcaaggcctcctgatctagacctcaagagagggttcttggatctcgtgcaagaaagaatttgaggcgaattcatagagttaagtgagagcaagtttattagagaagtaaggaaacaagaggccaggtgcagtggctcaggcccgtaatcccagcactttcggaggctgagtcggggtgcagatcacttgaggccaggagttctagaccagcctggccaatatggtgaaagcccctctctaccaaaaatacaaaaattagccaggtgtggtggcacgcacctgtagtctcagctactctggaggctgagggaggagaatcgcttgaacctgggaggcagaggttgcagtgaactgagattgtgccactgcactccagcctgggtgacagggcaagactctgtgtcaaaaaaaggaaaaaaaaaaaaagagatacaaaagaatggccactccataggcagagcagtggcatgggccactcagctgcttatacttattgtcacttctcgattatatgctaagcaagggatggattattcatgaattttctgggaaaggggtgggcaatccctggaactggaactgaggtttcctcccatttttagaccagagagggtaacctctggacatttccatggtatctgtaaactgtcacggcactggtgggagtgccttttagcatgctaatgcattataaatagtgtataatgagcagtgaggatgaccagaggtcacttttcttaccatcttggctttggtgggttttgtccggcttctttaccataacatattttattagcaaggtccttgtatcttgtgctgacctatctcatcctgtgacttagaatgcctaatctcctgggaatgcaactcagtaggtctcagccttattttacccagcccctatttaagatggagtcctggttcgaacgcctctgacagttccccagaggaaagtggagttctcttaccaaaagaaagagaatgtttacagggaaggacacaaataacacatgtcgccaatagatcctgaaggatgtccgcatgaagtcattaggacatgaagtcactgaggcctgatggcaagaaaaagggacttattccctactgttttgtggagatgggtcgagggtgtgggaaagagggtgaagtgggattagacatgtttggtgaagctttagaggataacattaggatctagggtcagagataatgttattccttttttttttcagagttacccaggctggagtggggtcagagattagagggaggcagaccacctataagaaatatataaaccctttttttttttttttttgagacggagtctcactctgtcgcccagcctggagtgcagtggcacgatctcggctcactgcaagctccacctccagggttcacgccattttcccacctcagcctcctgagtagctgggactacaggcgcccgctaccacacccggctaattttttgtatttatagtagagacggggtttcaccgtgttagccaggatggtctcaatctcctgacctcgtgatctgcccgccttggcctcccaaagtgctgggattacaggcgtgagccaccgcgcctggctttttttttctttgagacagagtctctcttactctgtcacccaggctggagtgcagtggtgggatctcggctcactgcaatctccgcctcccaggttcaagcaattctcctgcctcagcctcccgagtagctgggattacaggtgagcatcaccacgcccggttcatttttgtatttttagtagagacggggtttcaccatgttggccaggctggtcttgaactcctgacctcaagtgatcctctggtctcggccacccaaagtgctgggattacaggtgtgagccaccacatccagcctaaccctttatatatacacaaaatatatatgtgtctatatatagtatataaaacgtatacaatttaagttgtccagaaaaagtatagagatatttgtgagacggtgaggttgcctgcagtctctgccatgaatgggcagatctcttttcctgtgactaataaaatacacttgtgcctcctcattacctgggctttttaaggagggctgtgtctgggtgggtactatctggaatgccccaccttggtcatgttttggggaaatctgccccaccccaataattccagtgggggtactttctcctccgaggcgcacttctgcatcctcttttttttttttttttttaaatacggagtctcgctctgtcgcccaggctggtgtgcagtggcgccatctcggctcactgcaagctccgcctcccgggttcatgccattctcctgcctcagcctcccgagtagctgggacttgacaggcgcccgccaccacgcccagctaattttttctgtttttagtagagacggggtttcaccgtgttagccaggatggtcttgatctcctgacctcgtgatccgcccgcctcggcctcccaaagcgctgggattacaggcgtgagtcaccgcgcccggactgcatcctgtttttgttttttgttttgagatggagtctcactctgtcgcccaggctggagtgcagtggcgcgatctcagctcactgcaagctctgcctcccaggttccgccattctcctgcctcagcctcccgagtagctgggactacaggcgcccgccaccacgcccagctaattttttctgttttttagtagagacggggtttcaccgtgttggccaagatggtcttggtctcctgacctcgtgatccgcccgcctcgacctcccaaagtgctgggattataggcgtgagccaccgcacccggcctgcatcctgttttagtcacctgggataccggcctggcattgcagtcaccgcagtacgtgccttagcatcctccagtttggtgtaagcacccccagggtagtgactgtatctcatctagcttaccccctcagtgttcttactcaaaaaatatttatcgaataaataattttatcaggtattttgtgcaagaatttttgccttggggaaggtgtgtgtgactaagagcccacgaggatcccgtctaactccaagattctgcgaccggcattggaagctgatttatagtgagtaattgggaatacccaaggccactttgacttttgccgccattggatagagcagcaccctctcctaccctccctctgagttcacccatgggcagtcccagaagcctttgatggggaaaagggggtcatagtgagaatttaccttggaatgtaaagtgagccgccccttttcagtctttgcatcttcacgcgggtccgccccaaacctagaagaacgcccctgaccacttcttcttctatctactgttactccttcctctgactctggtgaccccatcccggaagccttccggaaagcgcttcccccttttccaccccatcgagttggggttatttctccttttctgggctctctcccattgctggggaggaaggcggatacgaagggcctgcatgaccgcagctgtcatcacagtgggcctggcttaccttgttgctctctcccctttcgcctttctcctttctccctgttgcagtcatggacttcactcataatacatatacatatacatatacatatacatatacacatacacatacacatacacatacacatacacatacacatacacatacacatacatatacatgtttttaaatcgggcagccacccgctccccgccctcagcccggaataggttcagagaggtgcccgggttcacttgcggagcgtgtggcctctgcgcctaacgcgcgccccttcactacacgaatgggtgcgggcaagggtataggattttagaattccaagagttgtcgggggtcatcccgtggaatcctcttttttgcagatgctcttcctggagccttccgatgcaagctcttgggctcacgcagcccttttcctcttctaagcccagagcgctttcgctgctgctgatctccacggcctcggcagatagggaggggcaggcaggtgtcagcgtcctccctttcaccgttggggaaactgactcagagaaacaaggcgacgggcctcggcggggcgggaccgtaacgggaattcaaggctccaggccagagcggaatttattgtgtctcgttttgggaagcgtgaatgtgaaatgatcgacttcggagccccaggcggagacccttcagtccccgacaagaatcgggatggggtctgggattaatgcagtaattactcgcgcctgggcattgaccccttggcaacttcgcaagatccggcagggtccaccgcccttcccttcacagggtgaccacagggctgcggcctctttaaggcccagagctccgcccccggctcgtcgccaaccccctcgccgcagctcagccagttccagactttcctcagagatgaggtcatctccccgttgcccattggctgcgccgtgccgtcagtcacaggaagtcaggccgccgttttcgccttcttcatgccgcttccttctccgcccgccctttagtccgccgatcacgaccccgatcaggcctctgattggctagcgccgccgtcacttctccagcggacagtcttcaggacgggaggcgggcgtggtgggcgggcccgcagcttccgtggctgagaggagccggcggcggcagtgtctgtggtggccgcggcggcgagagcgacggtcccatctttcccaccctcttggttgccgctggccacacgccctccgctggcggcgacttctcagctccgtgcgcccgggctggacagtgagcctcgagaggagacgcgggcggctagagccggagtggggcgagccgcggaacccggccgggagccgcgcgaggcggtgagtgagagtccgggttggggacccctcccccaccgcggcctcgccccgcctggagcatcctttttcccccccgaccctgctgcgcgcgtcctcggggggtcgggcgaggcggccctcgcgtcccctgccctcttcttgccggccttctgcccctgccctcggggccggagtcgcagagcggcggtcactgtgccggggctgggacccgggccgggccgggcgggcgggcgcggtcgtgcacctgtgcactgcctggcagggctgtgctgcgcggggcggggaggcacggaggtcctcgccctcgcttctcccgggatgtgttttgattgcagggacggggtgtcggccgctttctctggggtcttgtgcagaccttcaggatccaagtgcagtccttgggattcccaggcaaggaggctcagctggacttgttggtgccagtatagcaaacctgaatgctgccaggtgtacagggctctgcaaatctgaaacttgatggccaagaactttacctcctaagaaagcgtctgtcaggacgctgatgcagtccaccctccccgcttcgggtacctttgatactccatagtgcctagggctggaccttttgagtcgactcccaaacctgccacttgctagctgtgtaatcttgtgccttggtttcctcgtctgaaaaatgaggataatagcaccaatcgcatacggytgtttgttgtaagtgtcgaatgaaataattcacgtgaagcgtttgacacagtgcttggcccatagtaagggcccaagaaatgtttgcttttgggatgttgagaatgcctggtttgcctgtgtgcctttaagcactagcccagcttggcattgtcaagatttctctctgttgtctccctgttatgcagcataacgaaagggcagttgaatggttaacttgcttgccagcctctgtttggcatgaagtgtgtgtatatacaggaatgtggaatacatcacttaaatataataatggaattaccccatgcttcgtatgtttttacatagttttaaactcataagacgtctggaatgtccccgagttgcaagtttttgagatcttttcagggtcctttctacatcaagccgaagcctgtaacgttaagacttattgtcagtaagaagttagacctacatgttttacttcagaagacccccaaaactccaaatgtcacttacgcagttttactgttgaaaagcagtcatctcccgggggtgaggtggtacagccagctggcccacagccctatgactgcagggtggggaacctttggctggaagttattaaactaagttttgcttaatgtcgtttgcatttttcatagcgaaccaaagggctttatgttactgtttcttattgaaatgatttagaaagaagcaatccattactgcgttctttaaaaacacctgcaaagaaaaaaatatctgtagtttagctctagtgtttgtttcagtttttggccaataactattaagaagagcccgtttttaagaaggcttccaaaagtcacatccacttgaataagttatttagagtcaaatcaagagaggtggaagagtaatatgtatcccatcacccaaaagtatttattggagagtttccatgtccttagtactctgccagatgctattagggagtgattaaaaagagtatgaaatagaatctcagcctataaagggcaaaaccataaagtttgggtcacccgttagtaattacaagtactacttaagggatgacttcatttattcattcaacagactttttgttccatgtttgtaacgtgccaggtgtttttctaagggctggggctgtcaagataagtgagatatggtccctgctcatgaggagctcacagtctagtgggagaggcaaaaaatgacagatgattgtaacgcgctgaaatacactctaaatccagacttcactgggagagtcaagggagcttttcctgtggatgtatgggaaggcttcaaagaaaatggcatttgagctgaatgttaactcagatgaaggagaggaaattccaaagagaaataacagcttggaaagttttcctgataggcggggcacagtggcttacgcctgtaatcctagcacttcgggaggccaaggcaggaggatcacttgaggccaggagttcgagttgagacccgcttgggcaacataatgatagcttgtctccacaaaaaagttaaagaattagcagacgtggtggcttgcacctgtagtcccagctactcaggaggctgaggctggaggatcccttgagcccaggagtttgaggtggcagtaagctatgttcacactgccctccatcctgaatgtgcggtgagaccctgtctcaaaaaaaaaaaaaaatcctgataaatcttctgatataccagttataagccccaggaagggagaaggaaactaacattccttgatgcccactacataaaagctaggctttgattgtgttgctttaggatagggaaataggctgcaactagttaaataactcatttagggatacagaagttaacagaaccaggacttgaatctctgacttaaaagtatggtatacggttccttttaacatgcttttgtagaggtaaatatgaaagaggttagaaagttctacccatattatcattattatcattttactacatctattgcaagttactttctgtgaaatgtttcatatttgatttagtcactaaggcgatataataaataaagcttatctttataagctttatatatggcaatataataaataaaggctatctttatttatatattttatacttataaatttggtgatatttcctaaaaagtatggcctgtgggaacattcagtaaaaatggagtacattgatatatacagattccatatgaagcactttactaactttgttaaacaggtataaactttctttgagagtgcagcttaaatacttatttaagtgtatttaaaaaacgatttgtagatttacagccatttaatttacaaagggaaatttagaatttttaagttgtattaacaaagatcgttgtattatatttcgagaaaacactgtggcaagctcatatactactgtaagctccccaggggtgaggatatttgtttttcttcccagcttcaaaggcagttcttgggacatagcaggtgctcagtaaatatttcttgaatataagatgaacatgaacaaatatatatttactccgtgttcttgtgtgtgtatatatattcacataaatgctagggttgatagttgcaattgacaaacataagaaacatttctttactgagaaaaagctttggtcaggaggttatatttcaggtttttgaaagagaaaagagaaaacattgatgggttatggatgaagtggtataggcttggggagtagttttttataaatgaatacattttggaagaagggggacattgaacaaagagaatgacccactgacacaattcagcaaatatgggcgctgtttatgtctaaggctttaatagagttttgagaatcaaggaaatagtctccgctctcaaggaaattagagttttggagagcgggtgtgttaactgtcttcctgtgtaacagattacctcgaaagttagtgtttaagacaacatttcttatttttcacagtttctgtgagtcaggaatttggaatcagcttggctgagtgattcaaactcaggtctctcaaaaaattgcaataatggctgggcacggtggctcacacatgtattctcagcattttgggaggctgaggcaggtggatcccttgaggtcaggagatcgagaccagcctggccaacatggggaaaccccgtcgctactaaaaatacaaaaattaggtaggtttggtgatgcacgcctgtagtcccagctactcaggaggctaaggcatgagaatcacttgaacctgggaggcggaggttgcagtgagccaagattgcaccactgcactccagcctgggcggcagagtatctaaaaaaaaaaaattatctgggagtggcagcccatgcctgtaatcccagctactcaggaggctgaggcataagaattgcttgaaccagggaggtggaggttgcagtgagctgagatcgtgccactgcactccagcctgggtgacagagcaaaactgtctcaaaaaaaaaaaattgcagtaatatgtcagctgaggtagcagtcatctgaaggcttgactgaggctggtgaatcctttttcaaggtggctactcatattgctggcaggktggtgcaggctgttggtgggagatctcaattcctcttcatgtgggcctctccgcatgaatgccttcatggcatggcagccagcttgcctcagagcatgtaatacaaaagaccaagctgctgcattgacttttatgacctagcttcagaagtcacataccatcatttttccagtattctgttggccacacattgtgggaagggactacacaagaatgtaaatggcaggaggtgagggtcattgggggccatcttggaggctggccacgacagtgggtaaagtagaaaatgttgaaaagaaggtactgaagttctgaagtaggggagaggggaggactcagagtaggaaagattacctttggaggaatgaaggaatgggaaaratttaattcctttatcagatatttataaatatttattgtgtgtttactatgtacctttcacatggaggctaatatgtggaggtagacactaaattaggttcacatgaaatgttttaagtaatttaggccagtgttgacataaggaaaaatatttgaaatctatgtgtatggtgaaggtggagtcatttttttttatattgatgaaaacagtaacttagtgatagatgagcagttacacagcataagtagttaacataaatactagagtcatactgcatagatcggaatcctggctctacttgccggccgtgtgtatgaacttggactgtgtgactatgatactcttgctactttatattctctgtgactcactagctgtaaaatggggataaaaatggggcctgcttcatattgttgctgtgaggattaaataaaaatatataaagtccttggaacagctttacatgcatgtcattatcatggttattatgatcatcattggttttgggcagtagcgtagaactgactgggtgaattagtttggagtcagagagatgaatgaatatagactgatatgagtatgcagaaggaggcatttaaatgttaaccattgctgcttcaccatcaatttttctatgtcaagtacctacatctagataatttttattttacaaagtagagtgaaccagtggctttatttaggtgaattccacagttaaaataagacccaaggaggtgcacaagttgccattaagggtgtctcttaccatcttgtatctttgaatttactgggctctctgtctgtagaatgggtttagctggaagcagtacttaaaagagcatgtgcttcacaagagctagggcccataataaaaatacctagaatgagaacctgtgtggctgagtttgagggacaaggttaacctggagggaatttcaaaggtataggcctggtactgtggctcatgcctataatcccagycatgtgagaggctgagacaggaggattgcttgagcccakgagtttgaggctgcaatgagctgtgatcacaccactgtgctccagcctggttaacagatgagacactgtctcaagtaaataaataaattagaaagttaattataagaaacttctaaatctggagtatagaagtttaggaattcaaaggacggattttgtgaaactgcatcagtttagataaactctttagaggcagtagtgatcttcctaatgaagatgacttccattttactactttaggaagtagatttgttacgtcgaaaggaaaggaaatagaaatggattcagctttctccaagttgaagtctgaaatctctgattttgtacaacagaaaaacgattctgttgacttaaaaactgcccaggtgtttttttgtttgtttcttttgttttgtttttaaagagacagrgtctcactctgtcatccagctaccacacccaggcctgtaccttttatttttttatttttattttttgagagacagagtctcgttctcttgcctagggtagagcacagtggtgtgatcatggctcactgcaactgccgcctcccaggttcaagcgattctcctgcctcagcttcccaagtagctgggattacaggtatgtgccaccatgcccagctaatttttgtattttttagtagaggcagggtttcactatatgttggccaggctggtctcaaactcctgacctcaggtgatccgcctgccttggcctcccaaagcgctaggatgataagcatgagccaccgtgcttggccagtcctgtaccttttaaatgccctccagattaaccttgtccctcaaactcagccacacaggttctcattctaggtattagtgtgggccctagttccacctctaagctcttgtgaagcatatggtgggatcatagctcactgcaacctcaaaactccttgtcttaagtgatccttctgcctctgcctcctgagtagctaggacaacagcatgtaccaccatgcttggctaatttttttttttttttttttttttttgagatggaatcttgctctgtcacccaggctggagtgcagtggcgggatctcggctcactgcaagctccgcatcctgggttcaagcaattctcctgccttagcctcccgagtagctgggattataggcacccaccaccacgcccagctaattttttgtatatgtatatattttttttagtagggacggagtttcactatgttggccaggctgatctcgaactcctgacctcaggcgatccatccgcctcggcctcccaaagtattgggattacagcgtgagccactgtgcctggcctgcttgggtaatttttttttttttaattatgttttgagacggagtcttgctctgttgaccaggctggagtgcagtggttcgatcttggctcactgcaacctccgtctcccgggttcaagccattctcctgcctcagcctcccaggtagctgggactacaggcatgtgccaccatgcccggctaatttttttgtatttttggtagagacggggtttcaccatattggacaggctggtctcaaactcctgacttcaagtgatccgcccgcctcggcctcccaaagtgctgggattacacatgtgagccaccgcgcccagcctctgcttggctaatttaaaaaattttttttgtagagaagagaagagagtcttgctatattgcctagactagtctcaaattcctggccacagcaatcctcctgccttggcctcccgaagtgttgggattacaggtgtgagccaccgtgcctggccaaaattcttaaaaatactgaatccatatcacatgtatgaggagagaagataattacactctgtgtcactgcaggtgttaaagcagaaattgggtgacctgtcagggtgcattgggtggaactaattgctcaagttgccttcagttctgtggttcatgactcaagtccagttctctcattgtttagtgggaggaggcactgtgaaattaaatgatttgagttccacaacagtccaggggctgagcccaggccagttcctcacacagtatttaaggccggctcatatagcagtaatagaagatctgtagaatccttggaagaaagagcgttgtgaaaatgtctttttttttttttacttccacatttttacttctgtggtatgtttggttcatttgctccccactcattcttattgatatgcatttagaaatcattctctgtgtaaatgagagcttgtaatgagtaatttggctagttcattttgagatctggagtgtgtcctctgttactgaatttctagataggtaggctatttacaggtctttgtcctctaaaattatgagtggaaattatgggtgattctggtttttgaaaataattgttcttgtattaaaatttaaagcataatgggcataattcaaacaaagttctgaacttcataatatgacagagtaaaatatccagtgaggtaacatgtccatgtcaagttttagggcacagcagatctgggtactgacagttaccaggtatgtgactgtaggcttactccttaaccttcctgtgattcagcttcttcatctgtaaactagagttaataatccttacaacatgaggtcgttataaggattatgaaraaatgtaaagagggaagtaataggggcatctactttatagtagacattgtgctaccttattaatcctcatatgaactctgaaataagtggtagtrgcagcattttgcagatgagcaaagagaagcttctagaggaacttctagataacaggatttttgttgttgttttgcttttttgttttttttagacagagtcttgctttgtcttccagacatgagtgtagtggcagggtcatagctcactgtgtcctcaaactcctgtaacctcaaactgctgaagcagttctcctgcataactaggactataggcgtgtgccatcatgcccggctaaatttttttgtgcaggcggggtgtcacagtgttccccaggctgatcttgaactcttgccctcacgctttgacctcctaaactgttgagatgacaggcatgagccgctgtgcctggccaggatttgaatccagatctgtttttgaattaaataattctggcttcctaccatgatgtatatgaagttcctaactttgcctctagtaaatgtcttttcgtgttcagtgtcttttgcatagttagcgaaaatgtcagttatagtgagaactctttgtagtagtaatcaagatgttatagctcagaaaatattctgtgcggtattcattatatgtatctggttgccattcctgaggtggaaaactataayagtaacctcacatcttaagttgctcaattaatacttgccaaataagggccaggcattatggcttacacctgtaatcccagcactttgggaggacaaggtgggaggatcacttgagcccaggagttcaagaccagcctgggcaacatgacaagaccgtgtgtctacaagaagtaaaaaaagtagctcagcatggtgacatgcacttgtagtgcatgagcccgggagatcgaggctgcagtgagctgtgtttgtgccactgcactccagcctgggcaacagagtgagactgtctcagaracaaaaaaattaccaaataaaggcatactgtaatatccacatttttagaatttttttttttgtcagtgtttcagtatcttttaaattgtaaatggggtaagtgatccagggtctcttgattgtggttaatttgtacatattttctctaccacaaaatttacaggaacttggaaagttgtcctttcctaatattttagaatgcactgtgttgaattttggtgttagagtggtgttatcatggttgaaactttggctttagttagtgtgtgtgtgtgtgtgtgtgtgtgtgtgtgtgtttgagacagggtctcattctgatacacaggctggatcgcagtggcacgatcgtagctcactgtaaccttgaacccctggcctcaagcagttctcccgccttgaactctcaaagtgttgggactacaggcatgagccactatgcctggccctggctttgtgtttcgtatttagttatatgatggatatatttaaagtagtctttttgagtttgccatatatatgtgtatatattgtctttcctttaaaatgtagagcaagagaaatttagaaattaaaagtaagggttggctgggcgtggtggctcacgcctgtaattccagtactttgggaggattgcttgagcttagaggttcaagaccagcctagataacatggcaaaaccccgtctctacaaaaaatacaaaaaataaccgggcgcggcgctgtgcaccgataatcccagctactctggaaacttgaggcgtgggagagaattgcttgagcttgggaggtgaaggttgcagtgagctgtagttgcgccactgcactccagcctgggtgacagagccagacctcatctcaaaaaaaacgagtaaatcttaggacaggcatggtagcccatgcctgtaatcccagcactttgggaggccaaggtgggtggatcacctgaggtcagcagttcgagaccagtctgccaagatggcgaaaccccatctctactaaaaatacaaaaaaatcagccgggtgtggtggtgggggtctgtaattccagctacttgggaggctgaggcaagagaattgcttgaaccggggaggtggaggttgcagtgagttgagatcatgccactgcactccaccctgggggacagagtgagacactttcaaaaaaaaaagtaagggttattttcttttttgtccattgtttatgtgatcatcactttttatgagaagaaatcacttgaactaaagcttctatgcaagagcctttcactctttaaatttgcactccaggttcatgctctaaggttgtggcattgaagggaaagaggttgtgggtttttattctattttatttacttattctgtgttatttatttattttcatttatgagacggagtcttcttgctctgttgcccaggctggagtgtagtggcacaatcttggctcactgcaatctctgcctccggggttcaagcgattcttgtgcctcagactcccaagtagctgggaattacaagcgcctgccaccatgcccgactaatttttgtgtttttagtagagatagggtttcaccatattggccaggctggtctcaaactcctgacctcaagtgatctgcctgcctcagcctcccaaagttatggattacaggcgtgagccaccctgccaggccttatttatttatttatttatttatttatttatttatttatttagagagagggccttgctatgttgcctgggctggttgtgaacttctggcctcaagcagtctacctgccttggcttcccaaagtgttgggattacaggtttgagccaacacacccctcctatttttattttttttttagggacaggkgtctcactctgttgcctaggctgatcttgatctcctgggctcaagtgatcctcccatcttggcctcttaaaatgttgggattacaggcatgagccactgagccttttattctattttatagattcattgaactatttaacattatcttgttgatacttcctttccgttcagatgtttttttggggggttaggagtcctggaatgggaacagggaaccaagaacataatgtatcatatgctagtcatttgagataaatttaaagatttcttttacccagtagaagttcataggatgttatggttcatttgtgtgatatctgtcatgagtctttatataccctgagtcagtggattaatcattttcctagatcagacactctgtagcatgaatgaccctttttaaaaagttaatgttttgacctttacctgaaagctgattcttaaagtgtatctggcaggatcaatatatatggaaaccaggcatgacttatacaatttggacaagctaatcatgacattttattttcaacatgtctaatagcctgttggcttcccaaataacgctgagttaattatagtgtaaccttttattctatttggagagtgtcaagggattttttgaatgccttccaaaattcactttcatraggtgagcttagaaagcttagaaaacgctttctagagcagggattctcaaaactttaccttcatgatccaccctgcctcttctgggtacttatttggtttccctactgtttagagatagtagtgatggggttgaatgcacctgtttttaatcctggctctattgctcactagctcagtgatcttagacaacaagggaattaatcttttttaatctttttttttttttttttttgagttggagtctcgctctgttgcccaggctggagtgcagtggcgcgatctcggctccctgcaacctctgcctcctgggttcaggtgattctcctgcctcagcctcctgagaagccgggattacaggcgtgccccaccatgcacggctaatttttaaaaatttttagtagagacggagtttcactgtgttggccaggcttatcttgaattcctgacctcaagtaatctacccacctcggcctcccaaagtgctgggattacaggtgttagccactgtgcctggacaatctttttaaatttttaaattgaaataattttattttgacacaggatcttcctccatttctcaggctggagttcagtggtttgaacatggctcactacagcctttatgtcctgggctcaggtgatcttcctgcttcagcctcctgagtagctggtaccggaggcatgtgccaccacacctagctaataattttaaggttttttgtagagatggagtctctttgtgttgcccattgtggttcaagagatcctctcgcctcatcctctcaaaagtggtgggattacagacgtgaaccaccatgcttggtgaatctttttgaagctgtatgtacttataagatagttgtgagaggtaaattcagttacctgaatgtaaagcatttaacccaaaataggtatttaatacatgttaattttcatagtactcaaaaattatcctttgtagcactaaccacagttacaattaaatatgtaattttaaaatgtttttcttataagctttgtgatgccagggagcatatctgtcttttctctgccctattctcagcatccagaatagtgccaggcgtgaagtatagtagatgctcaataaatatttgtcaaatgaatgaacacccctttcctgattctgtcctcccttggcttaaaggacagtatcggggttgggggaggggggagggatagcattgggagatatacctaatgctagatgacgagttagtgggtgcagtgcaccagcatggcacatgtatacatatgtaactaacctgcacaatgtgcacatgtaccctaaaacttaagtataataataataaaaaaaaaagacagtatcctgaacattttggcctgctttgagaatcaatcaccgtgttacataactttggtctattaaagattggagctgggtaaaggggagggcaatgaatagaggaataacaatgaaagagaacagaatggtattcaaagtaaattataagaacatagtactctggactttctaactctctctaatctggtatccagtccccaattctaccaaaacagttttcattgtgatcacagctggcttacatgttgctgaacatgttgagtttcccttagtttagtaaaatgataactcttctagttactcaggaaagaatcttggagtcatcttctctttctcactttatagaatccagttcatcagcaaatactgttagctctgtcttcaagatatatccataatctgatcacttcttaatcatctccaccataatcaccctcttccaagccatctctattagtttagtttcctgtgactgctgtaagaaattactacatacttggtgccttacaacaacagatattcattctcttatagttctggaggtcatacatttgaatcagtcttactgagccaaattcaggatgtcagaagggctgtattccttccagaggctttaggggagagtctggtctttacctcttccaccttctggtggctactggctttccttggcttgtggcagcgtcacttcaatcttcaaggtcagcatctttaaatctctctgcacatctctttctcctgcactgtttttgtcatatctctgcctccctcttctcttgtaaggacatatgattggacttagagcccacctggataattctttttttttttgagatgggagtctcgctctgtcacccaggctggagtgtagtggcaccatctcggctcactgcaacctctgcctcccaggtttaagtgattctcctgcctcagcctcccgagtagctgggattacaggaggccaccatcatacctggctaatttttatactttttagtagaggcggggtttcaccatcttggccgggctggtcttgaactcctgacctcgtgatctacctgcctcagcctcccaaagtgctgggattacaggcgtgagccaccgcgcccggccccaaaattcttaatttaatcatgcctgcaaagactcctrgccctttttgctgtaaaaggtaacattcacagattcccggtattaggctatggatatcttttgggccatttttcagcctatcatagtctcttctctgctcgtctgttccacaggcaaaatacacccatctcattccaacatccccaaaagtctcaacccattgcaacatcaactcaagcccgagatctcttctgtcaccaactctgaagtttaaagtctcattatctaaatcatctgttatctgttcccaaaatacactggtcagacatgtatagtgtaacagttatagataattccggtttcagaagggagaaaatgcaaggaataaatgggttactggtactaagtaatttcaaaatccagcagggaaaatttttattatgtttcaaagcctgtgagtaattttcttttactcgagactctgccctctgagtctctggctctagcttctgctttcatagttatccttcctttttcttgaagagaagcatatatttgcaactgagtagagtttttgcccacggtgtttaaaaattgtgttaaaatttaccatcgtaaccatttttaagtgtactgtccagtggtgttaagtacattcatattgtgaaaccatcaccgccgttcatctccagaactctttttatcttgcaaaactgaagctctatacccattaaacaatgactccctgttctcctctccccagcccctgtgaaccaccattcccttttctgtctctatggttttgattactcttaagtacttcatacaagtggaaccatacaatatttgtcttttgtgactagcttatgtcacttagtataatgtcctcaagagtcatccatgttgtagcatgtatcagaattttctttctttttacggctgaaagagtaaagagtatttttattagcctgattgctgcatgtagaattttggtagtccaacatctttcagtcttcttcttcttttttttttttttttaaagacagagtctcgctctgtcacccaggctggagtgcagtgacacaatcatggctcaatgcagcctccatctcctggggctcaagcaattctcctgcctcagcctcctgagtagctggggctacaggcatgcaccaccagacttggctcattttttgtattttttgtagggatggtctcattttgttgcccaggctggtcttgaactcctgggctcaagctatcctcctgctttggcctctcaaagtgctgggattacagacgtgagctaccacatccagccaacagccttcctttatttcattctttatttgtcctttcagtccaagttgacagtgtttctgctgatataacattgttagaaaccttgtgggtctcctatgtatattttgggggttcttgtcattagacaagagggttctctatagagcttttctggataatcccatctccattcctaccttctgcttatggttggctgaaggaattcatgagtcacactcctgatcccttcagcatgactaagaggttgtcctgcaacatgcttgactttctctccacagcatgcttttcttaacagtgaatttcctaattttaacatattttgttggctgggtgcagtggctcatacctgtaatcccagcactttgggaagccaagccaggtggatcacctgaggtcaggagttcaaaaccaccctggccaatatggtgaaaccctgtctctactaaaaatacaaaaaaaaaaaaaaaaaaaaaagactgcatgttgtggctcacgcctgtaatcccagcactttgggaggttgagacgggtgtatcacctgaggtcgggagttcgagaccagcctgaccaacatagagaaaccccatctctactaaaaatacaaaattagccaggcgtggtaatgcatgcctgtaatcccagctactcgggaggctgagtaggagaatcacttgaacctaggaggtggaggttgtggtgagctgagatcgcaccattgcactccagcatggacaacaagagcaaaactctgtctcaaaaaaaaaaaaaaaaaattagctgggtgtggtggtatgcgtctgtagtcccagctactcaggaggctgaggtgggagaattgcttgaacctgggagacggaggctgcattgagccaagatcacgccactgcactccagcctgggagacagtgagactctgtctccaaaaataaataaatcttttgtgatccaggtaagctgagaatttcccaaatcatcaagtactgatttcttttttttttttttttttttgagacggagtttcgctctgttgcccaggctggagtgcagtggtgtgatctcggctcactgcaagctccacctcccaggtttgcaccattcttctgcctcagcctcctgaatagctgggactacaggctcctgccaccacgcccagctaatttttttgtacttttagtagagacggggtttcactgtgttagccaggatggtctcgatctcctgacctcgtgatccgcccgtctcggcctcccaaagtgctggggttacaggtgtgagccaccgcacccggccaatttctttttgtttaacatttctcctattaatttttcctcttatgttttactgcaaataacaagaagaaaccaggctgtaccttcagtatgttgcttgggaatctaaatttccaaattccttgcttaaaaattctgctttccatacaactgttggacacaatttagctaacctttctgctactgtaaaacgaggatcgtctttctgttagtttccaataacgtgttcctcatttccttctgagtgcttgtcaagagtacctttaacattcatatttttaccaacattctgtttataaaagtatatgtactctatacaacaacacagattttctctactttasttttcacttcctgtgagccaccacactcagcccttaaagcctttcagtggattgaatcaggcccatccagattatctaggacagcctcctttatttaaagccaagtgattatgaatgttagttacatctacaaaatactttcacagcaacacttcagattaatgtttggttgaataattggggactgtagcttagtcaagctgacacataaaactgaccatcacaccatcattattatttcttgcctggattattgatatatatatatatatttttaattattattatttttatttttatttttgagaaggagtcttgctgtgtcacccaggctggagtgcagtggcgcagtcttggctcactgaaacctctgcctcctgagttcgagattctcccaccccagccacctaaatagctgggattacaggcgtgagccaccacacccagctaatttttgtatttttagtagagactggtttcgctgtgttagccaggctggtcttgaattcctgacctcaagtgatctgcctgccttggcttcccaaagtgctggaattaaaggcgtgagccaccatgcccggcctgcaatatcttcttttgaagtgcattctctgcttctgcccttgatttcttattatctgttctccagttattaatagtagctaaagtctgtttcaagatctgccactcctccctttgcttactctgtggcaaccccattggtttccctgcttttcctgcatctgccaggtctttgtgcttgctgttccctctacccgaaatactctctcccttcgcatggtttacttcctcacttttttcagatgtttgctcagatgtctccttatcagagaggttaccatatataaaaaagtggccaggcctggtggctcatgcctgtaatcccagcactttgggaggccgaggcgagtgggtcacgaggtcaggagattgagaccaccctggctaacacggtgaaaccccatctctactaaaaaaaaaaaaaaaaaaaaatacaaaaaattagccaggcgtggtggcgggcacctgtagtcccagctactcgggaggctgaggcaggagaatggcgtgaacccaggaggtggagcttgcagtgagccgagattgtgccagtgtgctccagcctgggcaacagagcgagactccgtctcaaaaaaaaaaaacaaaaaacaaccttactcctcaatccctggcattccctactccccttatcctgcttcacttttctccagaagacttattaccacttgacattcatctgtttgttgtccgtctcttcccactagatgatcgtctgtacaagggcagggactttgtcaatttctgtatcctcaacaccaacagtacttggcatgtagtaggtgttaataagtactttttgaataaatgaatgaatgaatgaattgaattcttattttacctctcaagtggcatttgacatagttgattttttgtaggacattattctcctaatggctaggccattctttctttctttttttttcttttttttttttgagacagagtcttgctctgtcgcccaggctggagtgcagtggtgagatctcggctcactgcaagctccgcctcccgggttcatgccattctcctgcctcagcctcccgagtagctgggactacaggcgcccgccaccacgcctggctaattttttgtattttttagtagaaacggggtttcaccgtgttagccaggatggtctcgatctcctgaccttgtgatccaccggcctcggcctcccaaagtgctggcattacaggcgtgagccaccgcgcctggctaggccattctttctaccacacctgccattttttgtctcttttgctagctccttttcaatttggcctccgtttgtgagattttctcaagactcagccttaaatccttttgttttctctctctgtaggagacctcatccagtcccatagctttaaataacatttacatgacaatgattcccaaatgtgtatcttcatcattttgcctgtctgcctccctgcccgccctccctccctccctccctccctccctccctccctccttccctccttccctccttccctccttccttccttccttccttctctcgtctctctctttctttcgtcttgcttttcttttctggggtagaggctcactctgttatccaagctggagtgcagtgatgccagctcaggtcactgcaacctatgcccctggagctcaagcaatcctcccaccttggcctcccaagtagctggggttacaggtgtgcaccaccatgcccagataatttttgtatttttttgtagaatattttttgtttcaccatgttgcccaggctgggctcgaactgctgggtttaagtgatccgcctgcttcagccttccaaaagtgctgggattacagacgtgagccactgtgctcagctactccatcttttttgaatgttagtcactttctatctccattgggatggctcacagacatctcaaatttacattccaaagtgaactcttaatcctcatttcctactgctaaagttgctctggctccaacgttccccatttctgtaaatggcacttgtgtctaccttgttaacataagtcagaaacctgaaggggaatctttggcatctcccttttcctcctcacgtccattccattatccatttctgttgataatcactccataaatattacctcatttgtcaccttcttatctctgccactaaaactactctagctagtctaagccaccctatttccagttaaaccaattaaataaatgcttaattggttttcttccgtccrtcattctctctaactcccttcagtcaattctccacactgaagccagagttttaaaatgcatatctaatcataccatgctctttcctcttccctcaagccttttgctctctgtaggctccaagcaggtgccttaaatgaatggtattgggtatatcatgggttttaataaagagtggtaggaactgtggcaaattgaagagtacatgctctaaggtatccacttgttagttctagtatattgttggcatgaaggagtgtagactttgaattgctgatcttctgatttcttttcaaaaagaagccrgaagtctggaatttttaaattgtgaattttctttattttaaaatgttgatgaacaatttaaattttaaaaatgtgtatacttagggataaatctgataaaaataatgaaataataaacttaatgaaataattaaatgaaaatattggccgggtgcagtggctcacgcctgtaatcccagcactttgggaggccgaggcgggcagatcacttgaggttaggagttcaagaccagcctggcccacgtggcgaaaccccatctctactaaaaatacaacaattagctgggcatggtggtggccatctgtaattccagctactcgggaggctgaggcaggagaatcacttgaactgaggagacagaggttgcagtgagctgagattatgccattgtactccagcctgggtgacagaaccctgtctcaaaagagaaaaaaaaaaaaaagaaaagaaaatataggaccttttacactgaaaattataaaacattgccaagagaagttaaagaagacctaaataagtggagatataccatctgcatgatttgaaagacccaatattgttaagctgtccagtcttccccaaataatctaaagattgtgtcttccccaaaatctcagcaggactttttggggagaaattgactttctgaatctaaaattcacatggaaatacaagggacctataatagccaaaacaatttacaagaggaagaacaaacaaaattacttgatttcaaaacttgttataaagcaagagtaatcaagacaatgcagtatttaccagtcattggaacaccataaagagtccagaaatagatacatacatatatagtcaattgattttcagcaatagcgcaaacataattcagaaggggaaagtatagtctttttaacagctattgctggaacaagtggatatttgtatgtaaagaaatgaacctcaatcccagtctcatatgatacataaaaattaatttgaaatggtttgtagacctaaacatacaaactaaaagcataaaacttataggagaaatcatgggactaaatctttgagaccttgacataggcagatttttttttttctagcacgtgtaaggagcactcaccataaaagtaaaaattgataaattgcactttattaaaattaaagccttctgttctttagaagacaccataagaaactaaaaaggtaagccacagacttgggaggaaatatttacacatgctatatatatccagaatatgttttaaaaaactttaaaaatttaataatatgacaaatggcccaattaaaaaataagtagaagacttgaatggacatttcttagaagaaaatatttatgggccaggcgctgcagctcatgcctgtaatcccagcactttgggaggccgaggcaggcagatcacctgaggtcgagagtttgagaccagcctgaccaacatggagaaacctcgtctctactaaaaatacagaatcatttgggtgtggtggcttatgccagtaatcctagctacttgggaggctgaggcaggagaatcccttgaacccaggatgcgtaggttgcagtgagccgagatcgcgccattgcactccagtctggtaacgagagcgaaactccgtctcaaaagaaaaagaaaaaatatttatgaatgtccaaaacatgtaaaaagatactcaacataattgcaagggaaatataatatttttttttttttttggagacagggtctcactttgtcacccaggctagagtgctttggcgtgatcatagttaactgcaaccttgacctctgtggctcaagtgatcctctcaccttagcctcccaagtagctgggactacaggtgggtgctaccatgcctggctaacataaaatttttttatttttttttattttttatttatttatttatttatttatttttttgagacagagttctgctcttgttgcccaggctggagtacaatggtgtgatcccggcttactgcaacctctgccgcctagattctagtgattctcctgcctcagcctcccgagtagctgggattacaggcatgcgccaccatgcccggctaatttttttgtatttttagtagagacagggtttctccatgttggtcaggctggtctcaaactcccaacctcaggtgatccgcccgcctcggcctcccaaagtgctgggattacaggcatgagccaccacgcccggcttatttttttattttttgaaacagggtctccatcactcaggctggagtgcacacgatcccggctcactgcaacctttgcctcgtgtgttcaagcagttctcccacttcagcctccagagtagctgggaccataggtgtgcgccactacgcctggctattttttgggtattttttggtagagatggggtttcaccatgtcagccaggctggaaaaatttttttttttctagagacagggtctctctgtatttcccagggtggtcttgaattcctaggcccaagcaatccttctgtcttagtatcccaaagtgttgggattacaggcacgagccaccatacctggacagaaatacaaattaaaaccacagtgagacagcattttattcccattagaatggctaaagtttaaaaagatggacagttccaagaattggtgagaatgtagagcagtagttcaggcctgttgcttgtaggagtgtgacatggtacagccactttggaaagtttgtcagtttcttacaaggttagatatatacttattcaatttagcaatactactcttaggtgtttgttacccaagagaaatgaaaacatacagtcaacaaaaaaccatgtgaatgttcatagcagctttattcacaatagctggaaaaattggaaacaacccaaatgccatcaacaggtgaatggataaacaagttggataaataaacaatggattactacttagaaaaaagaaaggaatgaattatggatacatgcagcactgtgaatgaatctcaaaaacatgttgagtgaaagaaaacaaaagagaacttactatatgatttcatttataagaagttctacactaggcaaaactaacctgtagtcatagaaattagatcagtggtgattagatgcagtaagggtggaatattgactgcaaaggatatgaagagtgatgggaatgtccttgttattgttgtttttgggccagggtcttgctctgtcacctagggtggagtgcagtggcatgatcatggctcactgcaggctcgacctcctgtgctcaagtgatcctcccaccttaggctcctgagtagctgggcagccatgcaccactatacccagctaagttttaaacattgttttgtagagacagagccttactatgttgtccgggctggtatcaaactcctagcctcaagtgatcctcctgccttgggcttccaaaatgctaggattacaggtgtgagtcactgtgcctggcttatggaaatgtttttttttcttgattgagattgatgatttatgagagtatacacttatcaaaactcactgaaactgtacactcaaaatgtgtgctttttattgtatgcaaattatacttcaaagttgattaaaaagtactctccaggtcaatactctgtggactaaacaaaaaacgtttgcgtgccaaatttgattgaggtagccagttcttaacagctaatctacactgccacacatgtgtgtactgtaagagtgcctgacttgtaataggtcctcacatttctgttgaatgaatgagtggctgaataacgtaccttcttgcagccccattgcaggaagatagttcatccttcattctcttgccgtttcctaactgcagtcattttagagagttaattttttttggtttctcctggaagtggtctcttgagtatgcatgagatcattcattcattcaaatagttactgagtatctaccatatgtatttacattgcctaaataaagtacttgctcattgtgaggaattacacaaatgtcagttgattatatatgaaatttacatttgacttataaaagcaaatgctggataagctgttcttagaatctgtttcaactaccatttctttggtttttgcctttgtactctgctatctgtggaaaaataacataggcttaataacagactctgtacataactttttagatgagaagaagcaaaaacatttccacatattctggtatagctatagaaattgtttttgttttttttcttcctttccagttagagtctgagcaatgagtggactgacttaatttagttgctagaaccaaattgcttcttggtcttgtagttagtctatagctgtgtaccatcttcatgaaatctgattatgactaatgtagacttttataggtcatcaagcagaattagtctgtttttcttcaaacagaactttaaaaattactggttatcattctgtactgataattgtcatttctctaaccttggtcaagctgccctgaattcatggaacagctttcctgtcccatgctccaaactccttgctcattgttaaagttagcatgagtctaaactcctttgggaaacagctctctttgggcagggcgcagtggctcattcctgtcatctcagcagtttgggaggctgaggtgggaggattacttgaggctrggaattcgagaccagcctgggcaacacagtaagaccatgtctctacaaaaaatttaattaaaaaaaaaagctggatgtggtggtttgagtgcctttagttctagctacttggaaggctgaagcaggaggatcactcgaatccaggaagtcaaggctgcagtgagcaaagattgtgccactgcactccagcctgagtgacagagcaagacctctaaaaataaaaagtaaaaataggctgggcgcagtggctcacgcctgtaatcccagcactttgggagaccaaggtgggcagatcactttaggtcaggagttcgagaccagcctggccaacatgctgaaaccccttctctactaaaaatacaaaaaatcggccgggcgtggtggcacacgcgtgtaatcccagctacatgggaggctgaggccggaaaatcacttgagcccgggacatggaggttgcagtgagccgagatggcatcactgcctgccagcctggacaacagagcaagtctctatctcaaaaaaaaaaaaaaaaaaaaaaagtaaaagaaaacaactctctttggtgaacacaaatgaatcatccaatctcaaatttgttttcagactcacctcttcctttaatgcccttctattatttctctttttttttacttatttttccctccaagactttttttcccctatttatgtcatagtgtcactggggtagtagttgcgcctaattgatatattttctttcttatgtatctaatatatctatgccaagcaagtttaataaaaccaggaagattgatggtggattcctagtatgaagctgaataatatgtgtttagagtccataatggataaaaagtacaatacttgagatactgtggacctaggtcttttctcccccactttttcttggcacattcccctgaaaaggaagccaaggagattaagagctgcttctgtctgataatagctcagaaatttaagaggaggcagttcctacagcagcaatctgagtccagtaagagagcttaatgaactgcctttacctgtacagtagtcagtttgtctctgctgagacatcagaggaactgagagaaatttaacaggaatataagaatgaggaaaaaagaggctgggtatggtggcttatgcctgtaatctcagcattttgggaggccgaggctggtggatcatctcaggtcaggagtttgagaccagcctgcccaacatggtgaaaccttatctctactaaaaatataaaatattagctgggcatggtggcaggtacctgtagtcccagctacccgggaggctgaggcaggagaatcgtctgaacccaggaggtggaggttgcggtgagctgagatcacgccactgccctccaagcctgggcaacagggtgagactctgtctcaaaaaaaaaaaaaaaaaaaagagaaaaaaaagaaacagacatttggaattgcatgtatgtgtaatcttgatagtttaatttggaaagatctatttatcctctttactctgattagaactgtttgtacttacgctcaagctagaattaatatattaaagaggacatacgtttatctgcctttcagaatatattatttcaaatacctgttatctttgatgggtttacttttttttgaggtagagtcttgctctgactctgaggctggagtgcagtggcgcagtctcgactcaccacaacctccgctgcccgggttcaagcaattctcctgcctcagcctcccgagtagctggattacaggtgccctccaccatgcctggctaattgtttgtatttctagtagagacagggtttcaccatgttggctaggctgatcttgaactcctgacctcaagtgatccacccatctaggcctcccagagtgctgggattacagatgtgaaccaccgtgcccagcctaaaatcttggttagtcatttttcactatcaaaaatttaaagtgttttttttttttttttttttttgttaaagagacagggtctcactctgttgcccaggctggcagtgatgcagtcttagctcaccatagcctcaaactcctgggctcgagtgatcctcccgcctgagcttcctgaatagctgagattacaaattcaagccacaatatctgactaaatgtactttctggctaaatgtaattttttttttttttttttgagaaggagtcttgctctgtcacccaggctggagtgcagtggtgtgatctcagcacactgcaacctccacctcccaggttcaagtgattcccctgcctcagcctcctgagaagctgggactacaggtgtgcaccaccacaaccagctaattttttgtattttagtagaaatggggtttcaccatgttggccaggatggtctcgatctcctgacctcatgatccgcctgcctcggcctcccaaagtgctgggtttataggcatgagccaccatgcccaactaaatgtaattttatattcctaccaacaacgtaaagggttccagtttctccacatctttaccaaaacttgtttatttgataacagtcattctaatgggtgcgatgtggtaatcttacatttttagtattttcatatataagggataacatagtgctgcccctgtggttattatcacattactgtgttccccctgccaacaaaaaagtacctcatattgaagtacttttatttttattatgcagaagagcagggaccttgtccatcttcatcactagtatccctagggctcagacagtacctgacacattatacttgcttagcaagtatttgaatgaatgaatgaatggaaagtagggaggcatggtgtagtggttaagaccaaagactttggcatcaaacagacctgaggttgagtcctggtttcctcatttgtaaaatggatttgatagtgcctccctcataggattgtggtgggattaaatgaggtcacatctacagcacctggtgcactgtaattatcccataagtggcagctattatttaaaaaggtcacctggccaaaggggcatcagtagacttgaagtttaaaatttttcatctgtcactaatcagctacgtaatactgaacaaattgtctaacctctctgggtctgagttgtttcctctgtaaaattaggaccttaagttagatgacaggccgggcatggtggctcatgcctgtaatcccagaactgttgggagggctaggcaggtggatcacctgaggtcgggagtttgagaccagcctggccaacatggtgaaacaccgtcccgtccctactaaaaataaaaaagtagccgggtgtgtagtcccaactactcgggagtctgaggcaggagagtcgcttgaacccaggaggcggaggttgcagtgagcagagattgtgccactgcactccagcctgggcgacagagtgagattccgtctcaaagaaaaaaacaaaaagatgacccctgatggcctgtctatgattttcatttgatccttacagttgttactgtattaactgaaggaattattaccatgacaatctcaactttaattatattggagattgttaatcccaaagtctaaatctcagaagcatctaaacaatagaattgatgttaaagaatttttctgaagcaaaaatcattccatttcaaaagttaaacaattggaacagttgaagaatagtttgccctagtgtggagtgtttaataatgatgtaatgtgccaggctatgtatgattgcttagtgatcatagaaatggatgaatgcagattgtaatgcagattgcactgatggctaggtggttttgctgagttgtgttgtgctcagctgttgggaaggcttgctttaaggatacctttctgtccatgctatggtgctgattcgtggaggaaataaaataatccttaagagaagatttctgatttttgatatgtagcttgttgtgtacctgttgttcttttttttttttttttgagacggagtctcgctctgtcgcccaggctggagtgcagtggtgtgatctcagctcactgcaagctccgactctcaggctcacgccattctcctgcctcagcctcccgtgtagctgggactataggcgcccaccagcatgccctgctaattttttgtatttttagtagagatggggtttcaccgtgttagccaggatggtctcgatttcctgaccttgtgatctgcactcctcggcctcccagagtgctgggattacaagcgtgagccaccgcacccggccttgtgtacctgttgttcttagcaaacgtgacaccaggtatgcaaactcattctggctgggctttgagggcaaggaggttatggcttcacccagcacagttacttgtttttcatacaaataactttgagcagatagtggaagaaactaattttctattgtgtatctgttttctgttaggcactgttaggtgctttcatgtatgctatcttacttgattttatttgttaacaaaatagttatttttgtatgtatgtgttgctgagtgtaaccaccccaaatcacttacaagacactcctgagcttgataatgatttttgtacatgagtccctagagcctttgttaggaagtcactgctgctagccccagaaattatatgctgccttcaaagaggagctcctttggctttgttaggaacaaataacctgatagcttttgccaccaaactcccttatgtcttcagagcttctttctggtggtctgatgtctccaaagaggaatcctaagcactttttccctctgaaaagaattataattggtgattaggcctccagatgaagcatatacacatgcacacacacacaaacaaaaacttacctattattagttcattggtcatgtggaagaatttctataatttagatctttgtttaaacatttgtctaatggaaagcatatgggaccatggaagctacttaatagctatgtgaccttgagacagtgtaaactcctggggctctgtcctcatcagtaaagtggaaatatacttaatcttgttggggtgtggtcaagataaagtgaaatatatgtaaagctcatgagtatttaacagatgtaggcattgtttcctgttactccttccattctgtttttcaaatgactgagtaaaatctctttgagcataactaactttattaagtttctttattaagattatttggccacatgccccagagattgatggtgaaatttatttkcctttccttatcaattacaaacactactagaaatttattcttgttcagactttggaatgagaattttttttttttcagagagaattaaatgagtttgctttaggcagctttctgagagctggcagatttggataggagtattagaattgctttcatagtggagtccccacctggaacatagttggcaggaggaagaaaggttatataatcacattccttatcagattttccgtagagtttattgtctcctgaaacactcaaggaagtcccttactcctttcctttcaatcaagaagctgattgtggaataggagatgaataaatgaaaattaatctgactttagcaatttgagaatgaaaagaatgctaaccaccaggcatgtgggcctgttttagcttcccaggaacctcctcagagggcatgacatgttggttgtaagcattaaaacaaacaatcccaacccaaactgtagatgaagcctggactaagtaaggcaatttaaaagattttaggttggtaatggaatatagagatgattttccctggccaaaatcagttttgatgttttgattttactcatttaaaattcttcttggtaaaaaattattctcgatcaatccattctttccagagtaacaagaatgatcttcttaaaaacataaatggaatcacatcacttctctgctcaaaactcttacctgcggtggtttttccattgtgcttagaataatatccagatttcatcccatgacctacaaggtgcacacatactgtatctttgctgatctcaccacctcttctggcatcccactcccttcagtcggctgcactgtcatccgttggtcttcagtcctttcaactttccttatcactatatctaaaaagttggcactttctgcccacaaaagtcccttctttgctggttttataacttggagaagtttgaaattggttttctgcttgatggcttgcctacttacttgtttttgttttcctgtgctgttagattataaaccccatcagagcagagaccatgttttatcttttttgtctagtatgttagcatatggtgggtatctaatatttgttgaatgagtgatggtttgctaatttttcctttacagacaagtggttacttcataaagaaataggcatttgcttgctggtcttacaatctgtaagtgataaaggttaacatgggtcaaaaataaatgattcgtgttttggggtttaatttttcagaatttaacttagatggtaactcctctgggaagcttttcctgataggtcatagattagtctcttcttgtttggtttatggcaccacatacttgcctcattcattcaacgacaacaacagacagattgcatttatctgtttatcactgtatcatcagcacttaggttggtgcctaagtcagcacatggtgatcgtgctgaatagtatgttcagtgaggaataagcgttagaatttaggtatctcttttttttcctttttttgagatggagtcttgctctgtaacctggctggagtgcaatggcgcgatcttggctcactgcaacctccacctcccgagttcaagcgattctcctgcctcagcctcctgagtagctgggattacaggtgcatgccaccacgcccggctaatttttgtatttttagtagagacgaggtttcaccatgttggtcatgctggtctcaaactcctgaccttggaatctgcccacctcggtctcccaaagtgctgggattacaggcatgagccaccgcgcttggccagtatttaggtatgtcttaggtaactaacagttttagggccgggtacggtggctcacgcctgtaatgtcagcactttgggaggccgaggcgggcgggttacgaggtcaggagattgagaccatcctggctaagacagtgaaaccctgtctctaccaaaaatacaaaaaattagtcaggtgtggtggcgggcgcctgtagtcccagctactcaggaggctgaggcaggagaatggcgtgaacctgggaggcggagcttgcagtgagccgagatggtgccactgcactccagcctgggcgacagagcaagactctgtctcaaaaagaaaaaaaaaaaaaagaaactaacagcttttactcaggtagattatggagatcactggttccaagaatcactttgttctttatctgttttccaagttcaccagatcatgacattagtaaaatttattttgaaatctttattatggaacatttgaaacacatataaaaacaaggagaataatgcaatgaaccaccaccatgggcctgtcacccagtttcaacagtattcaggggctgggtgccgtggcttatgcctataatcccagcactatggaaggccaaggtgggaggatcacttgagcccaggagttcaaggaccagcctgggcaacctagtgagacctcatctctataaattaaaaaaaaaaaaagtaaaaaaaaaattttttttttcaacatgtgaccaatcttgtttaatattactccacacctcctccttcatattttaaaataaaattcagacattttgccatttcatctgtaagtaattcagaataatatagtcgatttaaacactagttaactcttggaaaaaccagaagcaaaaattccgtttgtctccttgaatctcagtgtagatgccggctggtgaatttccatgtgctaagccactcccaagacctgactcactatcaaaagcatatactctattgtaattgctgaaatagcagcagtttgttagaatatgttatggtagttaagtatgtttctattggatagagagaggttaccaataagaaaaaactcctatgtcagagataagtttttccatttggagatctgatactttttgatgttgtaaattacaggcctttaagatttgtctggaaaatgaaaatgaaatgtggtttgtggattaatagggtaaattcctgtagttctttatgggtgaattcctgagagtcataattagcagtaaaatgaagagctgaagtgtcagaagcctcggagctagaaagacttctctaagcctagggaggtagacagtttagagcttcggccagagggaaagtcacatggcattagtagtgattatagttagttttattctggaagttaaagttgtaacctagacctctgtaaatagcctagtgtgtacataaaattttctggaggaagggaaggcactattttttcagcaaatattttaaaggattaagtactgtcttgtaaaaattagagattggcactgagtgaatggttggactagaactgtgctttcttgtgatgccagttttttgtgaagaagaaatgaagggggacagaaatgatcataatcacctttaactattgttttttgagatggagtctcgctctgtcacccaggctggagtgcaatagtgtgatcttggctcgctgcaacctccacctcctgggttcaagtgaatgtcctgcctcagcctcctgagtaactgggattacaggcacatgccaccacgcctcgctaattttttttttttttttttttaagtggagatggggtttcaccatgttggccaggctggtcttgaactcttgacctcaggtgatccaactaccttggcctcccaaagttctgggattacaggggtgcctttaactattttttaaaccaaccacataggagagcaagaccttgattctaggaggctacaagtcctagccctgctgtgactgcagccttactttctctttatcctgaatcaccacgattcttctgtktgtaatattggcagatggtggatgtggtgatcccaagttcattcttggcaacttattttgaaaaatctgctgttttattcttcctgctatactcccatatcccttagttaactcctgtattgaagtacttagcacacatgacttgaatagggattttgtcataatcatttgtgtttccttagcatctagcacatggtcacttggaaaatatttgttgacacatgatgatcactttccaatgctgagatggtgtgattttgtgatttctccaatgaccttgacctagattgtgatactagtggtagtcttgtataggtccctctctgtgttgttcttcttcgtaggtgctttgttctcaggctctggaccattctcttgttttgggacattccagggaacaggagagaaaaatttgcatttaaaacaaaaggagtatgttacatcgatgttcctcattgccaggatcactggaatgttccagttgctatcaggatgaattcactgttggtaacagatgccagggactcattatatttttgttattcttcctcatttactgagatttgaccccctacctctgattgtgatgggaaagggatttcagtcttgatcttcaagctttatattatttatttaattttaatttttcattgtttttaaagagacaaagtcttgctctggtactcaggtggatcacagtggcacatccatggctcagtgtaaccatacccagctgatcttcaggctttaaaggttatggccagtcattcagaattaatcagtatcaaacgatgagtatttttttttgtcatctatgtgataactgctgaaattaacttattataaaactaggctagagtctaggctaaattaaatttgtgttttgtcagctactataagacagtaaaatggaagtattaaaaaacattatttcgaagttgggcatggtggctcatgcctgtaatcccagcactttaggaggtcaaggcaggaggatcgcttgaagctaggagtttgacaccagcctgggcaaaatagactctgtcactacaaaaataaaaaattagccaggcatggtggcacatgcctgtagtctggctcctctgaaggcggaggcagggaggagcacttgagccaaggagtttgaggttgcattgagctatagatgtgccactgtgatccagtctgcacaatagagcaagaccatgtctcaaaaaaacaaaaaaaagttcaaaaacttaaaaattgtaaagtgggttttgctttgcagtttcaaaaggaaagagctatatctacttctctggagctactatgtctgagtcttaataatggtcaaacaggagatgcttattatgggatgctggcagatgaagggaaaactgggaactttattatagagtttgaaactcttcttataagtggacagtttgagattgtagtttttttgttttgttttgttttgctttttttgagacggagtcttgctttgtcacccaggctggagtacagtggcacaatcttggctcactgcaacctccaccttccgggttcaagctattctgcctcagccatctgagtagctgggactacaggcgtgtgccaccacggccggctaatttttgtatctttagaagagacggggtttcactacgttggccaggctggtctcgaactcctgaccttgtgatccgcctgcctcggcctcccaaagttctgggattacaggcgtgagccaccaagcccagccaagattgtagttttttattttgtaaagtattgcatatgttatggtaccttaatgagcacatgagcatgttcggttgaattctgcatctgggttgaccagcaggctacataggccttctttattttctctctccctttttaatatatacaggtattgcttccattttcctcttgtcaccttaatcaaatataatctcagcctctcaaagtgctgagattacaagtgtgggccagcatgccctgccttaactgttctttaaaatctctatgcacatcacaccgataatcggaaaggaaagatttgtggtggatatgaaaggcagcagagtgtattgcttcttgtaggaggttatggatatgcctaggagcacagtggtttctcttgactcctttaagactcttggatcgctttagtcattaccagcactttgcatggattcgcatttctgcctcccttacttgtttcagggggcctagtttatttaatcttctctttgggtgcagaagaaagagcaaacagaggaatcaggcagagagagattaagatttttttcataggtgttcagtttgaggagatatgtaacaatatctgttgaggtggactgcttaaaaaccacaattccaaaaaatccccacagtttattcctttaactggaaattgttattttccctctgctttttttttttttgataagtcaaacctctaaattgattttcttttgtctttcttccttttcctttttcccctcttcattccatttttgttcctttcccttcacttctttttttttttttaaagacacagcgtgtctcactctgtcgctcaggctggagtgcagtggtgtaatcatagctcgctgcggcctcaacctcccggggtcaagcgatcctcctacctcagcctcctgagtagttgggactttaggcaaacaccaccatgcctgattaatttttgtattttttgtagcgatggggttttgccatattgcccagtctggtctcaaactcctgggttcaagcagtccgctcgcttctgcctctcccagagtgttggaattacaggtgtgagccactgtgcctggcaactttccttttatcctttgcattctcttcccctaaattaaaatggattagtggcattctttccaaagaagtgcttgtttgaaagaagacccagaattctatgaaattgctttttttctttgtgggaagtttattttttagaagataaggataatgtcatcttagattgtaaaaattattctcatcccctttggaatgtaaggaaatcttttaaaagctaaatttccactggagagtctatgtgcgtatgtattgagccaaaagtattgaaaataattgctatagttttctaatgcccaagttttttttgtttgtttgagacggagtttcgttcttgttgcccaggctgaagtgcaatggcccgatctcggctcactgcaacctccgcctcctgggttcaagcgattctcctgcctcagcctcctgagtagctgggattacaggcatgcaccactatgcccagctaatttttctatttttagtagagatggggtttctccatgttggccaggctagtctcgaactcccaacctcaggtgatcagcccgccccggccccccaaggttctgggattacaggtgtgagccaccacgcccaggtttttttttttttttttttagatggagtttccctcttgttgcccaggctggagtgcagtggcacaatcttgactcaccgcaacctccagcctctgcctcccgggttcaagcarttgtcctgcctcagcctcccaagtagctgggattataggcgtgcactgccacacctggctattttttttttttttttaaagtagcgacggaatttctccatgttggttaggctgaactcctgacctcaggtaattcgccctcctcagcttcccaaaatactggaattacaggtgtgagccactgtacctggcctctaatacccaagtttttaaggaacaatatttccaattttgggggggcacacacatctaatttttaaaatcttcccagttagggaatggatatttaaacttttctgttgtaatttcaaaaacagtgtgtttagtagtatgtagtagaataaatacattgtactagtaatcagattctggctcatttttcttttatcagatcactgaactcttgtgctgtagttccccaactgaaaatgaaaatactggatgtgttagtttctgaggttcttgttataaaagtgtagttattctaggttttattggcatttctctaatgctgataaaagattaagataattttgcttgtaatactattcatataaaaatagaattcatttcaatataaaatgagttagacttggattctaaaggggcttagtcagtgaatgactaaaacaacctttatataagatggtctcatgtagcaatcaatttcaagatccattctctaggaggctggggaggggcgggggagggaaacaaccaccaaaaaataacattgtctgacaactttgagctaaaatccaggatcttaatttgagattaatgtaagaaatctgtcaggtatttttaaaaagtaactcatcactatttaggagttgactttttctgttgtagctttcattgaaggactattgttttagtcattctctcctaaattccttttcctgagactaaaagattgagctcatacctttgcataacgatctggagagtattttaaacttggcatgttcaaacctggcagactcgattaatatgtggacaaactagcacattagaacattttttaagttccaagccataaatgttttaaatgaacatgggcatgtataaaattaatacttaagccttcaaatagcacagactttcaaaatgcctgttgccttgggtgactgattttcagtgaggctctcgcttaccctacacatttcttcctctgcgtgaagcagtgccaggcacagagtcaggagagggtttgctcctttggcgctctactaccctctgctttcggcagagaaaaggctgctgttttacttcttaaactcctaccatatggaaagcttctaaaaataaactttggatttgtattggacttctaaatttgtaaccttctttatccatgactaaagccaatgtaaatacctttagctactctacatacaaagctgtggcaccgttttagtaagaaagatcaccaaccataatatttaaattatcaactgaattagtttacctttcatttatgtcttagttggcatggataaggacctggttgtgttgtcaagcaaaaactagttggtggtttttagtgaatccactttaattttttgttcatgaattgttggtgtaattacgtagcagacgtattcgtgagaatgtagaagtacactagcttttgacacaacagattgtttaaatggatcgttattcactttgtaaattctggtcagttgggccttctatcagcaagtatataatgagcacctgttacttgccaggcactgctaggtcttgcgagatacaaagttgtataaaagatgattcttgttcagacaagtaagagagaaaggaagaagaaaacctggggacaaccaaatgttttaactgtgttaacagagaaatagatgctatgagagcatgagagcatggaggagagatgagtagagtaatagttggctttttttttttgagacagagtctcactctgttgcctaggctgctggagtgcagtggtgtgatctcggctcattgcaacctccacctcccaggttcaagtgattctcatgcctcagcctcccgagtagctgggattacaggtgtgtaccaccactccgagctatttttttgttgttgttgtttttgagatggagtctcgctctgttacccaggctagagtgcagcagtgtgatcttggctcactgcagcttctgcctctcgggttcaaggattcttgtgcgtcatcctccgagtacctgggactacaggtacgtgccaccacgcccagctaatttttgtattttgtatttagtacagacagggtttcaccatgttggccaggctgttcttgaactcctgacctcaagtgatccgcccgccttggcctcccaaagtgctgggattacaggcgtgagtcactgcgcccagcctaatttttgcatttttagtagagatggggccaggctggtcttgaactcctggcctcaagtgatcctcccaccctggcctcccgaagtgctggccttttcataggtgttcagtttgagggtatatgtaaccatatctgttgaggtggactgcttaaaaaccacaattcatttatttaattgggaattgtttctctcccctccttttttgataacagtcaaacctctaaatttattttcttttatctttctttcttcttccaactgagctacggcactcagcctcagttgtatcttaaataataaaaattatttacaacagaggctatttttttttgagtgccaggattaatgttacccgccagggaaaagagaacattctaggtagtaggagaaacagtagaactatcaaagacagtatgttctaggaggaagtttggtgtgggtaatggggaggaggagggacattagtggccagagagcaaaggcttgtgagactgggtgggatcagattatgaaaggcttcagggccagggagatgggagaattatgtgatcccaggaggttgaggctgcagtgagctgtgatcatgccactgcactctagcctgggcaacagagtgagaccttatctcaaaaaaaaaaaaaaaaaaaaaaaaagactttagatataccattgattctgtctctgttatgtctttgttctcttttccttgcctggaaagactttctccactctttgctgatctaacttatttttaaaggtccagctttagagcatctcttacgtaaagccttcctctcttttccccagagcttgctgattttttactgtgaatgattgcacaaagaggctgtattatgcctcataataaggacttccatttcttgaactgtttttgttttgtcttatctgtccagttagtttctcaactccttaagggaagagaatgaatcctcttcagcacctggtattagtgctcatcacattgtgaggactcaagaagtaaatgatgaatgtagaacacttatacatacaaaccattatgataacccacctacggtggtagagattgcctatgtttatttaaaaggcatttctcggccgggcgcggtggctcacacctgtaatcccagcactttgggaggctgaggcaggtggatcacgaggtcaggagatcgagaccatcctggccaacatggtgaaaccccgtctccactaaaatacaaaaaaaaatagcccgacgtaatggtgcacacctgtagtcccagcctacttgggagtctgaggcaggggaattgcttcaacctgggagtcggaggttgcagtgagctgagattgcgccattgcattccagcccggcgacagagcgagactccttgtccaaaaaaaaaaaaaaaaaaaaaggcatttatcaacaccaataagagcagttttcagaggtataggacaattgtcatttggatataaggatataaaatgagttaataaaaacacttgtctcatagagttgttgtgagaattagttttaatatttaagtacttgcaacagtatctagcatataggaagtgcccaatcagtgttacctattatttaactccacttacatgggccttttttttttttttttttttaaccagtgacagaactcttaacactgttgtgtgcatggagaggattgaaaggagataagaaacagcttcttacctttgaaaccaaacgccttttaggaatgggaagaactgtttatattgcatgaacttttatttttctgtttgtgttgtagtgatcggagggtatggttggcatggaattgaatttcatctgtctgtgggaattgtaagcaaggtaggtcccagatttatttactcttccctccctcctttcctaatgtggtcgttagtatcttcaattgtactgacctagaatagatcagatttgactattgtttggggaaacattatctttttcagtctcactcatcgtgcctcctgatggtctgtcctgtggtttaatgttgtggactacatctagtatctcattagaatgtagagaatgctaagaaacaacataaccaatgtaaaattttggtggtcctagaacagaaccatgaatttacacatgtacccacccacacatacccctacctctttaatccagtccttgagggcagaagtttttgtgttggagccattatgtaaaccaatttagggtggtgggtaatggtaggctagcttattctgatcactctaaaaatcagtagcctgtgtgaatggtagactaaatgcaacaaaggacctgactagacagtagccaggccattactggcaactgtaaattttgttactgatgacaggatctgtccatctgtaaccactagagtttgatttgacacaacatgctttgttcctatcttaagctcctgggcctgaacaaaagtacaccagatagagctttggcttatgtatctgtcttatgtcaggtgcctgcaaaaagagctatagatggcagttcacgcagctctgcaaaactatttctgtcagaatatttcctgtcaaggtaaaggctactgctagttcatgtagttctagttttctaccaccataagtatgttgagattcccgttgcttattggtacaggagacctggctcagttgcagagtaaacttgacagtcaaaacggaactccccaaccaggaatcctgtaaacttgtgtgtggggttctatgggttgatgtcagtctggactcttgctgcatctacacttagcacaggttcttgagactggctttctctcagtcacaaagaagagattagtacattgctacagggaaaaacagtgtagccacttcctatagcagaaggaacatggccttggaattgacgctgctgtctaggaaggaggaggagacggtagattaaagttaaacttctgtaaatgaatcctttgtcatcatctagtggtctgaattttctgggtgtgatctgtgtggtcagtaaattatcttttttctattgttctacttttatattggggtaataaactattccatggaaatactgtgtgataaaattaatggaaagtaaagaaaggtaccaacttttattgaattcctgctggagttaggcattgtactgtaaattttcatgtatgttcttttactgaaatatatcaagttcattgatattacagcttttcaagtctaggtgaataatattgtgactcagtgtcttgaactatttataatagccatttagaggaaatagaattttgtagtgttttatgttacttcatttgttttctggagaaggaaagaataattatatgagttaatttttttctttttttgggggcttgctactgattagccaaaggcagggtggagactggcgggtttgaaattagagacacctgtgctgttttgggaagttgaggctcttgacctaggatttgctgaagttggtgcaggagaggtcagtgtaggttaatattttcagagctcaaagcaagtgtggattggggttgtttataggtgcagttttgcttgatctctgtatctgcaaatggagtaaaaaagtayagtactgctgttttgggaaacttctgcaaaagtccctgagccaatgcaaattaattttcttcaaaaataccaagaaaattccccatttggctgtttcacctggttgagggaattgactcttgtcattatgcttgtaaagaaattaccaggctgggtgtggtagttcatgcctgtaattccagcactttgggcggctgaggtggatgaattgcttgaatccaggagtttgaaaccagcctgggcaacatggtgaaatcctgtctctacaaaaaacaccaaaaaaaattagccaggcatggtgacatgtgcctgtagtcccatttgctagagaggctgaggtgggaggattgcttgagcctgggaggtagaggctgtagtgaggtgtgattgcatcactgcattccagcctgggtgacagagtgagaccctgtctccaaaaaaaaaaaaagaaaaaaaaaatgtccacagatttttttttttttttaagttaagagacagggtcttgatttattacccaggctggagtgcagtgtggaacatttacagttcactgtagccttgacctcctgggttcgagtgatccttctgcctcagcctccggagtagctaggactgcaggtgtgtgccaccacgcctggctaattaaaaaaaataatttttttttttttttttttgtagagactgaggtctcactgtgttgtccgggttggtcttgaactcctggcctcaagtaattctcctaccccggcctcccaaagtgttgggatttacaggcatgagccaccatgcctggcccacacattcttttaaaacaattataaatttgattttctgtttttaaattttctcttgaaattcttctctcatgggagataccatctctatgtctttcagtcatgcagtaattgggggtcagaataaattgttcagctctttcctaggtgatatgcaattaaactgaagtcttccttctcctttggacttgtgcatatatctatgaaagaagaaaatctggttaagagcagcagaattacctggagatactatactgtcctttcaagggctgaaatggacacattaacatttcttaatctatgcatttttccatttttatttttctgtctattgaatgaattactgtacttttcctcttggccacttcctttttatggtttagtgagataaacttaatataatttttccttctttgttgamcaaatgttagttctttaaaaataactttgaggtataatttatatactacagaatttacctgtttgaagtgtacagtttatttttagtaattttgtggagatgtgcaaccattaccccactccagtattacatttccaataccccagaaagatcccttgtaaacaccatttttaaacttcctttgaagtaaggcgcacattttattaagttctgcatcggatttaatcttccactcatgaagttttccaccactctgcgtattgcacgtcttctttcctcctcttctttatatattagtttcttattactggtcaaacataccactcttttgttatttttattacattttctcaacactttttaaaaagtgtaaccttgaaaagaagggatttagcttttattcaaagttatttttttctttgaaagttgttatctttttttttttttttgagacggagtctcgctcttttgcccaggccggagtggaaagttgttattttataatgcctcaggcctctcagtaagagctcgttattatttctgggttttctgttcacttcatttgctatttatttatttatttatttattttgagacggagtctcgctctgtcgccaggctggagtgcagtggcgcgatctcagctcactgcagcctccacctcccaggttcaagcaattctcctgcctcagcctcctgagtagctgggactacaggcgcgtgccaccacgcccggctaattttttgtatttttttggtagagacggggtttcaccatgttggccaggatggtcttgatttcttgactttgtgatctgcctgccttggcctcctaaagtggtggggttacagctgtgagccaccgtgcccagctgctatttatttatttttaaagggaataatttattggttatttcttgtgtgtgtatacagactaggtattagctgatttggagaattctgctctgtgcataagtattcagatactcagtaaaagatgtgaatattgtcatacacttgagcttttccttttttttttttttttctttttttgagacagagtcttgttctgttacacaggctggagtgcaatggtgtgatcttggctcactgcagcctccgcctccgcctcctgggttcaagcaattctcgtgcctcagcctcctgagtaactgggattacaggtgtgtgccactatgcccgactaatttttgtatttttagtagagacggggtttcaccatgttggccaggctggtctcaaactcctaacctcgtgacccacccacctcgacctcccaaattgctgggattacaggtatgagccaccgcgcccggctacactggagctttttaaasgcttacctaccatgttggtttgtctcattaatgatgatgttaaatctcatcattggttgagttcctgtctgccagatttatccattgtaaactgtcttttccccttagtgatacataatctatacagccatactaattatttacttttgatatctcttgtacagaagtgccatgtagttgtcgtagtagcaatacatcttcttagagcaacaaactaacctggctaacagtgtttaaaaattgagtattatgtggaagacagtatgcaaaaaatgcaaaaaaatgaagttcagaattcatttaatttaagcttctttgtaatgtgaagtttttttttttttttttcgagacggagtctcgctctgtctcccaggctggagtgcagtggtacgatctcagctcactgcaacctccgcctcccgggttcaagcgattctcctgccccagcctcctgagtagctgggattacaggtgtgtgccaccatgcctggctaatttttgtatttagagatggggtttcaccatgttggtcaggctggtcttgaacttctgaccttgtgattcgcctgcctcggcctcccaaagtgctgggattaaaggtgtgagccaccgtgcccggccttgtaatatgaatttttaagtgcagagtttaaatacagttgcttaagagccttgggacgcaaatttagttttccttgggtcataaggaatttttgttgacaaccttttcacagttgtactttagtagacattattagcatgtagtagacattattaacatttttcatagttttcagacaagttctttcctgcttttaaaattccttcctccagtcttctcatgtatcccttggaacaatacagctcttactgaggggtctggagttatctgggtttgaaccctggctcagcagttacttaacctctctgtacttcactattctcctttgtaaaatagaatagtaatacctcatacgtttttatgaggattaaataggcatttggcacttttgttggtcacagatgttcagtaagcctgtatattattctcagtctgataacacttgtcacatagtaggcagtgattttttcctttataagctgtacatgtatacataaacatataaatgtagctcatagatgttgctcaaggaaataatcatagacattcctgctgtaattgtctctgtcacaatcttggggggagatttagattcacttttttaggatacttgtaggatccatatgttaaccatacaccccccaaccatgtctacatttgctgcatattactttgaatataagatttcggcactgcgtagtgctatgaaaaaaatggtaaatattatttctacctcagactatatgatctttttttttcccctgagacaaggtcttactctattgccccaggctggaatgcagtggcgcaatcatagctcatagcagctttgcactcctggactcaagcagtcatcctgcctcagcctcctcggtagctaggattgcaggcatgtgccactatgcctggctaatttttaaattttttgtagagatggagtctcgccatgtttcccagggtggtctcgaactcctgggctcgagcagtcctctgcctttggcttcccaaagcattgggattataggtgtgagccaatacatctggcccagactatatgatcttaatgtgtacgttggaaatggttaaattcaaggcactgttactatgttacatctctgacctgaattggaggccacagttcattaactggcaatctattgatctaagtacagttaccaactaaatttttcagtggttctcaatggggaaggtaccatatatccaaagggtatttggaaaagtatggaggcatttttggttgttaagtgactgtgggtgggagatgcatcactggcatttggtggagaaaactcagaattgttcacccaaaatgccaatagcgtcactgttgtgaaattaagctaaatactttggtaaatcagtagataatgttttatcttagttacaaaaaaaagttgaggctgggcgcggtggctcacacctgtaatcccagcactttggaaggccgaggcaggtggatcacaaggtcaggagttagagatcagcctgaccaacatggtgaaacctcatctatactaaaaatacaaaaattatctgggcgtggtggcgcgtgcctgtaatcctagctactcaggaggctgaggcgggagaatcgcttgaacctgggaggcggaggttgcagtgagccgagactgcgccactgcactccagcctgggcgacagagcgagactctgtctccaaaaaaaaaaaaaaaaaatgttggagtgtggccttctcaccttcccatggatgtgctgatccactgttatcagtgtactctgaaaaaggggagtcatctggcaaaaatgtcactttgtctcctgtattcaaggctcccattccaccagatattgtgaactttgttcacaccaacttgcacaaaaacaacagacagccctatcttgttagtgaattagcaggtcgtcagaccagtgctgaatcttggggtactggcagagttgggtctcaaattcccagagtttgaggtggtgggactcactcttttggccagggtgcttttggaaatatctgtcatggaggccacatgtttgcaccaaccaaaacctggcactgttggcactgtagagtgaacacaatccaaaaaacaatatgctatctgttctcccctggctgcctctgccttaccagtgctggtcatgtctacaggtcatcatattaaggaagttcctgaactttttttggtggtcagagataaagttgaaggctacaagacaatcaaggaggctgttttgccacttaagcctggagtgatacaaaaaagggctatgcctctcagcaaatgagagctggcaagggcaaaatgagaaaccatcgtatccagcgcaagggaccctgcatcgtctctaatgaagatgattgtattgtcaaagccttccgaaacattcctagaattattctgcttaatgtaagcaaactgaacattttgaaacttgctcctgatgggcatgtgggacatttctgcatttggactgaaagtgctttctagaagttagacaattgtgtggcacttggtgtaaagctgtttcctcaagagtaactgcaatctttgcatgcacaagatgatcaatacagaccttagcagaatcttgaaaagcccagacatccaaagcccttcaagcacgttgcaggaagattcatcgtagagtcctggggacaaacctcctggaaaacctgaaaatcatgttgaagctaaacccatatgcaaagaccatgctctgcaacaccaggctttgccaggccagcaaccacaaactccaggtggataaggcagcggcggcggtggcagcagcagcagcagcaccagcaccagcaccagcagcaccagcagcaccagcagcactagaggccaaatcagatgagaaagggggttgcagtcaagaagcctgtggtagggaagaaaggaaagaaggttgttgtttttaagcaggagaaacctctggtgggaaaaagggcagcagctaccaaccaagacatcagtagctgaaaaaaaaacctaccacagaggaaacgaagcctgctgcatgagcttgttggtttattccataaaggtcaaataattttggacagcttatttttaataaagacctgatcagtgaaaaaaacagtgattgctcatggcaggaagctttttgaacaaatccttcagagctttastatgtaatctctgaattattccaggggaattaggccatattttctcagttgggagagtaaggtattttcctgaagattctgagggcgtttgccattatgaatgtgttttggtagggtttaacttctaaaattaagagtagttgaatggctagagtggtttagtggttaaagaagattggcattattcctttagtaatctttgtatcttcatggttgatggaaataatacaatttgtgcttcgcattccagtgatgcctggttattgtttgtactgttctttctttccttcttttttttttttttgaagagcaaatgatgtatttgtttggcagatcaataagattttattaggtatgtaattcaacttgttgtagcttgtttcacttgagcctagtaaggactttgatggagataaaaaaaaataattactctcaacttccacctaccattttatcagtctctagggcaatgtttctcaacatttttggctgtggttcatcgttcaagatgtattttacattcagacccaatacacacgtaagtatatcgatatctaaaacaaaagtttcatgaaataatacttacccttattaggtgcagtgcaatctgctcgtttctattttattccattttatttaattgcaagatgttgatgttggcctaggaaattgattctgtgacctgtgtattatgaattgcagttaaaaatactgtgttaggatatatgttcatgaaattttaactcaggctttaaaatatatcccaagtcttactatatctctctgctcaactattgcccttggctaagccaccttcatctctctcctagacttctccagtagcctcctaattgcattctctgctaactctcatcccctgccatcacctagctctgttcttttagctgtctaattgatgcttttaaaatgttattctggtcatgttgtcttcactattactttctttcccccactttcatttattgtgttaaaatacacatgaaatttaccatcttaatcattttaagtatatagttcagtggtattatatacattcataatgttatgcaactgtcatcaccatccatctccagaactcttttcagcttgtgaaacggaaactctacacccattaaacaaataagtccctattccctcctcctccttccccctggaaactacccttctactttgtgtctatgattttgacctctctaggtacctcatataagtggaatcatacagcatatataactttttgttataaatttagcctatgtgatttttaaaaaagtttatataatgttttacatacaagttaaaaattaaagtagtaatcatcgacctcagacatctagaacaagttacaccatggagccttcctgctcagcagcattgaggcctggactgccttgtttcctcttcccttcagatcggcagaagtgatgacttctctggacttgtaatatttttgttctttggtaagtgaatatgaggagagacttgacttttttgttttctttttgagaccgagtcttgttcttttgcctaggctggaagtgcagtggtgcgatcttggctcactgcaacctccacctcccaggttcaagcgatcctaccaccgcagactctcaggtagctgggactacaggcgtgcgccaccacgcccagctaattttttgtatttttagtagagatggggtttcactatgttggctaggccggtcctaaactcctgacctcaagtgatccacccccctcagcctcccaaagtgctgggattaaggcttgagccactgtgcccagctcaagagacttggctttttttttttttttttttgagacagagtctcactcttgttgcccaggttggagtgcaatggtgcgattttggctcaccacaacctctgcctcctgggtgattctcctgctacggtctcccgagtagctgggattacaggcatgtgccaccacacccggctaattttgcatttttagtagagacaggttttctccatgttggtcaagctggtctcaaactcccaacctcaggtgatcctcctgcctcagcctcccaaagtgctgggattataggcgcaagccaccacgcctgcctgagacttagcattttgaaagacaagataacgtgctgagccagacagctcagaatcctccgcatctattttattattggcttttggaaaaggcactatggttgtatgtatggaaaggctgacttgggagtcatgatgtctgggttttcctggctttgccacttacttatttggagaccttgggcaaattgcttacaacccttctgagctttagtttcttagcatcggaaaccattggacactttagatttcttcaaatcctaaaattcagaaattctatcatgtttttgacaaggttttgagaccttacaagagtctgtttttctgttctgccatcctgatttttttcccatctactgtaatctgaatgcttagaagaaggacagtaaattttaatctgtcacactcgattattgtgatgaaataatcccagaattgtgattataaaatagtctggacatacaaagtactatgcagatgacaaatactatatataccacatggggatgaaaactggagatgagcacctcgtcctgtgcactttctgtgaactgctctgtgcttatgatcttatgatccacctagagtagtggtctccaacatttttggcaccagggaccagtttcgtggaagaaagtttttccatggactgaggcaggggggcaaggttttgggatgaagctcttccacctcagatcatcaggcattagattctcataagaaaggtgcaacctagatcccttgtatgtgtattttacagtagggcttgtgctcctgtgagaatctaatgctgcctatgagaatctaatgccactgctgatctgacaggaggcagagctcaggccgtaatagttgctccccactactcagtcctgctgtgtggcctggttcctaacaggccatggactgggggttgggaacccctgacctagagagtcttttgattctgctttactgtgctttccttgaattgcaagtctgattacttgcaacattctctttgtattatgttttgtggcttgagtgtgcctaatccagccagaggtaaagctggggaattgtcctcttctttggtcttgaggcacttctgcaggaaaatttagctttagaaaagataaggttaccaaagttctgactgcctagtttgtgagctgggcccctagtgtcatcatagggagctatggtttcattattacacattttgtttttcactaaatatcatagtttttttctctgaaatgctaatgagctgtcatgtggctatatttgccttcaagttactgggaggattgatagtgtctgttacaggcaaaacaaagctctgttttttttaatcagggaagaatattagtaatagagctcttgtgtagctctcaggcttttcaggctctttcatagctccatttgttaaagactttttactttattttgcctcatttggcaaaagacatggatgtgctctaaatctattagctgcttcactccagtgagactcttagcattgcagtacctgagggcactgttcagctcacccctgtgtactcctggccagattgccatcagcctttttttcatacagaaagaaccataatgtgcatactctgtttctataacataatgaactgagttctgggcaactttaattgtaaccttaaaggagctaatggtattcatatgttaggtaggtttaccttgatttttgaacaaacagtgcagtttcccagggaatcaaagttagactgctttacattgtagagaagggtgtgtgtgtgtgtgtgtgtgtgtgtgtgtatgtgtgtataaagttaaaaccttcgtctgtggctgtatggaaggaagtaaccttgggaagtttttttttagactatgaataagagcaaattgatgaatttttttgggaagaggattaaagcaactcataggaattcagcaccctgatgtatgtcatagtgctaaaatttgcttagtgttaaagtcagatagcataacgtagaattaccatttgactagcaattcttctcatcgttatatactcaagagaattgaaaaaatataccaacacagaaacttttacatgaatattcataatagcattattcataatagggaaaacatggaatagtccaaatgcccatcagctgatgagtggataaataaaatgtggtatatctatacagttgaatattatttggcaatgaaaaggaatggtgtaccaatacatgcttcaacatggataaaccttgaaaacattatgctaagtgaaagaagcctgtcataaaggaccacatactgtatgatcccatttatgtgaaatgtccagaataggcaaatccgtagagacasaaagtagattagtagttgctgggggctggaagagaggggaatggagagtgaccacttaataggaatggggtttctttttaaggtaaagaagatgtattagctagtagtaatggttccacagctttgcaaattacactaaaatccactgagttgaatacttcgaaagggcgaattttayagtatgtgaattatataccagtaaagctattatctaacaagtaagaccaaattatctgtataggtaagatacctgtcttttttgctgagtagagctatatgaaattctgatacatgggatgccttgattaaagatactccgtatcatcatttatctaaaggcttatgtcaacttggaaatcataattgcaaagaaaacttttttttcctattgtaggattaaatgttagatgtaaaattccatagtgtctgactctgtggatgcacagaagaaaggaataagttgtatatatattatacatattataatctagaactaaaaatattacagaagggaaagcccatatacctaataaaactataaagttggctctttctcaaacaatgggatactattttacacacttaaattttgcaaatattataaaatctcatactaccaattgttaacaaggatatggggaaagagaaaccctaatacactgctgatgggtgtgtaaattgagctctgtagaaagtttttggcaagattttgtgaaggtgatgaatgtcctatgaaccagcagtacaaaatatacatcttgtatgtattttgcataaatggtgaaccttccatttatgcaaaaggaaacatgtacacgtgttttaatttcatttatatttgtgataggaaaaaatttggaagctacagagaaatggataagcgagcagtggcattttaatgcaacctattgctctagtacagtcagaatggacaaatcaggtctacatgtgtcaatatagatacatcctggaagcattatgttgaaaaaaaagaaagcaagtggcttggcatggtggctcatgcctgtaatccagcactgaggctgaggtgggaagattgcttgaggccaggagttcaagaccagcctgagcaatgttgtgaaagcctgtttctattatttaaaaaaaaaaagaataaaaattaaaagcaagttacaagaagttaaatgtgatacctgttatgatcagttaagacaaaataaaaacatgcctacagtcccagctacttgggaggctgagatgaaaggatgagacgggacaattgcttaagcccaggagttccagtgtagcctggacagcatagtgagaccccatcttttaaacaaacacatcagtcaatccaatactgtgttgtctaaggaaaacatatgtatgctacaaaattgttttaagatgtggattaaaagaagctatattaccttcagcaggatatttacttctgaaggagaagacaggacagtggaatgaagagggaaactttcaacttacttccaatattctctttcttaaaatctgacgcaaatatggcagtatgtcataaattgttatatttgggtttatcatttcatttttctgtattttaaataaactttcataattaaaaattaggaaaagtcaccaggcatagtggctgacacctgtaatcccaacactttgagagatcaaggtgggaggatcgattgaggctaggagtttgagaccagcttgggcaatgtagcaagacctcatctctacaaaaaatacaaaaactagctgggtgtggtggtgcacgcctgtagtcccagctactcaggaggctaaggtgggaggaatgcttgagcccaggagtttgaggctgtagtgagccatgatgatgccagtgctttacagtctgggtgccagaatgagaccctgtctcaaaaaaggaaaagtgaaaaaaaatcacatgggtgagtttaaaaaaaattattgggcttacatattttttttacatgtttctatatttgctgtcctaaaaatgattcatcctaatagtcattaatgttggtttttgaagaagtacaatgaatgtggttcatatgttgtgtttttattataaaatcaccacttgtccatattttattttttccttgctcgaaaagtgcttgattaacacagtaatgttacacagtaacacatgaatgaattcttactaaaagtgcatgggtttttatgttttatagttaggactttggtttccttctataacagcatttgtgtcttttttttttttttgagatggagtttcgctcttgttgcccaggctggagtgcaatggcgccgtcttggctcactgcaacctccacctcccaggttcaagagattctcctgtctcagcctcccaagtagctgggattataggcgcctgccaccatgcccggctaatttttgtatttttagtagagacggggtttcaccatgttggccaggatggtcttgaactcctgacctcaggtgatccacccaccttggcctcctaaagtgttgggattacaggggtgagccaccacgcctggccagcatttgtgtctttattggttgtgtgagaatactgcttgctaagcattatactgccctctttcagatgttctttatacatactttgattctgaggaaggctgtaaactagtatgatactggcaggcacttaccacattgttggatgccttaaaagtttattgttatgaatattattatttttaataaatgtttactgtgtataataagaaagtgtaaattactagatggaagtatgcttttgacaagcttcttggagacagggtttttggaactgaagaatggagtgagggatagattatgacaattattatggctattcatcttaaatcttaagagaattagcacaagatatgcatgccttcacaagacgtggaaattccttagcattcatctttaaattagcagacttggctatgggtattttccctgttaacattagtttcctttctgccattcttcttctttttagagttggagtctcactctgttacccatgctggaatgcagtggcatgatcacagctcaccacagtcttgagctcctgggctcaaactgtccttccaccccagcctcccaagtagctgagattatgggcatgcaccaccacacttggctgctttttatttattttgttttttattattttagtttttttgagacagggtctcactctcacccagactgaagttcagtggcacaatcttggctcactgcagccttgacttcctgggctcaagtgatcgtcccatctcagcctctctagtagctgggaccacaggtgtgtgccaccacacctagctaatttttgcattttttttggtagagctggtgtttcaccatgttgcccatgtttctcgaactcctaggcccaagcaatccgtttgcctcagcctcccaaagtgttaggattacaggtgtgacccacagtgcctggcctcaactcgctacttttctaaaaaaaaattttgagagaatggagtggggtctcactacattgcccatgctggtcttgaactcctggcctcaagtgatccttctgccttggcctcctgagtcgatgagattataggtctgagccactgcgcctggcccttctgtcattcttagaggaaaggatgttacataccatctcttctgtttagtatagattaatgttctcttcttggtttcattttcttttttcctccaagaagttactgagtactgagtttttttatattttagattgagttttcaagtttgactttcctccagagcagtgttttttgaactgcggtatgtgggtgggagtgagtagtgttattgaaaagatcatgaattctggccaagcctggtggctcacacctgtaatcccagcactctgggaggccaaggtgggtggatcacttgaggtcaggagttcgagaccagcctggcccacatggtgaaactccgtctctactaaaaatacaaaaattagccaggcatggtggcacgtgtctgtaatctcagctacttgggaggctgaggcaggagaattgcttgaacccaggaggtggaggttgcagtgagtcaagattgcaccactgcactgcagcctgggtgacgaagcaagactctgtctcgggggaaaaaaagatcatgaattctcaggagtcttaccagacagtggtttaaaaagatcagatgtaggccgggcgtggtggctcacacctataatcccagcactttgggaggctgaggctggcgaatcacctgaggtcaggagtttgagaccagcctgaccaacatggagaaaccccatctctactaaaaatacaaaattagccgggcatggtggtgtatgcctgtaatcccagctactcgggaggctgaggcaggagagtcgcttgaaccttgggaggcagaggttgcggtgatcgcaccattgcactccagcctgggcaataagagggaaactctgtctcaaaaaaaaaaaaaaaaaaaatcagatgtagattgaataggggtgtttttctctgtgtctgccctttccttgtacctaccttgtgaaggcatgtcagagatgggtagtgccccagagacgtttagaagtggtcacataaacatgccatgtttgaagtgaaaatggtggtttattttatgtatttatcttgttacatttgattattatcaagtaaaatggttaatgtctattatgtacataacatcctttaaagttgtgctttctctcattccaaaatggagtctttcaagttggaaatacactcatatcaggaatatttgggattctgagctgtagttttctgttcaatctcattatagtcttttttttttaattttttttttttttttttttttagacaagggtcttactctgttactcaggcaggagtgcatgagtgcagtgcagtgtcactatcatggctcactgcagcctcgacctcccaggctcaagtgatctttccacctcagcaacccaagtaactgggaccacaggtgctcaccacaatgcctggctaatttttaaattttttgtggagatgaggtctccccatgttgcccaggctggtctcaaactcctgggctcaagctatcctcccacctcagcctcccaaagtgcaaagggctgggattacaggcgtgagccactgcctccagttaattttgaaaattttatagagatgagtgtctcactatgttgttcaggctggttatgaagtcctgggctcaggccatcattctgccttggcctttcaaagtgttgggattacaggtgtgagccaccatgcccggcctcattatgatcttaatgatgacagaaaacaaactactttaggtatacattatattggaggtttttcctactagctgttttgtatttttaaagatacacttcacatattgaagatagatatctgttggtgtagaaagtttttgtattttccctagtccatttttgggacaatttgaagtttaagccagagtctgaacttggaaacataatttcgcttcctaaaggggtaatctaaggaattccagacttatgccacratttagaatcccttgcattatccctttaaaaggtgggaaaagtaaatttatggtgtaaattgaacaatttagggagatgctaggattatcagcattcacttaaaagttactgagttattatcagcattcacctaaacgttactgagatgaataacttaaaataatttcattcatatactgagatgaataacttaaaaataattacatctttaggctgggtgcggtagctcatgcctgtaatcccagcactttgggaggccaaggcaggtggatcacctgaggtcaggagtttgagaccagcctggccaacatggcaaaaccccgtctgtactaaaaataaaaaaaaattagctgagcgtggtggcgcgcacctgtaatcccagctacttgggaggctgaggcaggagaattgcttgaacccacggggtggaggttgcagtgagccgagatcatgccactgtactccagcctgggagacagaacaagactccgtctcaaaaaaaaaaaaaaaaaagaaatttacatctatacatatggtgccaagatgctatgtaagaatactacaaaaatatcagttgaatatatttaaatcagaaaaaaatgcttagtgtttgttgagctcttactgtcttagcattgttagtgcttctcatgtagtatgtcactcagtcctcacagttaacttgtgagagttgttgttatactcatcgggataaatattaggttggcaaaaaaataattgcagttttgctattgaaagtaaaaaaccacaattacttttgcaccaacctaataacctatggtcatataccctggtagtaagtggtggtgttggcttgtaaaatcagatgctttgactaaaataatggtgctgttcatcaccatattggctgaagaaaagtcaccatggattgtttatatcacctaaatttcaaatagttgagctatggagatatacaggttgtgaaagccttttgattcaaagatgtggaacagtgtgtcttttaacatataccatttcactttttactgctactcacctggaaagcaaataattttttaaatatttgactcattttataaaagatttttttaatttaaaatttaatctgagtataatatttttctgagaaatgcctgagcatatctcaatattttatatctaaatctagcatttatattttatcttagaactttgacttttgtagatctctgtgaggtactaattaaattctacaaatatttactgagcgtttgagtatcttctctatgcaaggggctgaacgagctggttgagaacaaaacagggaaaggagttaacatctattgaacacctgttaaattttagatcttcatctcatttaatctgtatagtaaatttgttagtaggtacgatcctcattttataccacaggaaacttaggcatggaggagttaagctctcatcacctaaatggcagttctggaatttgaacctaagcccatgctacttttctaacacacaatactgcctcgtgtgtaaatataaattggattcctatttctagcttatagtctagtccaggagttcacaaagtggagtctgcagatggactgctggtggtccctgatttcacttttggttatcacaagttcacaactgtagtcgttcatcagtattcatggaggattggttccagtacccctgctgtgggtaccaaaatccatggagctgaagtcccttatataaaaaggtgtagtatttgcatataatttacatcctcccatatacttcacatcatctctagattatttataataactaatacaagccaggcatggtggctaacatctataatcccagcactttgggaggctgaggcgggtgaatctcttgaggccaggtgttggagaccagcctggacaacatgtgaaaccccgtctctaccaaaaagtacaaaaatcagccggcgtggtggtgcatgcctgtactcccagctactcaggaggctgaggcacgagaatagcttgaacccaggaggcagaggttgcagtgagccgagatcacgccactgcactccagcctgggtgacagagcaaggctccatctcaaaaaaaaaaaawaatartaataataactaatgcagtgtaatgctgtagttgttatactgtattgtttggggaataatggtaagaacagaaagtctgtaaatgttcagtatagatgcagccattcacttttttccatgaatattttcaatccgtggttggttgaatacacagaagcagaaccaatggatacagagggctaactgtgtttttatgataatgttaaaatgttactgcttttttcactgatgatggcaaaagcaatgactgataagactgctggcaccttagcacaagttgagagagtggcaccagactgtatcatggtcattgtttgtttttaccaccatgcactcacaggaaaagaaaaagaatagtttaacttacaaatgtccctgatgcagagacctgtcatagtggcttatccctgtaatcccaggattttgggaggccaaggcaggaggattgtttgagcccatgaattcgagaccagcctgggcaacatagtgagattcacatctctataaaaaaaataaaaatatccttgatgcagtagtaaaaatattattatttttaaataggtctcaaactcctggcttcaagtgatccacctgcctcagcctcccaaagttctgggattacaggcatgagccatcacacccagcgaaaatatttattaaatctgaatcttctactgaatatcttttttttttttaaagacacagggcctctctatgttacccagtctggtcttgaattcctgggctcaaatgattctcctgccttggcctcccaaagttctggaattacaggtatgggattctgtgcctggctctcgttcttaaaagttgagatataaatcacatattataaaattcacctttcagaagtacataattcagccaggcacggtggttcatgcctgtaatcccatcactttgggaggctaaggcaggcagatcactcaaggtcaggagtttgagaccagcctggccaacatggtaaaaccctgtctctactaaaaatacaaaaattagccaggtgtggtggcatatacctgtagtcccagctacttgggaggctgaggcaggagaattgcttgaacctgggaggcagaggttgcagtgagctgagatagtgccactgcactccagcctgggtgacagagcaagattcagtctcaaaaagcaaagcaaaacaaaaaaaagaccaaaaatacaattcagtggtttccagtattttcgcaagattgtgcaactgccaccactgtccaattccagaacattttcatcatcccaaaaagaaacttcatactccttccctctcccttttctctctctccctaacaccaggtaaccactaatctactttctatctctgtggatttacccattctggacgtttcatataaattggataatacaatatgtggtcttttgtgtctggcttctttcagttagcatagtgctttcagggctcatccatgttatagcaaattgttatggtttggctgtgtcgccacccaagtctcatcttgaattgtaactcctacaattctcacatgttgtgggaggaacccggtgggaagtgattgaattacaggggtggcgggtctttcctgtgctattctcatgataatgaatgagtctcatgagagctgatggttttagaaacgggagtttccctgcacaagctctctctttgcctgctgccatccatgtaagacgcgacttgcttctcgttgccttctgctgtgattgtgaggtttccctagcaatgtggaactgtaagtccgttaaacctcttttcttcccagtctcaggtatgtctttatcagcagcacgaaaatggagtaatacgcaagtgtaactacttcatttccttttttaaaaaaacagctttactgagataaaattcacagactacacagttaatccatttcaggtgtatggattttttttttttttaagagatagggtttcattgtgttgcccaggctggattacagtggctcttcataggcatgattatagcaaactgtagccttgaactcctgagctctcttgattctcagacctcaacctttcaagtacctgggactatagatgtgcacctctgcacctggcaaagtgtacaatttgatggtttttagtatattcacatatacaaccattgccacagtttattttagaacatttttatcacctcaaagagaacctgtaccatttaacttttaccctgctatctccctgttccccccaaaccaaagaactactaatctactttatttctctatatgtgtcccaattctagactttatatgaatgggataatacgtgaactccagtttgtccgcatcttcaccatcacttgttataatctgactttttggttttaccaatcctactgggtgtgaagtgctatgtcactgtgttttgttttttttttcattatttcctaatgactagtgatgttgagcattttttgaagtgcttattgtccctcttctttttttttttttttttttttttttgacagagtcttgctctgtcgccctggctggagtgcagtggcgtgatctcggctcactgcaagctccgcctcccaggttcacaccattcttctgcctcagcctcctgagtagctgggactacaggcacctgccaccatgcccggctgctttttttttttggtcttgttagtagagacggggtttcatcatgttagtcaggatggtctcaatctcctggtctcgtgatcgacttacctcggcctctcaaagtgccgggattatattgtctgtttttatattttctttggagaagtgtatgttcaaatccattgcccattttaaaatttggttgccttattgtggttgaattgtaagagttctttatatattctggatattaatcacttatcagttgtatgatttgtaaatactttttctcatctgtgagttttctttttcacctcttgatattatcctttgatgcacaaaactttaaaattttgacagaaatatctggacctcctgtttatctagttttttcctttggttccatgtactttgttttatttaggaagccgttgcctaattgaaggtcatgaagattatacctgtattttcttgtaagagttttacattttcatctcttacatttagatcgttgatccattctgagataatgtttgtgtatggtgtgaggtaggcagtctaacttcattcttttattttattttttttgagagagggtctcactcctgtcgcccatactatgcagtggcacaatcaaggcttactgcaaccttgaccttcctgggctcaggtgatcctcctgcctcaacctcctgagtagctgggactacaggcgcacaccaccatgcccagctaatttttttttttttttttttttttttttttttttgtagagacagggattcactatgttgcccaggctggtttcaaactcctgggcttaagcaatccactcacatcggcctcccaaaatgctaggattacaggtgtgagccaccactcctggctccatgttctttattaggattatgttccattatttatgaccaaagaaagtaaaataacactggctttaaaaatgatataagtctattttttgtcttgtataaagaagtctagaaatagcctaggactgctttggtgctctgcaatatcagagaactagtttttttctgtatttgttgccttgctattctcaacatgtggcctcttcctcgtagtcttaagtttgctgcttgtactccaaccatctcatatacatttccagccaggaggagggagaagtgcctaaagaataatgtacccaattcttttttttttttttttttttttttttttgagacagagtctygctctgtcgcctaggctggagtgcagtggcacgatcccagctcactgcaagctccacctcctgggttcatgccgttctcctgcctcagcctcccgagtagctgggactacaggtgcttgccaccatgccaggctaattttttgtatttttttaagtagagacagggtttcactgtgttggcaaggatggtctcgatctcctgacctcgtgatccacccgcctcggcctcccaaagtgctgggattacaggcatgagccaccgtgcctggcccccagttcttaaaaggacatttcctagaaatcacacctaatacttttattcatgtcctttggcttgaactagtcacatgaccccacttagctgcaagggaggctggaaaacatagtcttccttctgatatgtatttagctaamacttatgtattcttttactgggaagaaggagtgagagaggatattgggcaacaacctcccaggcctgtcacaatgatctaagtgaggttcttttactccctgctgctgcagttttcttccccgcctctctcacttttccagtgaatttttattattaagacatgattcagggtcccagggtagggatcaccatatacccaggttcttctttaccatcctgggagaaggacagaggtggggtggagccagttcagatcttcccaagaaatgtgccttctgcccatggtcatcccaggctgaggcccagggtatagggcagagagacttgtacacatgctggtaccattcacaaacagagacatcacccccttgatgtatgtatgtatgtatgtatgtatgtatgtatgtatgtatgtatgtatgtatgtattaattatggagtcttgccctgtcacccaggctggactgcagtggtgcaatctcggcttacggcaaactccatctctcagtttcaartgcttcagcctcctgagtagctgagattacaggcagctgccatcgtgcccaactaatttttgtatttttagtagagacagggtttcatcatgttggccaggttggtctcgaactcctgaccttaagtaatccaccagctttggcctcccaaagtactgggattacaggcgtgagccactgcacccggccatrcattacctcctttagcagtcattgccttcttgaagtggtggaggtccaggtatttctgccagccattcctggtctggttctggttggggaagcgcctgtcaaaaggrgcagtcctgtagttcttgattttggtcttgatgtcttttgccatggtgcagttctcagctcaatggctactctctgctgtcttcttttttcagagacagggtctcaggctggagagtagtggcatgatcatagctcactgcagcctcaaactcctgagctcacatgatccttctgcctcagtgtccctggtgggactactggtgtgtaccattgcacccaccttattttctgcttcttattgatagtctggtatataaaaaggctcataattctcttcctattgtattatttttttcatgttatatgcgacatctgagttattacattcaggtggttcttctcttttaatatggatcactagtattcttcctttctccttgattaatttagaacctttctattttaaataggctacccataaggtatttgaagattttcatgctggtgtgcatttaccttttctttttttgctatccacatcatgcttgctgcctacattagatgctttcaaaatgtacagcactgactgctgactagtgctgctgtgtgtcttagcactttataatttacagtaattgcacttagatgtagttgtaatgtgtgaactcctgtagtgatgtagagaacactttagttgtattatttactttgtttggaaaatggatgtgtttgcctgtactatgtgttccctcattgttttaaagctttaaatatataattgtgctgggcttaaaatggtattaaaatatctgttgcattttatttgatcaaaaattctcagcaccttttacagaatattaattggctaagagtaatactgtttgaagcaagaggctttgaaaggaagaataatgagccatgactaaggagctgtttttatttaaattgtcaagattcgttgtatttccagaggttctgccttgatcaaagtctttaataaccacaastaagtgaaaatgcatttttaacacaaactctgtactgtattccatgaaggtaacttgaagagccattgcttttgtgtggtaactgatcttaccagagtagattagtttaattaataagctagtttttataattaaagtgtaattggaagaataattcatgaacatgctgttgatggcctgagtgttttcactggtgctacagtgctgtcatcagtgtgtgcattgtcctgagagttcctcattgtggctctggtaggtgcttagaagctttaggcttgacctcttgacccatagacacatttcaaccttgaatatacactttcctctgagtgtgtgttgctgtgtttggatactcttacaaaattatgacaggttstttttttatggcaagatattttatttccagtattttaaaaatatttgctcaagaatttaggaaaatattcatggttcattttataaagtaggagcatattcttgatctatccggagaggatgtcattgagaaacctaaggatatgaggcttctggcactggaaaatagggctgttcttcaaatgccccattgtcatgtgaaaacaaagcacaatactataaatgtcttcctttccccccaaactactgcctgtctttatgctaggtgaggtttgtctcaacaagtttttcattccaaagttaatattttcaaaaatagttttttttatattattcatacctgaacagaattattattgtagattttctgtgtggtagattttcttactgtggcaggttttccgtggcctggcaacatttcaggttgtctaggctgattgctgcatggagttttgatgtaagagtagaatcgactgaagaattcctaacttgaaaattgtctcataacagattacataattttgtaggtgaatacacaaaatatgtgcagatgatcatatttaaatttattcaggtctcttatacgtagcgtgtggacttctaaatatccgtcactcagtctcttagagaagaactctagaagacaaatagaattccacctttaaaaattggaacacatttgaacaccatagaaaaaggattgagaatcataaggaaagcatacctgtagtgtttgtgggcatgaataaagttcaaggaatgtaatgaagtcatcttgtcaaaatagtgctttaattttcaagcagcctttttggaggtgggggaggagtttaaggcaaattgtcaaatttctgttaaatgtttgcaagaaaatattaccttgtagttaatgtctctacttttcagagtaccttcttataagacccttcatgataggacagataataataacaaatgtttattcagagcgacttactcaaggtcacatcaccaaactcagtgatatattaagacacaggtcaaaacaacattattacattttcattaggggccaggcagaatagtaaattataccaaactcagagtcaggtggcacgctaaggtgaacagctcccttgtcattctttctctacacacctgccaaaatgattatttatttatttttatttattttttgagacggagtcttgctctgttgcccaagcgagggtgcagtggtgtgatgtcggctcactgcaacctccgcctcgcgggttcaagtgattctcctgcttcagcatccctagtagctgggattgcaggcactcgccaccatgctccgctaattgtttgtatttttactagagatgaggtttcaacatgttggccaggctggtctcaaactcctggcctcaagtgatccatcagccttgggcctcccaaagtgcttggattacaggcatgagccaccatgcccagccctcaaaatgattatttaaaaagataaatcagccaggcgtggtggctcacgcctgtaatcccagcactttgggaggctgaggcgggtggatcacgaggtcaggagttcagtaccagtctggccaagatggtgaaagcccgtctctactaaaaatgcaaaaaaattagccaggtgtggcggtgggcacctgcaatcccagctattcaggaggccgaggcagagaattgcttgaacccaagaggtggaggctgcagtaagccgagatcacgccactgcactccagcctgggcgacagagtgagactctgtctcaaaaaaaaaaaaaaatgataaatcagatcatatcactccattgtgtaaaacctcccagtggcatccagttgtttatgtaatatacttatgtccattcctctcgggccatgccattcatttagttccttcaagataccaagctcattcctgcctcatggctttttaacttgcatatgctgttccctctgcatggctggctgtttcttgtcaagttcagacagagccatagaggcatgaggtctgaagcttcactgcccaggatcaagtatttaacctctcagtgtctcagtttcctcaactgtaaaaaattatggataatttaggtaaatatacgtcttagtgttgtgaagattgaatgcatacacatacagtgcctcatttataataagggttggctatacaagtctctttcggatatcacttcctcaatgagacctcttttggtcatttaatctaaattagccacctggcccccaggcacataatgcttatagttatccaaaaactttttattgtatatttattttcatttttatgtctctcccactataatgtaggcccaagaaagcgaagatattttctgtctgttgtactcccagtgcctaaaacagtgcctcatcactatgcatttgttgagtgaattaatgaaagtcaggtctaccccagaaggtcttttgtttttttttgaagtggggatcgagtctcgctctgttgcccaggctggaatgcagtggtgcgatcttggctcactgcagtctctacctcctgggcccaagtgatcttctcacctcagcccccggagtaactgagagtacaggtgtgcacaaccgtgcccagctaatttttgtatttttagtagagacggagtttcactgtattggccaggctggtcttgaactcctgatctcaagtggtcctcccgccttggcctcccaaagtcctgggattgcaggcatgcaccactgcacccagcctaccccaggaggtcttcatgagttccataagactgaaaggcaatttatgttgtttagttaagggaagatgttcacatgtatacctaacacacatggtaggggcttgttgggaatggtatagagaagtagtcaataaaaaggggttgagccatggtataaaatacatattttactttttttctgttttcttttttaaaatttctgtttcttctagctggtgagttcacgtccctatacataagctcatgagcttacttgtgtctttaaatctgaggacagctgattgcccctcagcattataaagttagaactttggccaggcagggtggctcatgcctgtaatcctagcactttgggaagccgaggtgggcggattgcctgagctcgggagtttgagaccagcctggcaacatggtgaaatcccgtgtctactaaaatacaaaaaatgagccgggaatggcggcgtgtgcctgtagtctcacctattcgggaggctgaggcaggagaaagcttgaacccgggagacggaggttgcagtgagccaagatcacgccactgcactccagcctgggcgacggtgcaaggctccgtctccaaaataataataataaaaataataataaaataaagttacagcattattgagcttcttctaaaatagtgtaagcagaaagtgctgatatgcaattagatactcagcggtatttgacaattttaggaatcagaaggatggtgagggatggtccaagatccagagtaggtgatctgagactaggaatttatgaattatcaactgagtcaggtttgaaagcaatattattatttccttatatctgtaactcagcctctttcctctttctcaaactcttcctacttttcttctgttattctcttcctattcttgtaatctttgttgtttctcattgtcttcattcccatgttttccttctcgtgtacctaatggaaacccaaatgacatttccattatttttctttggtccctcgacccaacatgcaaaatcaaatttattatctccacagataaaattcctcctcttttccctatttctattagcagaatactgttgtaatgactgccctggcttaaaacctttagtaatttttgacatctgtctctcctccatccccaacaatcaaacagaaacacattctatcttatataaatcctgtcttcattcattattaacgcgacaaagatttgagttcctgttctgtgccaggtacattgtatggtcgttcccttctttgcatttaactaccccaattcaggatatcaacacattatactttgcctaatgaagtagctttgtaacctccccccacaacckcatatttcttttttccaatccagtctaactccactgccatattaatttgcttgtacttgaaccatgtgattggctaaactgtattgcccttttagaacatagttcacattttctcacatctatgactttgttcatttaagttatgtctccagcttcctgagggcaagaactttgttttatttactgtaatcctcaatacccagacagcacctggcatgtagtgggtagtcaatatttgttgaccagattggtcttgaactcctgggctcaagggatcctccccgcttggcttcccaaagtgctgggattatgggtgtgagctactacacctggccctctctagaagctttttctgatcttctgtgtatttatacctgggacagaaccctctttcctttttttttttttttttctgtatctgtgctgactttgtatatatgatgtgtttgctgtaaggttaatatacgtagtaaattaacaaatatttattaagttctttttaaatttcaagtattgtatctgggtacttgagacaaaaaaaccagtagaatggagttcctttcagtgaatttaccatctactgggagatcaatccatgataatagtaaaagtaagcagtgataaaagcaatcttgggatgttgtggaagcctagcccattcgaaggggatggataataaagagaaggaagtaggatggggaagaagaggcaattctaggcagtcacagtaaagagccgcataactggtaccagtgattagagtgtgaataaaggggaatggtgagaaatgaagccagtagtgaaggggccggtactgttgtaattgaagaggcagtgttatattgttactgttatcctttttgttgggggaagaggaaatatttggatgactgattccctgtagaaccatcaagaggaggtgaagtgagcaaaggccaagtaatttatggactggtcataaattattttttgccattggctatttgtcaccattggctgttaccaaagggtatttatcaccttggctacccaattcgttgagaactctatagatacctagaagtctaccctgcatcttactactttgagatgaccacttaagattcttaagttttttctgttattcacccccatgtttccctccctccctccattcccccctccgtccgttcccccttccccccttcccccttcccccttcccctccttccctcttcccctctttcccccttccctcttccccctttccctcctttctgccttccctcctccccccctttcccccttcctctccctccccccttaccccttcccctccttccctttcccttccctttccccttcccttccccttcccttccgtttttctttccccttcttttcttttctttctttcttttctgctgttgagaagtctgatgccatttattacatatcacaattttgtgggtgaggattttggacagggcttagcttagggattattctgcctgctccatatggtattaacctggatccatacagtgttaagtgtcatctcttagtgttattcagcaggtgactaggcttgtctggggtgtccaggatggctttgttcatatgcctggcaccttggtgtggggatgtctggaaagctggactcagctggattcctctgcccttctgtgtagtcatgagacctctttttttttttttttttgagatggagtctcgctctatcgcccaggctggagtgcagtggcacgatctcggctcactggaagctccgcctcccgggttcacgccgttctccggcctcagcctcctgagtagctgggactacaggtgcccaccaccacgtccggctaatttttttgtattttttgtagagttgaggttttaccttgttagctaggatggtctcgagctcctgacctcgtgatccacctgatgagacctctttttaggatctgtccatcagggtagttggacttcttacatgggggcacagggctccaagagaccaaagtagaagctgccagtcctcttaaagtctagaccctgaactggcataccatcactttcactgttctcgattggtcaaggcagaggccagctcagattcaaggtcaaaggaaataaaccccaccattaatgggaaggaagtgtcaggtaatttgcaaccatctttaatctgccacattactcttccatgtgctttccattgttttgttatatttttctgttgcttgtactcctcgtttttagatgatttccaagatgaagaaggaataggaagccctattatttgccatctctaaagcctggtagtttttaaggtgtctgaagataatgggtgtggtagagacagaggcaagggcagttaattagccaagacttgatgttttcctcatcttctatacagtaacttttttttttttttttttagacatagtttcactccatcatccaggctgtagtacagtggcacagtcttgactcactgcaacctctatctcccagattcaagcagtcctcctacctcagcctcccgagtagctgggactacaggcatgcatcaccatgcctggctgttttcctcatcttctacagtaggacgtagggcagtacctagtacatatatagtaagctatcaggaaacacttgttcagttgatttgaattccttcataccagattttacacacacacacacacacacagacacacacacacacagagatacccatacccacccacatccacccccaccacccctacatacctgctgagacagtaagagttttcaagattaggtttactgcattgaaaataaatcaatgagaattaaagtaaaaatatgtccagctaaaagaaagttcattaattgattgaaaacagtttttttaccaattgtttaaaaaaaattttcagaagaaccataccatttggtcgcatagaaccacctttttgtcatgggtcatgataaagaattgtgctagtgctcatgttttagagttgtcagtagctgtctacgttcttccattcttctaacacatttcatgctgttgtttctaggtacgtatgttgttctgtacaggcagaaggcatgcagccctaaagcgggtagggtggagaaaagatgcataatcaggccagcaaaagagggaaacagatgggttgtgggagatgaccctgcccccatgctgtttttgttctggctgctgttgatcatatgtgaatcagcagcccagaaactggagttactgatcctttgataaaaaaagaaagtatgaacttagactcagtagagttataaattacaactctaaaaagtgattcaggttttacagtaaatacaattacaggagtattcaggaattggtaaaggggacttaattatgatggctatacctcaacatttttgggtcttgtctctagattatcatagtttacgagattttatcctgtgggctctttcaaaatgaatagagagtagtgtgtttgttagagaaataaatccaatgtgtatattttatgccaaattagtcttttgtcagtgcttgtatatgacttctggtctattttctaatctcaaggttaaggaaaccttgctgtgtctcactgagtcttcccatcattctgtggaagaatcttattttttaaaaaatactaggagaatgttatcaaacatatacaaatgtagagataatagcataatgaatttctaaatacctaataaccagcttcaacattatcaacattctgcccctcttgttttgtgtgttcttcctcactccctgcctcatggccttgatggaaggattttattctatagtatagtttaatattggtgttttaaaggatgtatcctgaaacttttgaaatcccctaaattaacaaatagcactatataatttacccaataaaaatatttggtaaagtgtgtgtgtgtgtatgtgtatagatatatgtgtaaattttaagtgatctctttaagcccttaataattctgtaaatatggaacttaattacagaactattctgaatcgaacagttgctaaagcagtttttcagattgcttatttcttttattctggttagtagtaggcacaaccatggggttcaggtctgtagaatttgatattcttattttctttcttttctttttgcattgtaatatagtatcaaacagtcctttctttaaactattaaaaatgtatgtgttctgtcaggcaaggtggctcacgcttgtaatcccagcattttgagaggccagtgtagggcgatcgcttgaggccaggagttcgagaccagcttgggcaacatagtgagatctcgtctctacaaaaaagtgaaaaaatagtcaggtgtgttggcacacacctatagtcctagctacttgggaggatcacttgagcccaggagtttaaggctgcagtgagctatgatcattccattgcactctagcttggatggcagagtaacatgctgtctgaaaaaagaaaaaaaaagtatgtgttctaagaaacaccattttttcctccctgggatgggtatcacttcgttgcccaggctggagtgcagtggcatgatcacagctcactgcagcctcagcctccctggggtcgaggtgatcctcttacctcagcctcaggagtagctgagactgcagacgcacaccaccatgcctaacttttgtgtgttttgtagagacggggttttgccatgttgcccaggattgtcttgagctcctgggctctaacaatctgcccaccttggcctccccaactgctggggattacaggtgtgagccatcgcgcctgggtgaaacattatttttaaaacttccttggctgggcacagtggctcacacttgtaatcctagcactttgggaggctggggcaggtggatcacctgaggtcaggagttcgagaccagcctggccaacatggtgaaaacccatctctactaaaaacacaaaaatcagatgtagtgttgcgtgcctgtaatcccagctactcgggaggctgagacatgagaatcacttgaacctaggaggcagaggttgcagtgagccaagatcgtgccactgcagcctgggtggtggagcgagactgtctcaaaaaaaaaaaaacccaaaaaacccccccaaaaaaaacaaaaaccaaaaaaccaagaactttattttctctttatgcttagcattggacttggacttgggttggctttcttttggggggccgttttttacaaagtttctttaaatcattttctagaaatactggttatgttcactaaatgcataagagcatcacaaactcatgaagttaacttcatgcttcattagaaaaatattgataccatgtgatggatttttattgtctcttgggaatattaacacatgtaaatgctaaatctctgaattccagcaataataataattcaaagtagtaggaagaagtttgttctgaattagtgataagtaaattaaataatttacttcattttaaagaatatatggttttggcgaggcacagtggctcattcctgtaatcctagcactttggaaggtttaggtaggaggatcactttaggccaggagtttgagaccagcctgggcaacatagcaaaaacctcatatctccccaaccccttgcaaaaaaaaaaaaaaaaaaaaaaaaaaagccaggcatgatggtgtgcctgtagtcctagctacttgtgggactgatgggggaggatcacttgagtccaggaattcaaggttgcagtgagctatgatcgtgccactgcaccctagcctgggcaacagagagagaccctgtcccttaaaaaaaaaaagaaagaaagaaaaaggctggactcggtgagctctcatgcctgtaattccagcactttgggaggccaaggcaggtggctcacttgagtccaggagtttaagaccagcctgggcaacatggcaaaaccccatctctactaaaaatacaaaaattagccgggcctggtggcgcatgcctatattcccagttactcgggaggctgaggcaggaggattgcttgaggccgggaggtggaggttgcactgagccgagaacttgccactgcactccagcctgggattctttcaagctcagtaatataagtttacttagtgaaattttttttttgccaagacatctaaaaataattgtgataaaaaacatatgtaacattaaattcacctttcctcctgccttgggagctcttagataataaacttaccttttaaccactttttttccttctttttaaaatttttaaaaactatttaaaattttttttaaaaaagagacagggtcttactatgttgccgagactgatctggaactcctgggctctagcgatcctcccacctcagcttcccagagtgctaggattagaggagtgagccactgtgcctggccacctggcactcttttatattaccctgcccctgccaaatagcagaagattttacttaatctcacaccaagttatagtatcagaaatatcagttaagtctgaaataatggggttttgctaagttaagaactttttatatgaaaccatgattctagcgcatctgtttagctatagtattttagtggtatgaggcttgatgtttcctgtccttgactgcctaacattatttttagtgtttctgtatgtttcatgcagtcttccttgtgtcatccaaattttccccaagacatgtctgtcgtggttccctagattatctttatgtatctttcatttgcttctctctttgttcagttaacaactattagaatgcttgttttgtgttaatacttttgcaaggcccatctactgcatacagagttattgttgcagttaaatttcttaattttcttatgagaggtctgaactcttacaatccataatgatttaacagctgtttattgaaaacctgttactctatgtgaaaccacttttcctaagtcctagggctgaagttttgataccattctattttccttttgaataaggaggttagttctcaaggggtccttgaatgtcataaagttgaagtcttttttttagtctgaaaggctgctgctgttaaaagaagcagacatgctctttcagagtcaatgacaaagaatactcagccggatggattaatcctgtgtaacagttgtttttttcccagtacacacagagacatggttcaaaccataataaatcatagacaagatggaaaagaattctttgaagtttagattctgaattttgttggtagacatttgttgttttgtaatttataaaattattcaaaccctaaaagaaatccttttcccattgtttgcccatgctcaattacccttgagaatattgagttcctaatactgagttcaaatttttwtttgaacttgtctcccttatatcttcttccagtctctttggagtagagagtccttagtatcttttttcttcataatattatctccctcatgttaattactgttatctggatcttttccagtccagtttattttctgtgaaatgtatcagccagaactacagtcaggtttgggcacactattgctttacttgaagttagatcataattgtctttttagtttctagtgcctttcttcacttcatggctgttcaatattttgttggtttcttcaactaaagcaagttagattaaagtcctcataaaagtttgcaaggaatgcccagggaatctcacttcatagatcagaaactatagtctttttattataaaagccatgtaagtattttagagaaaatttggaaccttaaaattttttcattgtccaatcaaacagaacccctcttttgtgtcttggtatacttcttaaaatcttttttctttgtataatattttaatatatgagtatgtagttttatgtcttactttttcttaagtgtggctttagaataagcatttcccacattagaaatgctttataaaaattattcttagggctgggcatggtggctcacgcctgtaatcccagcactttgggaggctgaggtgggtggatcttgaggtcaggagatcgagaccatcctggctaacattggtgaaaccccgtctctactaaaaatacaaaaaaatttagccaggcatggtggtgggcgcctgtagtcccagctactcgggaggctgagacaggagaatggcgtgaatgcaggaggtggagcttgcagtgagctgagatcacgccactgcactccaggctgggcaacagagcgagactctgcctcaaaaaaaaaaaaaattattcttactaactacataggattcagtgagtggagatatatatatatatawaaaattttttttaatttatgaggtttaattggttcatggttttgcaagcctgtacaaggatggtgccatcaaggagcttttatacatgatagaaggtgaagcaggtgcaggcatgtcacagggtgagagcaggagcaagagaaagaaggggggcagtgccacacacttttaaacaactagatattggaagaactcactcactaccatgtggacagcaccaatccatgagggatctgcccccatgactcaaatatctcccatcaggccctgcctccaacactggggattgcatttcaacatgagatttgggtgggacaaatatcagagtcatatcattctgccgctagtccctcaagtctcatgtccttcttacatttcaaaatacaattatttcttctcagtagtcccccaaagtcttaactcattgcagcattaattcaaaggtccaaagtctcatctggagataagttccttccacctatgagcctgtaaaatcaaagacaagttatttacttccaagatacaatggggatacaggcattgagttaacattcacattccaaaagggagaaatttgccaaaagaaaggggctacaggccccatgcaagtctgaaacccagcagggcagtcattaaatcttaaagctccaaaacaatccttgactccatgtcccacattctgggtacactgatataaagggaggggttcccaaagccttgggcagctctgcccctgtggcttttccacgctgaggttgcatgctgctggtggctctaccattcgggggtctggagagcagtgggtgctagyttactttacaaaaagctttaagaataatggtagtttgccagtgatgtaatttataatattagcatcggcatatactccagtggcatagtttgtccgtgtctattagtctgttctcaaactgctgctataaagaactgcccaagattgggtagtttataaaggaaagaggtttaattgactcacagttccacagggctcgggaggcctcaggaaacttacagtcatgatggcagggaaagcaaacacatccttcttcacaaggtggcaggaagaagtgccaagcaaaagaggaaaagccccttataaaaccatcagatcttgtgagagctcactcactatcatgagaacagcatggaggtaaccactcccattattcaattacctcccactgggtccctcccacaacacatggggattatgggaactacagttcaaggtgagatttgggtggggacacagccaaaccatatcattctgcccctggcccctcccaaatcacaggtcttcacatttcaaaacacaagtatgtgtgtccaatagtcccccaaagtcttagatcattccagtattaacccagaagtccaagtccagagtctcatctgagataaggcaagtcccttccacctatgagcctgtaaaatcgaaagcaagttagttacttcctagatacaatggggggtacaggcattgggtaaatacacccattccaaaggggagaaattggccaaaacaaaggggctacaggccccatgcaagtccagaatccagtggggcagtcagatcttaaggctctgaaatgatctcctttgattccatgtctcacatccaggtcatgttgatgcaggaggtgggctcccacggccttgagcagctctgcctctgtggctttggagggtacggcttcacccctggctgctttcatgggctgatgttgagtgtctacagcttttccaggtgtatggtgcaagctataggtggatctaccattctggggtctggaggatggtggccttctcacagctctactaggcagtgctccagtgaggactctgtgtgggcgctccgaccccacatttgccttccatactgccctagtagaggttctccatgagagctgtacccctgtagcaaacttctgcgtggacatccaggtgttgccatacatcctctgaaatctaggtggaggttcccaaacctcaattccagacttctgtgcacctgcaggctcagcaccacatggcggctgctgaggttttgggcttgcacgcttcgaagcctcagcctgagctgtataccttggctccttttattcatgactggagctgaagcagctgggactcagggcaccatgtcctgaggctgcacagagcaggaaggccctgggcccatgaaaccatttttccctcctatgccttcgaggcgctgctgtgaaggtctgtgacatgccctggagacgttttccccattgtcttggtgattaatgttaggctctttgttacttatgcaaatttctgcaggtggcttgaatttctccccagaaaatgagtttttgttttctattgcatcatcatgctgcagattttctaaacttttatgctctgcttcctcttgaatgctttgccgcttagaaatgtcctctgccagataccctaaatcatctctctcaagttcaaagttccacagatctctctagagtaggggcaaaatgccaccagtctctttgctaaagcatggcaagaatcacctttatataagtttccaacaagttcctcatctccatctgagaccatttcagcctgtacttcattgtccataccactatcagcattttggtcaaaggcattcaacaggtctctaggaagttccaaactttaccacagtttcctgtcttcttcttagccctctaaactgttccaacctctgcctgttacccattttcaaagttgcttccacatttttgggtatccttatagcagcatcccactctatcagtaccaatttactatattagtctgttctcacgttgctataaagaactgcctgagactgggtagtttataaaggaaagagatttaattgattcacagttccacagggctggggaggcctcaggaacttayaatcatggtggaaggagttgcaaacatgtccttcttcacatggtggcaggaaggagaagtgcagagcaaaagaggaaaagccccttataaaaccatcagatcttgtgagaactcatgagaatagcacggaggtaaccacccctgtgattcagttacctgccaccaagtccctcccatgatatgtgtgagttatgggaactacaattcaagatgagatttgggtgaggacaccaccaaaccatattatcatggtaccatctaaactttccattttttcttccatttccagattgccatcacgaaagccaaagtggatttctccagtgtggtgtgcctgcccccttccgtcattgctgtgaatgggctggacggaggaggggccggcgaaaatgatgatgaaccagtgctcgtgtccttatctgcggcacccagtccccagagtgaagctgttgccaatgaactgcaggagctctccttgcagcccgagctgaccctaggcctccaccctggcaggaatcccaatttgcctccacttagtgagcggaagaatggtgagtagatacagaattattgcattccctgatttgaaccaggatcttcatgtttataatgttacagattcttactttatttgatgttccgtgaaagttcctaataatcttaacatttcttgtaaaatagatagctgtaagttaaagtgatcattgtaagtccaacatttcctgcctggattattataatttctttctaatttctctgcttccctcaccctattccttccataaattcattaattcagcatatatattcattaatatcaatgtattataaactatgctaaaattagggattaaatggtaaacaagcctctgtcattaggaaacatactctatcgtatagccttgtcagagtaatcttttaggacttcctagcttaaaagttttcagtgattgccttgtgggatgaaacaaaaaccaaataaatgtcttgccgggtgtagtgacttaggcctgtaattccagcactttggtaggccgaggtgcacagatcacctcaggtcaggagttaagagaccagcctggccaacatggtgaaaccctgtctgtgctaaaactacaaaaattagctgggcttggtggcacacacttgtagacccagctactggggagtctgaggtgggaggatcgattgaactaggaggcrgaggttgcagtgaaccgagattgtgccacagctctccagcctggacgacagaatgagactctatctcaaataaacaaacaaacaaacaaataataaataagtgaataaatttcttggcatgttttataaggctttgcagaatctggtctctttcttttaacatcttctcttattcccctattcctagtatttgttccagcccattaaactgtgttaagtactgtttaaaaaccatgtactcatacctcaacctttttttaattaaaaaaatctataatttgttatggaatatttaagatttgagaaaatgtataaagaggctgggcacggtgactcatgcctttgggaggccgaggcgggcggatctcctgaggtcgggagttcgagaccagcctgaccagcatggagaaaccccgtctttactaaagatacaaaattagccaggcatggtggcacatgcttgtaatcccagctactagggaggctgaggcaggrgaactgcttgaacctgggaggcagaggttgcggtgagccgagatcgcgccactgcactccagcctgggcaacaagagcaaaattccgtctcaaaaaaaaaaaaaaaagaaaaaagaaaaaatggataaagaacaatatagaaaattgtgtgttcaaataccacccaacttatgtactttgcgtaaatcttcattacccctggaggaaactactaacttgaatttggtatttcattgccaaatatgtctgtattatttacccatgtgaatatattcttaagcaatatataatgttgtttctcatgttttaaacctatatatgagagaaaattatgtgttcttcagtaatttgttgttcagtattcattttccttgtaagttaaagatattctgtattttcttctaattcaagctgttaatccccacttagtgaatagttctactttttcctactgatctttaatgcctgctgtattctgtctgtgcatgagttagtttttaggctctcttttctttgactggtctctctgtccatctctgtgtcagtactaccttattttagttattgcctaataattagtctttctgtctgttaggacacgtatctccttacctttttctttttcaaagttgtcttggctattacccttttaatttkccatgattttagaattgccttaccaagttctgccaacaaaaaaaccctttgggatttttacctccaacattttattatgaaaaaatttaaacgtaaagtagaaagaaaaaaaaaaagaagtaggaagaactttacagtgaatacctgcgtgcccatctcttagattctacctgtaacattttataaaacttgctttataacacagatatctatcaatctcatctttaaatttaatttttttttttttgcaacagagtctcactctgttgcccaggctggagtgcagtgatgcgaccttggctcactgcagcctccgtctcccgggttcaagcaattctcttgcctcagccacccgagtagctgggattacaggcatgtgccaccatgaatggctaatttttgtatttttagtgacagggtttcaccatgttgaccaggctgatctcaaactcctggcctcaggtgatctgccctccttggccccccaaagtgctgggattataggcgtgagccaccacacctagccctcaatctaatttttttgatgtatcttgaagtaaattgcagacactagtactcctgttatggaagtataacataaatacaaaataacccacaacttataagtgttgttattatcacaaagtgagtacacctgttagtaactactgcttagtgaggaaatactagtagtccagaactttccccaccttgtgcttcttcccaatcaatactcccttccccttgctcaaaggaaactaccatcctgattttcaacactgtggttagtttttaaaccttataaaaatggagtcatacagtgtgtattctgttggtggtttctttttgtttttgaaatttgtttatgttgaattgtgtgtgctagagtttattttcattgctgtataatcagttcattgtatgaataaaatgcaatttatttttccattttactgttcctggatgtttaggttgtttcactttggggctattatgaattatgctgctatggaattcttgtatgtgtcttttggtatactcgctgggatttttatttgaaatatgttgtttataggtaagtggggagaatgtaatcccagcatgttgggagactgacatttgaggattgcctgagcccaggagtttgagattatagtgagctatgattgcaccactacactccagcctgggagacatagcgagaccctgtctcttaaaaaaaacaaacaraaacagtgggtgggaaaatacacatttttaaatattgagtcttcctatccattactttgttttatctcttcaattaaataggttttctttaatgtcttacagagttttgtgaatgtgtccagaaaagtcatacaaatattagttttgttcctggatataattttttttttttttgtagatgtaagtggtatatatatatttttgagacagagtctcactctgttgccaggctggagtgcagtggcgcgatcttgactcactgcaacctccgcctcccaggttcaagtaattctcctgcctcagcctcctgagtagctgggactacaggtgcgcaacaccacgcccaggtaatttttgtatttttagtagagatggggtttcaccatgttggccaggatggtgtcttgatgatctcttgaccttgtgatccgcccgccttggcctcccaaagtgctgggattacagatgtgagccaccaggcccggccttaaatggtatatttttatacaatattttctgtcccatgctggtgtaaataaatgtcaaggcttttcaaaacccctatttcttttctacgtctgtgtcctccatttgggatacgctttctctctctcactcttcttgaagcctttcctaactcatatttagtgttagatgcccctcttttggttttcccagttcccaattttttttttttttttttttttgagacggagtcttgctctgtcacccaggctggagttctgtggcgtgatctcggctcacggcaagctctgcctccctggttcaagtgattcttgtgcctcagcctcctgagtagctgggattacagacatgcgccaccatgcccggataatttttgtatttttagtagagacgggatttcaccatgttggccaggcaggtctcgaactcctgacttcaagtgatcccctctgcccctggcctcagcctcccacagtgctgagattacaggcatgagccactgtgccctgttgccctttatcaacctacttcatcaccctatattgtaattggaattctttactcagcaatgagtgagcctttgaaaactgaaatcagacactgctacgctactctcaaaactcttcaatgctttcctgtgaggcttatgatgaaatcatagtacttatgatgtggccttggtattctctctgacatcatttctttttcttttttttttttttttttgggagacagtctcgccctgtcacccaggctggaatgcagtggtatgatctcagctcacggcaacctctgcctccagggttcaagtgattctcattcctgagctaccgagtagctgggattacaggcgtacgccaccacgccagactgatttttaaattatttttattagagatggggtttcaccatattggccaggctggtcttgaactcctaacctcaagttattcgtccaccttgtcctccaaaatgctgagattacagacgtgagccaccatgcccagcctctctctcacatcatttcttacccttatcccttagctcccaggcacactgacttcttgctatttcttgaacacatcaaacctattcctatcccagggccttgtacttgctgtgctttcattgaagttcctgcacaaatgtcatttcctcagggaggccttccctgcttgtcttctctaaaatagcacctcctgttactcttgatcctgctttttcttcaaagcccttattattatctgtcattgtgtgtgtgtgtatatgtgtgtgtttgtgtttattgtctattttctcctctttaatagttatttcctgagggcagaaactttattttgttcactggcatatacccaactcctggatcataataggcactcaataaatatttatttattttattttattttatatatattttttgagatggagtctcactctgtcgcccaggctggagtgcagtggcacagtctcggctcactgcaagctccgcctcctgggttcacaccattctcctgcctcagcctcccgagtagctgggactacaggtgcctaccaccacgccaggctaattttttgtatttttagtaaaaacagggtttcaccgtgttagccaggatggtctcgatctcctgaccttgtgatcctcccgcctcggcctcccaaagtgctgggattacaggcgtgatccaccgcgcctggcaataaatatttattgaatgaatcaatgaatggtttacatgtttgttccactacaggtaagaactctgttttctcagtggagtagaaggcagctgttgctgttggacccaaggtgtttgtgtatcttcggcctttttctctgaagtgtttccacttagcatataaattaactgaaatctttcccagcaactctaactttcccttagtgtttaagctcctgaaagaatagtttacagtcattgctttctctactttctcatatcccagagactcaactgctttatggcttctgtcactacctgtcttcagaaactgccattgccacagtaatttgtgttctttttgttgcagatcaaataagccctctttagtctttatgctacttgacctctttgcatcatttgacatggttggcttctccctcagacttgaaacttttcctccacggatatctacgacttacctttttccggctttttaaactctacctttccagcgactccctttgccattcagagcttttgctatctttctctgcctacctcttaaattttgttactctccagcattcagctctggaggaaagaggctggtaagaagattgttgtattttacagtaggtttttgcatggtcatttgtttgggaggtaatgataggagcagaaatgaaaaatctttgagaagattgtgaaattggaaagtgtggagttctagaacagaataaattctagagttagaggaggtgctttttcatgaatgggtgtaccgtgtgttgagagagtggagtgagaaatgtacttctttgatctgtttcacatagaagcatgtatcatatagaaattcagtggtggccgggtacggcggctcacgcctgtaatcccagcactttgggaggccgaggtgggtggaacacttgaggtcaggagctcaagaccagcctggccaacatggtgaaacccctcctctactaaaaaattagctgggcgtgatggcgggtgcctgtaatcccagctacttgggaggctgaggcaggagaatcgcttgaactggggagagggaggttgcagtgagctgagatcacaccactacactccagcctgggtgacaagagcaagactccatgtcaaaaaaaaagaaaaaaatggccgggcgtggtggctcacgcctgtaatcccagcactttgggaggccgaggtgggtggatcgcctgaggtcaggagtttgagaccagcctggccaacatggtgaaaccccgtctctaataaaaatacaaagattagccgggcgtggtggcaggcgcctgtaatcccagctccttgggaggctgaggcgggagaattgcttgaacccaggaggcggaggttgcagtgagccgggagatagcgccactgcactccagcctggggaacaagagcaagacttcatctcaaaaaaaaaaaaaaggaattcagtgggttagcagaggtacctgtggggcagtaggcagtcaaggtcccgacaccttcatttcctaaacagaacttggagccttaaagagaggaggtgcctttggctaacccaatctttactggcctaattgtaaaacgttgataaaaactttcaaggtatattttaaaatattactcctctgtcttctaggctgagaacttaggtctaaaagataaagttgatctgcttgtggatcctatctagccagggcttggagaagcctggaaacatctgtctaatgaactaagcccttaggcttcagctcaaggagttctggcatccattgaatcagtatatcataatggaaagtgatttcttttactaattatatataccagttattttatatatataccaatgattttatgtatatatataaaattggtaaaagaaatcactttccgttattttatgtgtatatatatatatttattttatttatttatttatttatttatttttcaagacagtgtcatgctctgttgcctaggctggaggatagtgctcactgcggcctcaatctcctgggctcaaatattcctcctgcctcaccctcctgagtagttgggactacaggagtgtgccaccatgcctggctcagtttttatattttgtatagacagagtcttgctatgtagcccatgctggccctggcctgtatttcctcttttgtgaagtggcaagttaagtcttttgcctactctttctattgtattggtttttttctttaataagagttctttaaatatccggaatactagtttgttgttgcttaagtgtattgcagacatcttctcccactttggggtttgtctttttctttctctttatcctgtcttttgattaagaatctctaaatttagctgggtgtagtgtctcatgcctataatcccagtgcttggggaggccaaggcgggaggatggcttgaggccaggagttcaagaccaacctaggcaacatagcaagaccccctctctcaaaaaaatgagctgggcatggtggctcatgcctgtagtcccacctactcaggaggctgaggcagaaggatcacttgagcccaggagttcaaggttacaatgaactataatcatgccactgtactctagcctgggtgacagagcaagaccccatctcaaaacaaacaaacaaaacacaaaaagaatttctaaatttaatgtaatttatatgagtcttttatagtttatgagttttgtgtcttgtgtttctggaaataatttttcatatgggaataaggtaagacacaagttaattttttttcaagtggattccgtttattgaaaatactcttctttccccactaatcaacagagctacgtctttcatatatcaaggacttagctatgtgggtatgtttctgagcttgctatttggttccattgggctatttgtgtattcctgccctcacagttttaattacgataactgtaataagccctgttgtatgggagaagtaagtcctyccaccttgttcttgttcaagagtttcattcttgtctgttcttggtcatttgcatttccatataaaattactcaggattttgattggaattgcattgcatctatgaaccaacttaggaagaactgatatttttataatattatactgtaaatacatattttccacatttatttagatcttttgtaaggcctcccaatgggttttwaaaatttttctctgtgatgatcttacacatctttagttagatttgtttttagacactttgtgtgttttaatgagattgtaaatgttgccttttacaaaaattttattttctaaatgttgttgttgatctcagatattgttctgagagatgtaaaggtgcagttctatgtgtgtctgtaatctgaggtgctggataggattggaagagctatgtaaagaaaagtaagcaggaaaatgggagtgaaaagggcctttcctctttcacagtggtttttctcctcctttatgtaagatttaagaagtaccagtttgttttcacatgtgcagcctgtggaataaaggacagatcatgtatttttttctgtaagggtacgaactgtatcctttcatgccacaatgttgcacaagaggttctaattaattgctgggagaagtaaaaattttgagtgggcagtttctgatccaaattacagtatttcttggggaaaggaaagagttttgttaattatattcctcagaaagcatggttttcaaggattttctagattaggtcgcccagttgaaaatcctccaatcttaggcatgtcaattgattaaatgattctgtttataatgtgacttagagaatttcatgacctacttcattccagtacttagagataatcaatttctcattcttacttattcatcacatgttatgctaggcccctggagaatagataccagatagagttcctgctctaacacaaaacaaaacaaaagcaaaagcccaaattctaatggatctcatctcccagagaaaatcactgttagtatatggtttatatccctctagtgttcttgcaaatgtgtgtttttaaaataactgagctaatactacagacccaattctgtgtcctgcttttttcatattactgaaatatttttataagtagccttttttaatggggtacataacattctgttctgtgccatcatttatttactttctccttagttggacaattgaatcattttctgtttttcacacttacattaatatttggataaatatcttttaaaatttttttgcatttcagattatttccttagaagtggaaatattggcttaaataatttgaccattttaatgttggaaaaattattctgtgattattaagatcttagcacttagcactgtgtgctaagtattggagagagagtaatgaacaagacagataaagttcttattgtcatggaacttctataattccatgaaagaaaaagactcaacaaagagttagatgagctaattcatggttacaaactttggtaattgctttttaaaaaaacaaaaacacaagatattataacagaataacagatctaatagtgagggttttcatgtagggaaggcttctttgaggaagagacatttaagcagagatccaaagcataagtagtggtttgacaaatgaaagaagtaatagcgtgtgtgaagacaggggtagggggtgggaggaggaggcagaggttattggggaaaattgtcacaaaggaactggaagagtaccagtatatcagtggagggagtttgggaggaagtgatgtgaaatgagtactttatttcagacataaagtatgaatgagccatgatcgtgccactgcactgcagcctgggcaacagagtgagaccctgtcttaaaataaataaataaaaatctttaaaaagtgagcttaaaatatagccatcacctaggctggatgcagtggctcacgcctgtaatcccagcgctttgggaggccgaggcaggctgattatgaggtcaggagttcaagaccatcctggccaacatggtgaaaccctgtctctactaaaaatacaaaaatttagctgggcgtggtggcaggcacctgtaatcccagctacttgggaggttgaggcaagagaatcgcttgaacccgggaggcggagattacagtgagccgagaccgcgccactrcactccagcctgggcaacagagcaagactgtctcaaaaacaaacaaacagaaaatacacacacacacacacagccatcagctatcctgggtctaaggaataatatacctgtggtaatgtgtgatcctcccaggtttacaggtcttgactcagtacttcatcagcaataggttgtggtcacaggaaatggaagctgcctcaggacctgtagcaacttgcctgcatgctgggttatgttatcttttgagtggtgcccaatacgaggtgtctaggggaaagtcttaagtggttggagcccatgacatttgggtatgatgactagattttttgtacagctgagcctcaataaactcatgcgtacacttgtgagaactcaaatcagaaatgggcacagaaactggattacatttctgtgctctgaaatcccacagagttcataaaaatacatttgttgcttttgtgtatacatgtgtaagttacattttattatggaaattgatattagtgaaattgacagctttctatggttaaagattatcctgtaggtgagccaaggttctctgtttttctgatttctcttattcattccctataatttcagcattttcgttctcattgacttaatattcctgagggtattattgtgaatgtctttgtttatgttaactccatacttcaatactttatgtagttttctaataacaccttcagtatgtgttctaatgaaaattttagcagagcacctgccctttctgggtaggtaattatttttttttgttatgaacttttcctatgccatttgaatttctgtgataaataagggcttttcattccacttggcacacatttatgaatgctgtcatgtatgtcagacactgagcaagatttgagaatgcagaggaattttttgtttgtatgtttttggtttttttttttttttttttttgagacagagtctcactctgtcacccaggctggagtgtagtggcaccatctcagctcactgcaaccttaacctcacgcattcaagcaattctgcctcagcctcccaagtagctgggattacaggcatatgccaccatgcctggctaatttttgtatttatagtagggatggggtttcaccatgttggtcaggttggtctcgaacccctgatccacccacctcagcctctcaaagtgctggaattacaggtttgagccaccgcgctgcctggctagaattaagccacgtggtaaagaacaataatggaggcaggcacaggtgctgggggagcctaaaggaggggtagttagcatatccatggaggctgtgagaaaggtggggagagtgccagggatcagagaaggctttatggagaaggcagcaccttaaactgaattttcaaagagaaataacaatcagttggtaacaaggatggtttttagtagaaacaaggccgaagaggaggagcacagtgctcaagtacacactaccacctgtgaaatactcctttcaaaaactttaacctgggctgggtgtggtggcttacatctgtaatcctaccactttgggaggctgaggcgggaggattgcctgagcccaggatttcaagagcagcctgggcaacatgatgacaacccccatctctacagaaattttaaatattagctgagtatggtggcatgtacctgcagtcccagctacttgggaggctgagatggggggatcgtttgagcctgggaggtcgaggctgcagtgagctgagatcactccactgtactcttgtctgggcaacagagtgagaccctgtctgggaaaaaaaaaaaaaaaaaaaagataaccgtgaaaatttgaacaccgattgtttaactgatattaaggaatttataaaatttaagtgtgaaaatattatagttacgttaagaaaatagttgtcgtcggctgggcgcggtggctcgtgcctgtaatcccagcactttgggaggccgaggcaggcggatcacgaggtcaagagatcgagaccatcctggccaacatggtgaaaaccctgtctttattaaaaatacaaaaattagccaggcgtggtggtgtgtgcctgtaatcccagctactcgggaggctgaggcaggagaatcgcttgaacccgggaggcggaggttgcagtgagccgagatcgtgccactgcactccagcctggctacagagaaagactgtctcaaacaaaaaacacaaaaattagccgggcatggtggtgggcgcccgtagtccagctacttgggaggctaaggcaggagaatcgcttgaacccaggaggtggaggttgcagtgagctgagattgtgccactgcactccagcctgggcgacagagcaagattctgtctcaaaaaaaaaaaaaaaaaattgttaataactgccaaaactgttaaacaacttaaaactaggctgggtgcagtggcttatgcctggattcccaacaygttgggaggccaaggctggtggatcacttgaggccaggagttcaagaccagcctgggccaacatggtgaaaccccatctcaactaaaaatatatataaaaattagccaggtgtggtggtgggcgactgtaatcccagctacttgggaggctgaggtatgagaatcacttgaacctgggaggcggaggttgcagtgagccgagattgtgccactgcattttagcctgagtggcagagtgagactttgtctcaaaaaaaaaaaaaaaaaaaaaaaaaaaggctgtgtatcctgcagtataatgtccctttagagtgaattaatagagactgtagatcatatcaaatttgtgttgattagctagttaggattagaagcaaaccttttgttctattggaaattaagatcattatctctcatttccttagtgctattaacttgaagtcatcttcatttgtgcagagcccttgttaaagtttactttagttctttttctatgaagtgttactaatttgcacaaaaaataatggaactgaagctttcacaggggttcagacttttagaattgtgaaatttattttaaagtctgttttcacaatgaatgttgctgtgctaatactcttgagagtaaatgcaaaatcttagcaattgggaaagattacattgcttcttgtttaatttttttttttaatttatttttttattgataattcttgggtgtttctcacagagggggatttggcagggtcatgggacaatagtggagggaaggtcagcagataaacaagtgaacaaaggtctctggttttcctaggcagaggaccctgcggccttctgcagtgtttgtgtccctgattgcttgagattagggattggtgatgactcttaacgagcatgctgccttcaagcatctgtttaacaaagcacatcttgcaccgcccttaatccatttaacactgagtggacacagcacatgtttcagagagcacagggttgggggtaaggtcacagatcaacaggatcccaaggcagaggaatttttcttagtgcagaacaaaatgaaaagtctcccatgtctacttctttctacacagacacggcaaccatccgatttctcaatcttttccccacctttcccgcctttctattccacaaagccgccattgtcatcctggcccgttctcaatgagctgttgggcacacctnnnnnnnnnnnnnnnnnnnnnnnnnnnnnnnnnnnnnnnnnnnnnnnnnnnnnnnnnnnnnnnnnnnnnnnnnnnnnnnnnnnnnnnnnnnnnnnnnnnnnnnnnnnnnnnnnnnnnnnnnnnnnnnnnnnnnnnnnnnnnnnnnnnnnnnnnnnnnnnnnnnnnnnnnnnnnnnnnnnnnnnnnnnnnnnnnnnnnnnnnnnnnnnnnnnnnnnnnnnnnnnnnnnnnnnnnnnnnnnnnnnnnnnnnnnnnnnnnnnnnnnnnnnnnnnnnnnnnnnnnnnnnnnnnnnnnnnnnnnnnnnnnnnnnnnnnnnnnnnnnnnnnnnnnnnnnnnnnnnnnnnnnnnnnnnnnnnnnnnnnnnnnnnnnnnnnnnnnnnnnnnnnnnnnnnnnnnnnnnnnnnnnnnnnnnnnnnnnnnnnnnnnnnnnnnnnnnnnnnnnnnnnnnnnnnnnnnnnnnnnnnnnnnnnnnnnnnnnnnnnnnnnnnnnnnnnnnnnnnnnnnnnnnnnnnnnnnnnnnnnnnnnnnnnnnnnnnnnnnnnnnnnnnnnnnnnnnnnnnnnnnnnnnnnnnnnnnnnnnnnnnnnnnnnnnnnnnnnnnnnnnnnnnnnnnnnnnnnnnnnnnnnnnnnnnnnnnnnnnnnnnnnnnnnnnnnnnnnnnnnnnnnnnnnnnnnnnnnnnnnnnnnnnnnnnnnnnnnnnnnnnnnnnnnnnnnnnnnnnnnnnnnnnnnnnnnnnnnnnnnnnnnnnnnnnnnnnnnnnnnnnnnnnnnnnnnnnnnnnnnnnnnnnnnnnnnnnnnnnnnnnnnnnnnnnnnnnnnnnnnnnnnnnnnnnnnnnnnnnnnnnnnnnnnnnnnnnnnnnnnnnnnnnnnnnnnnnnnnnnnnnnnnnnnnnnnnnnnnnnnnnnnnnnnnnnnnnnnnnnnnnnnnnnnnnnnnnnnnnnnnnnnnnnnnnnnnnnnnnnnnnnnnnnnnnnnnnnnnnnnnnnnnnnnnnnnnnnnnnnnnnnnnnnnnnnnnnnnnnnnnnnnnnnnnnnnnnnnnnnnnnnnnnnnnnnnnnnnnnnnnnnnnnnnnnnnnnnnnnnnnnnnnnnnnnnnnnnnnnnnnnnnnnnnnnnnnnnnnnnnnnnnnnnnnnnnnnnnnnnnnnnnnnnnnnnnnnnnnnnnnnnnnnnnnnnnnnnnnnnnnnnnnnnnnnnnnnnnnnnnnnnnnnnnnnnnnnnnnnnnnnnnnnnnnnnnnnnnnnnnnnnnnnnnnnnnnnnnnnnnnnnnnnnnnnnnnnnnnnnnnnnnnnnnnnnnnnnnnnnnnnnnnnnnnnnnnnnnnnnnnnnnnnnnnnnnnnnnnnnnnnnnnnnnnnnnnnnnnnnnnnnnnnnnnnnnnnnnnnnnnnnnnnnnnnnnnnnnnnnnnnnnnnnnnnnnnnnnnnnnnnnnnnnnnnnnnnnnnnnnnnnnnnnnnnnnnnnnnnnnnnnnnnnnnnnnnnnnnnnnnnnnnnnnnnnnnnnnnnnnnnnnnnnnnnnnnnnnnnnnnnnnnnnnnnnnnnnnnnnnnnnnnnnnnnnnnnnnnnnnnnnnnnnnnnnnnnnnnnnnnnnnnnnnnnnnnnnnnnnnnnnnnnnnnnnnnnnnnnnnnnnnnnnnnnnnnnnnnnnnnnnnnnnnnnnnnnnnnnnnnnnnnnnnnnnnnnnnnnnnnnnnnnnnnnnnnnnnnnnnnnnnnnnnnnnnnnnnnnnnnnnnnnnnnnnnnnnnnnnnnnnnnnnnnnnnnnnnnnnnnnnnnnnnnnnnnnnnnnnnnnnnnnnnnnnnnnnnnnnnnnnnnnnnnnnnnnnnnnnnnnnnnnnnnnnnnnnnnnnnnnnnnnnnnnnnnnnnnnnnnnnnnnnnnnnnnnnnnnnnnnnnnnnnnnnnnnnnnnnnnnnnnnnnnnnnnnnnnnnnnnnnnnnnnnnnnnnnnnnnnnnnnnnnnnnnnnnnnnnnnnnnnnnnnnnnnnnnnnnnnnnnnnnnnnnnnnnnnnnnnnnnnnnnnnnnnnnnnnnnnnnnnnnnnnnnnnnnnnnnnnnnnnnnnnnnnnnnnnnnnnnnnnnnnnnnnnnnnnnnnnnnnnnnnnnnnnnnnnnnnnnnnnnnnnnnnnnnnnnnnnnnnnnnnnnnnnnnnnnnnnnnnnnnnnnnnnnnnnnnnnnnnnnnnnnnnnnnnnnnnnnnnnnnnnnnnnnnnnnnnnnnnnnnnnnnnnnnnnnnnnnnnnnnnnnnnnnnnnnnnnnnnnnnnnnnnnnnnnnnnnnnnnnnnnnnnnnnnnnnnnnnnnnnnnnnnnnnnnnnnnnnnnnnnnnnnnnnnnnnnnnnnnnnnnnnnnnnnnnnnnnnnnnnnnnnnnnnnnnnnnnnnnnnnnnnnnnnnnnnnnnnnnnnnnnnnnnnnnnnnnnnnnnnnnnnnnnnnnnnnnnnnnnnnnnnnnnnnnnnnnnnnnnnnnnnnnnnnnnnnnnnnnnnnnnnnnnnnnnnnnnnnnnnnnnnnnnnnnnnnnnnnnnnnnnnnnnnnnnnnnnnnnnnnnnnnnnnnnnnnnnnnnnnnnnnnnnnnnnnnnnnnnnnnnnnnnnnnnnnnnnnnnnnnnnnnnnnnnnnnnnnnnnnnnnnnnnnnnnnnnnnnnnnnnnnnnnnnnnnnnnnnnnnnnnnnnnnnnnnnnnnnnnnnnnnnnnnnnnnnnnnnnnnnnnnnnnnnnnnnnnnnnnnnnnnnnnnnnnnnnnnnnnnnnnnnnnnnnnnnnnnnnnnnnnnnnnnnnnnnnnnnnnnnnnnnnnnnnnnnnnnnnnnnnnnnnnnnnnnnnnnnnnnnnnnnnnnnnnnnnnnnnnnnnnnnnnnnnnnnnnnnnnnnnnnnnnnnnnnnnnnnnnnnnnnnnnnnnnnnnnnnnnnnnnnnnnnnnnnnnnnnnnnnnnnnnnnnnnnnnnnnnnnnnnnnnnnnnnnnnnnnnnnnnnnnnnnnnnnnnnnnnnnnnnnnnnnnnnnnnnnnnnnnnnnnnnnnnnnnnnnnnnnnntcctagatgggatggcgggccgggcggagacgctcctcactttccagactgggcagccaggcagaggggctcctcacatcccagacgatggacggccaggcagagacactcctcacttcccagacggggtggcgggccgggcagaggctgcaatctcggcactttgggaggccaaggcaggcggctgctccttgccctcgggccccgcggggcccgtccgctcctccagccgctgcctcccgggcggcgctcgccggcgcsgcggcaaagactgagacagctccgctgcccgctgaactccatcctcccggcggtcgggcggcggcggctkcggcccatttatttatttattgagacagggtcttgctctgttgcccaggctggagtttagtggggtgatcacagctcactgtagcctggaactcctgggcccaagtgatcctcctgcctcaacctcccaagtagctgggactacagacaggcatcaccatacctggctttttttctttttcttttttttttttttggtagagatggggtcttgccatgttgcccaacctggtctctaacttctagtttcaacccaccctcccgtttggcctacgaaagtaagtgcttcttgtttaattttttaaagattactgtttaaaaaattgtttttcttttatttaggtctttttacctcaaagtgccagtgagatagtgggtgtggaattgctaagaaaaagtcaaatcaactgagatgttatgtttatttgttattcctatcacatgactctcaatatctcctgtggtgctggagtattgacactgtggcattacatgctctcttctatggcgaacagttttggcaggagggagacagccagccctctgcccttcctaccatcttctgtgcaggaatcttaaagtttatatttattttcctgtaaataccgaactgtgaaaacttgtttcatttgaaaaccctcattactagagagacaaagtaaatttaacaaagaccaggtgtggtggttcaggcctgtaatcccaacactttgggtagctgaggcagggggatcacttgagcttaggagttcgagaccagcctgggcaacatggtgaaaccccatctttactaaaaatacaaaagttagctgggtgtggtggcatatgcctgtagtcccagctacttgggaggctgaggtaggaggatcgcttgaacttgggaggttgaggctgcagtgacctgagatcatgccattgtactcagtctgggggacagagtgagacctagtctcaaaaaaaaaaaaaaaaaaaaaaaagaaaaaacctctcacacagcaaattatacagcccacataaggaccaaggaatgactcaatcttctcaaccttttagggatgcttttcccttagttgctaacctttgaccagactgtcatgtagactcaaagttgaaatttacccgtttttcctaagtcagtttgaaaatttggttgccagaaggggccagtgagatgcttctgctttcccagagcagcatttagcccacactggctgctactcattgcctgttgagtcattcccacagttctatatagagcttttctggcttttcttttaaacatgatgttcttggagtgagaaaggaaggaagtttttctctcttgtactgagtctccctcaccccaaatttgcattgcttctctttactaataacaaaatattgccttcagtcattctgagactattttctctcttaaggtctcctactgcttttatttaccatttgtttactatgtaagcattaaggtattcgctgggctattggcagcagccagctttcacatacaggctgatagttaacgagaaagattgaagaattctagataaacacaccaaacatggattcttagtttccaactttaaaaaattcagtcagatagactgaaagtaatcttaatatcattgttatgaatatcagttaatgaaaggtgctgtggggagcagtggctcatgcctgtaatcccagcactttgtgaggctaaggtgggcagatcgcttgagcctaggagtttgagaccagctactcaggaggctgaggtgggaggagcacttgagcctggaaggtcgaggttgcagtaagccacatttgcaccactgcattccagtctgggcaacggagtgagaccctgtctcaaacatacaaaaaaagtaaatgaaatcaaataacatcagtatactgtctattcacagaccgtatgtctaatataggcacaagtaagaggctcttttaggggactgacagatctgaaagacagattacagctctggaatgtattcagatgactttttgaaacagatattttaattggagtgggggtggagaaatagttgagcttctgtagttaaatgttcaacttccttagcctgttatctataaataccacatataaaaaagccrttggaattctttttcagaaaatttatggagcttacattttgtatatatgtgtttatatgtgtttaatcttcttccccacctctcatcaatgggtcagtaattggactgcttctttcatgagcttgagttgtttggattgtgtttaatctgttccactaaactgcattaacagcagtctcttatagtgggattttgaacaaaacctcatcttctcttcttgagaggaaaaaagcagttgatctgttttctgaaagtctctttatatatgtctctcccctcccccagagacgaatagcaaggggaggagcttgctcactgttctaaccacacttagtatgtcttaactggagagctttttggtttcctgtcggcagtaattcaaatctgtgtcatcttgactcgcctgaagggtggataaattggtaactgcactgagaaggggatattctcacagtctgatttgagcataaggcatcagattgaatttgtgaaagctttcaagacagcttttctcctgtgactttgactttcttcattatatttgtggatttttgtttctggaagaatccgtcatgactctactggaacctgagatgttaatgatggcagtacagtcaggtaattcacataaatcctaatttcctaacttgctaataatttcctacaaatcttatttgccacaggcttctttaaaaaaaatgggtcatatttgtactaggagtggacagaaatggggaggaagaaatgtactgcattttcagttttttattaatttttctctcattgcaaattctagttattctgacagctttgaattagatggttactggttttaagattattcagttgcggagacctgtttgagaaaaaaaactctttgtcttctttaatcaagtgttgtattgtctgtggcactgttttaaatgaaagacaattaaattgctttgctgttttatacattgttgtctttaatcactagtctagactctatgtttttatgaaagcatctttaaattttttttcttagctgttctttcttgtttgtggtataacctttctgtaccatcttttggttctgtggaaatgcccttaataacacataggattaggactaaattttggagatgggtaagtttgagcaaagagtcagtcaacacaggggaggatttttgaaattttatctctaaaaacagttttccaattcagagtttttaaaacccttttaaaaatatagttagttttcagtggtttcttttacttttagtgtttttacacttggaagtcagatatctaaaaatagggaatgttcttttgctatttttagatctctactaaaatgtaatctgtagtgttttcttgtttcagagcatatcttaaaagattcagacaagtggcatttggggacctcttccccatccactggctttcactcaaaggaaaataagacttcttggttctggcagatactgtctctggcagaattggtctcactgttttccttggggagcattttaggtagtatgttgaaagacagatatacatcagttgaagacaggatcagatgctatctggttaataaagcttatgatcagggaaggggcaaagaagacagataccactaccattttgttctttctggttttactaatatgaccataatgagtcattttttatgcatataggctatgkgtttcaggttgcctttccttttcctcctacagatctattgagctttgtgttctaaacaagatagtgtgcttatctgaatgtttcccatctgtctttgatgaaaaagctcccagttaaactaatttggatttatttatttttcctgtctattccagttctctgctatgtgtgggcaagtgcctgttttatcttgaggggtagattttagcatttgaactctctccctttttaaaatcaccttgttacttacagatcatctcagtccagtaacttttctttataaaggttaaaagattgtttgctttcttctcaggtagtctcagtgttctcagccttgagagggaaagggacatacttaatattttcttgtcttgcttgctaagagctgtttttccttcgtcatgtgttgggcagggctagccacccatctgttggaccagctacttcataaaactttcaaaggatgatagtaggtgaaatgaaattgacaagagtgttggatgcaggtagaatgaagggtctgctgtagcgtgtatgtggacttctttcttttgtttatgttcgtaaaagtggagagactctggatatagaaagggtaatagcaaactgatatctccagtacctgtctcctatatgatcaaaaacattaacaatgtgttggttttgtaaaattgctactgttttgttctgaagtgctgtagccattagctggattgtaacagtaatatgacagctgtatagtaaaatactgtctctctttatgataggaaatgaaaaagcatctgttatgaagcctcagtgaactaaaagccattctctgaaaagtcaagacttttgggctttatcagtagataaacatgagccataggttttctagcaatagaatattttaacctatatgaatatatgctttataggtgagactgctatttaatgagagttttaaagtaactaaaccttgttgacagaattcaggatggaaagttttaccctaaataaaacttcaggatattgaatatgatagcaaagttccagggtatgttttatatttatgaacaattttcatttgaatatttggagcttgggggttttggtgagacatgttcatgtatgttatatacaaactttcaggcctggcatggtggctcacacctgtaatcccaacacttcaggaggctgaggcaggaggatcgcttaagcccaagagttcaagacccatctctacaaaaaattaaaaaaaaaaaaaaaaaaaaaaagccaggtatgatggtgcccacctgtagtcagagctacttgggaagctgaggtgggaggatcgattgagcccaggaggtcgaggctgcaacaagctatgatcatgccattctactccaactggggcgacagarcaagattctgtctcaaaaaataaaactttcatcctcctcactgctggtggtctcttactggtcctttggaaccagccagatgtatatgtcttcctaattagattattagcttctcaagggcaatatattaatctatatattggcttctgatactggcacatggtacttagtatttttgaatgaatgagagtgatgaaatttggattgtcatactttccctgataagtataagcttttaaatcaagattttatcgaagtattttgagatctgttcttatattaagaaatgaatcttctacccaccatcctgtattttagccaatccttgtccaaagcagatgttgttgaaaaatagctttcaaagttggaattcttctgcatctcagaatgtgcagtatgtcatgtctgcctgtgatgtttattgctgaatctaagtgttctaatcaaaccacagttagagcttttctcactactatggaaacatatctgaatcattttgtttagataattaatgatctaagatggacattatggggccgggcgcggtggcgcacgcctgtaatcccagcactttaggaagccgaggcaggtggatcatttgaggtcaggagttcaagacaagcctggccaacatggtgaaaccccatctctactaaaaatacagaaattagccaggtgtggtggtgcatgtctgtagtcccagctacttggggggctgaggcaggagaattgcttgaacctgggaggcagaggctgcagtgagctgagattgtgccactgcactccagcctgggcgacagagcgagaccctgcctcaaaacaaaaacaaaaacaacaaaacaaataagatggacattatggaatttcagaagctaagtcttagggaatattggggcatggtactgactctggtgtgttttagaatggagaaatgctaggacttggctcttgacagctaatgtgtaaggctttgactagacaggccctaaggtgtatccatctagtgcagtcctcttagttataacaacagcaggacagaattcacttgtagagaaaacagttgagacagttccttaggtatgctttggtcccacgacataaatctgatcttaatgaggcatagttagggagtcactttgttttttctctctctgtcttgtgcatgtatgtatgcacacccacacatttgtccatgcacaggatgtctctggaaggaccacagaagctggtaaccctggctgcctcaataaaggggaatagagaactgggggactggggtggaagagactttttgttgttatgattattagagtactccataaatgccaaagaatatataaagtattataagatttgattaatgcacacctactaaccagcctaagaaatacagcacaacctatacactcaagttttctaagtgttctgtttgatttatccttcagaaaatgcttttaaactgtgtactttaaaatctttttggttttataccacatacatgttatctatttgaaaatatttgttttattattaaaaatatttcttcagcactttgggaagctgaagtgggcaaatcacttgaggtcaggagttcgagaccagccttgccaacatggtgaaaccccatctctactaaaaatacaaaagttagccgggcatggtggtgggtgcctgtaattccagctacttgggaagctgaggcaggggaatctcttgaacccaggaggtggaggttgcggtgagccgagatcgcaccactgcactccagccagggcgacacagcaagattccatctcaaaaaaataaaaataaaatatttcttcagtccatttagtctctcttttccttgatacctgtgtacttaaaattcctgcatttttttaacttctatttccctaatcattacagtttgtttctgcactgtatgttttagaatagtatgggtcaagaggggagtggcaattaataaaaatgaggttaaaaggaagtatcatagggcagattgtggacatataagtttttccctttttgatagtatgttaattctttaaggaaggtgccccatttgggttcacatcactcacaggtctgtagaactgacgaaaaactccagattgcactagcaatacctactttttggatctcttaatgctctaaatcttttggcaagggctacaatggaagaagaagaattgtcttggaatacattaacactaacgatagctgatgagcttttaaaaaattgcaaaaaaaaagaatctcataatgttttaagaaagtttacaaatttgtgttgggccacattcaagccatcctaggctgcaggatgggcaagcttgctctaaatattaatgtagcctttaaaaaaacatacttttttttttttttttttgaagcagagtttcactcttattgcccagtctggagtgcaatagcacgatctcggctcaccgcagcctccacctcccgagttcaagcgattctcctgcctcagcctcctgagtagctgggattacaggcatgtaccaccatgccctgctgattttgtatttttagtagagacggggtttctccatgttggtcaggctggtctcgaattcctgacctcaggtgatccgcccgcctctgcctccaaaagtgctgggattacaggtgtgagccaccacgcctggccacttagttttatatttaagggattttagagtttgagagaaaccttaggtagaaaattcttgccctccactttaagatgaggaaatttacccatttcaaagaaaccatcagaggcctctaataaatgagattgtttataatttttcccaaagatcttggttttctttgggcttttccattgcaggattctgtcactactcagaatgactcacatcttaggaggtggagataaaaaccagtgcctgggtattcaccttccacccgctgggaagtggagtcagaatgcgacaggcctcataattctccagtgggcctccatcttatcttactctgtattccctggtcttggtgatctcatactttaatgatgatctcagaagacaggtaggtagacagacagctgttgtcatcagtattctggcttacatcttcctgccccttctgtgactcattgatttatctgaagtccccttagagttaggacgcggatcaaagaaatttgaattcatttgtcagtctgcatctttttttttcctcctttttgtttctttttggatgaggcaagctgtcaagaccaagaactacagttttagctttattaaaacagtgccaaattaaataaagacgagactcataaagtcttgtttttttggaacttcacttttatgattaccacatgcttttttttttttttttttaagatggagtcttgctctgtcacccaggctggagtgcagtgatgcgatctcggctcactgcaagctccacctcctgggttcactccattctcctgcctcagcctcccaagtagctgggactacaggcgcccaccaccatgcccggctaattttttttgtatttttagtagagacagggtttcactgtgttagccaggatagtctcgatctcctaacttcgtgatctgcccacctcagcctcccaaagtgctgggattacagacgtgagccactgcgcctggcccacatgcattattttttaaaaagattttctttataacgacaaggaaaataatgctaaaaaaccactctgccatcaatgacaaaaaaaaaaaactccactttctttgccttgcactcgtcaagctaaagggcagtatcaggctgagctcatggtatcagaggtctggggcattaatctcatggcaaagtcgcataaatggctgatggtggcagtatggtgagtatagagggcctagaaaagaggactatgtgacaactacatagtgcaaacaaactcagtagtgaaatttttatagtctgtcataatttaaaagtatttgtgtgtgtgtgtgtgtgtgtgtgtgtatctttgaggcgaggtcttgctctgtcatctaggctagagtgcagtagtgtgatcatggttcactgcagactcaaccttcctggctcaagcaatcctcccatctcagcctcccgagtagctggaccacaggcgtgtaccgctgcaccccagtattttttttctcctcccctgccccaataagttttttattttttgtgggaatgagatcttggtgtgttgcccaagctggtctcaaactcctgagctcaagcagtcctcccacctctgcctcccaaggtattaggattacaggtgtgagccactgctcataatccccttagccttaggtatattgtttgattttcacaacaactttttgcagtgtctgtatcttcacaatttacagaggaaactgaggttcaaaagcttaaggacacacagtaagagatggaacaggtgtttaattcagctttttgagtttaaacacgattacattatccatttaaaattaatcaggtcatatccctccttgctcagaacctgccagttattctcattcactgaaaaagccacagtccttatactcgtctacaaagtcccacatgaactgctttgtaactcttattttatctgcttctcttctctcccttgcttgttttaccccaaccatattggctttgtttgttgtccctgagcaccttagctcgcatatcagggcttttgtacttgttattccttctatttagagcacgtttccctgagtagcctcatggcttgttcccgcatcaccttgagatttttgatcagatgttacttttgggcctgttatggtggctcacacctataatcccagcgctttgggaggccgaatggggaggatcacttgaagccaggagttcaaggctagtcgggcatcatggtgagatgctgtctctgtgaaacagcaacaacaacaacaacaacaacaaattagccaggcatgatggcatgtgcttgtagtaccagctacacaggaggctgagtggggaggatcagttgagcccaagaatttgaggtggcagtgagctatgactgtgccactgcactccagcctgggtgacagagcaagaccatgtctcttaaaaaaaaaaaaaagttacttttttagttaggcgcactccctgaccatcctattttgtaaaaccttgcttttattttccttcataccacttatttgcagaatagatagttcatttgtttattggttgtggctgtctcttcgtagaatgtaagtgccacaaggaggattttttttttcctctttgattctctgccttgtgtataagaatacttcgtgtattgtaagcacttaataattgttgaatgggtgatttagcaaaatcattaggatattttttaggttaagtatgttcctgagaccatgccttgtaaatatttgtatagcgtgccctaactgaagaggcactacagtatagagcattgttttcaaagtgtggtctgaggacccctaggtgtccttgaaacattttcagtgggtatgaatcaaaattttatgtatttatactaaaatgtaatttccctttcttactgttgttctttcataagtgtacattgtagttttggttttttatatttttataatttttttgtgagacagggtcttgctctgtcgccccctgctggagtgcagtggtgggatctcggctcactgtaacctctgtctcccgggctcaagcaaacctccccgacagcttcctgtctaacccaggagttcaagaccagcctgggcaacatagcaagattccatctttacaaaaaattttttaaaataatttttaaaatgtggaataatgtttaccacttatctctataattctagaaaagtggctttgaggctatacaccagaatatgaataactttctctgagtagtgagatttcataggggacattawattttttccatcttttgggttttcctgtatctttctgattttctatgatgagcatacatttcttttgtattccaataaagcttatgttggctgggcacagtgactcacccctgtaatcccagcattttgggaggctggggcgggcggatcacttgaggccaggagtttaagaccagcctggccagtatggcgaaaccccatctctactaaaaatacaaaaaaattagctgggtgtggtggcccatgcttgtaatcccagctacttgggaggccgaggcaggagaattgcttgaacctgggaggtggaggttgcagtgagccgagattgcgacattgcactccagcatgggtgacaagagcaaaactctgtctcaaaaacatacacacgcacacgcacaaaaataaataaagcttatgttaaattgtgtgtatgcacatacacaggtaggtacagttaaaagaggaagaagatggatggaagcataatgattaggagatagagctgttaatttggaacctctgcagtcaaagtgctccctccactgaccaaatactgcatgataaggaggcactccatctcattaaactgttccctctgaccagttgagtttgtataaatctcttttacatttttgcctttgtttctattttgtaagacttattgaaatttatctttgcagtgtttgtgttaggccatgttcttggcagagctgtggctccttcctgtgtacactcatttactctcaatttgctgaacctctcagaagttttctgtcaaaaaacaacacgttaaattttttgtttgcttttgttgggtaagaataatctgatttgttgtaggcataaaatggtggtgttagtatacaatgttttaattatttttttgtgtagcttttatttttgagccagggtctcactctgctgcccagggtggagtgcagtggcataatcacagctcattgcagsctggacctccccaggctcaggtggtcctcccaccacagattcctgagtagctgggactgcaagtgcacatcactaggcccagctaaaaaaattttttttaatgagagacaggttttcactatgttgcccagcctgttttaattttttgaaagtgcatttctgcaatatattttgctcattgactatagggtgtgaaaattgtccttaacaattcatgatgctgtatctttctgattttctgtttttctgtttttccttgcaaataggatcttgaggaactaaaatattaattaaacttgattttttgaactgttttcttagtatattctcttgggaatcgataagattatattcctcaaatcagtgccataagactaatttatttggttatgtaaagtactgaaaacttaggtatcaacattaattaggttactcaaacagatactatgtccgtattcttctaataccttgctactcaaagtatgttccaaggtctggcagcctttgtatcacctggaagcctattaggaatgcagaatctcagacgccacctcagacctgcggaatcacaatctgttttaaaaagattatttgccgggtgcagtggctcacagctgtaatcccaacactttgggaggccagggtgggcagattgcttgatgtcagaagtttgagaccagcctaggcaacatggtgaaacctcatctctacaaaaaatgcaaaaattaggcaggcatggtgatacacacctgtagtcccagatacttagggggctgaagtgggaggctcacttgaatttgggaggtcaaggctgcagtgaaccgtgtttgcaccacggtattccagctgggccacaaagtgagaccctatctcaaaaaaaagattgtcacatgcatattaaagttgagaagttcagttccaaaagatattttatttttatttcccaagatgctatgagatgtgttggatttatatgtgggatttatatgatgtctaattagtatggaagaatagggtaaaacaggaaacaaaaaagaaaacctgctcctggtatagttctctgtgttagataaacgttcacaatttgacaacttttttttttttttgccatttttcttcatttttcaaagaaagaacaaataggcttatttttggcattctagaatgtttaactgggaaggatcttagacatgacctgataacaaaccttggttttacaggtgaacagacggggggctaagaatgttaagtgacttacccaagatcatatagcgtggactccctgtgacctgattttcaaactactgatctttggaactcctgtgctacccctctgtgttgctgaaggccatctattcttagttggttctattgatgttggttgaaaccatcccgaacatacctgtggctaggcacagtggctcacgtctgtaatcccagcactttgggaggttgaggggggcggatcacttcaggtcaggagttggagtccagcctggccaacatgatgaaaccccatctctgctaaaaatacaaaaattagcaaggcatggtggtgcacacctgtgactctagctactcgggaggcggaggcaggagaattgcttgaaccctggaggcagaggttgcagtgaattgagaccacaccactgcactccagcctgggtgacagagtgagaccctgcctcaaaacaaaacaaaacaaccatcctgcacaattatgagtgagagtaaatccaacacatctcacagcatcttgggaaaatgataaggctcactttcttctttcccttcagtgtgaactcatgtaataacttcagagaaaggcatttccctgctgtctggaagttgaactccttctacaaactggtggagcttgctgcccagtcctgtgccctccgagctgaggggaaggcgtggggattttctgttctactgaaatggcaggattatgtcatagcagtggttttgagtgtttagaggtagtgttattttaattatttttctaactctggtttaaataaaaacttacaaatcaggaaagaactggctatctgtatgttaaaaaaattaagagagggctgggtgcagtgtctcacgcctgtaatcccaacactttgggaggccgaggtgggtggatcacgaagtcaggagatcgagaccatcctggccaaccaacatggtgaaaccccgtctctactaaaaatacaaaaattagctgggcgtggtggcgtgcgcctgtaatcccagctacgcaggaggctgaggcaggagaatcgcttgaacctgggaggcggaggttgcagtgaaccgagattgtgccagtgcactccagcctggccaacagaacaagactccgtcttaaaaaaaaaaaaaggagagagagagagggaacattgactcttaccttgtaccatcccaaaaattcatttgaggccgggtgtggtggctcatgcctgtaatcccagccctttgtgaggtcaaggtgggtggatcgcttgcgatcaggagttggagaccagcctggccaacatggtaaaaccctatctatactaaaatacaaaaattggccaggcgtggtagcgggcacacatagtcccagctacttgggaagctgaggcaggagaattgcttgaacccaggaggcagaggttgcagtgagccaagattgcacccctgcattccagcctgggtgacagagtgagactctgtctcataattaattaattaattaattaattcaggctgtgggatactgctcagcaacttttaaaaaggggcaaactttaaacgttttagaaataaaacaccctgaatgactcttgagaattactctgagtgaaaaaagccaatcctaaaatgttacctattgtatgattctatttatataacattcttgaaatgacaaaattatagatatgaagcacagattggttcttcatattgtcagggcctgtggatggtgtggggctgaaagtagatgtggctataaaaggtcaacatgagggatcctcagggtgatggaaatgtgtatgttgactaacagtgccagtattctggttgtaatattgtactgtagttttgcaagatgttatcattggagggaactgagtaaaggatacatgagctctttgtattatttattatgtgaatctataattatctcagaatgaaaagtttatacatgagctgtttattatttcttattatgtgaatctataattatctcagaatgaaaagtttaaaaactacaatttggcagcttttcaaaaagttaaacatagatcctgtgacctagcaattctacttctagatatatatcctagaaaactgaaaacatttgtctgtgtatttttacacagacaaatgttcatagcagctttttcaaaatagctaaaaagtggaaacaacccacatgtctttcagttgatgaataaacaaaatatggtatatccatacaatggaatattattcactcataaaaagaaatcactgttgatatatgttataaaatgaatgaaccttggccttgtgtggtggcttatgcctataatcccagtactttgggaggccaaggcaggtggatcgcttgagcccaggagtttgagaccagcctgggcaacatggcgaaacctatgtctactaaaaatacagaaaaattagccaggctggtggcatgtgcctatagtctcagctactcgggaggctgaggcacaacagtcgcttgaacctgggagatggaggttgcagtgaacggggatcaagccacttgcactctagcctgggtgacagaacgagactcgtcttaaaaaaaaaaatgatgaaccttaaaaacattttccaaatgaaaggasatagacataaaaggccacatattgtgtgattccatttaaatgaaatgtccagaacaggaaatggagagtgactgctgatggatacagggtttatttttggggcaatgaaaatgttctggaattagttgcgataaactatggaattatgcactttgaatggttgaattttatagtatgtgaattgtatctcaattttttaaattgtgtgaggaaaaaaattcaggtttctctagagtgacagcagatcagtgattgcctggggctggaagtggaaggagaaattgaatacaaagggacacaagaaaaccctagggatgaaaatatatctctttattgtcgtggttatacaggcatatgcaattgtcagaacgctttgaattgtacactaggtgaagtttattgtgtctgaattgaagttcaataaagttagtttttaaaacttataataaaattatctctagttgttgtaagcttaaaatgacctttaggttaaaattatcttatctcttattaattataaggccaacaactattgcaaaaattacctcatagagtctgacttccgttgctagtttctatccagtttccaaagtgaaactagattgatcactttcactcagactttgctcttaggcgtttgtactagcctgactccattattgtrcttttcagaacccatgagtgggtgtgattgttataacattttttttaagtttatggaacattctattgcttttatttcttttttgcttttatgtacaacagaaaaatgtctcaaattgggtataacaaatcagcgtgattgcctttcacctccactttggagtgctttgagccagtttggacacaaggaggttggagttaaaatgactcctgaaggaagtaagcaagcatgagaagagagggcagcactggtaggtaacgctaaaacaacatcgccttcatctctcaaccctgatctctttccaagaagtgagctgactaaatgaaatattacacaaaaccctccaaggtttgagaagagttctagagggtagtctctaagtgagaaggaccatctctataggtggccctgagttttatcctcaaatttccttctacgccatgtacccatcctcactcatttttcgggtcccaccaagcctaaactcaggggtagttttccatttaaaattctgcctcacaggtggacacatcttttttattgtttcccttaagcacagattagactaactttattaaaagagatcatgcaggagcatcccttgagaccgggaggcagaggttgcggtgagccaagatcctgccactacactctggcttgggcaacagagtgagaccctgcttcaaaaaaaaaaaaccccaaaaacaaaaccaccaccaccaccaccaaaagcctccaaaacaaaaatcacgaaaacataaaagagacatatgtctagaatatcgaattctaagtggattttgtaagaattccagcaaaaataaatatatttaaaatgataatagctaacacttagagtttacagtgcatgaagaggaaagacagacactggttttttttttttttttttttttttttggagacagagtctcactctgtcgcccaggctggagtgcagtggcatgatcttggctcactgcaacctacgcatcctgggttcacgccattctccttcctcagcttcctgagaagccgggactacaggtgcccgccaccacacccagctaattttttttgtatttttagtagagacggggtttcaccttgttagccaggatgatctcgatcttctgactttgtgatccgcccacctcggcctcccaaagtgctggcattacaggcgtgagccaccgtgcctggcctgttttgtttttttctgtactctactactcctttcaacactccacctctgatgacatcagatgtgtaggttttgtttttttttttccctcaccaacaaccaattctccaaccatctggtcaccaactggatattctacaatttaactcaattatgacattaattccctggagttagtgcagacccccacaggttaagggctcaggcccacaagatttccctgaacttcagatgccgatcgatagtggtgggtcctcaggttatccacaacttctgtctgagttggctacaaatcagaggtttccacaagcctctcctcaggttggatcatttgctagaacgactcacagaacttatgaaggccctttacttaaatttgtcaatttattataaaggataaaactcaggaacagccaaatgggagagaagcatagggtgagctatgagggggttatgtgatgctcccatgccttctctgggcatacgacccccagagcaccatctgggtttatcagtctggaagctctccaaaccctgtcctttttggtttctatggagtcttcatcatgtaggcatgattaatgacatcattggccattgatgagtaggtcaatctccagcccctcttgcatccccagaagtcagagtatggtggggctgcaagttctaatcctctaacacatgattgttttccctggcagccagccctcatccataagggctttccaaagtcagctcattaacataaactcaggtttggttgaaagggacctgttatgaataacaaaagacgactccttttacctttgttattcttaggaaatttcaaggtccaattttaggacctcggtgccaggagtgaagacaaagaccaaatatatatttattataaatcacaacattgcagtgtggcagaccgtgtaccaagctccttacgtatattaactcttattctttgcaacaactatgtgagatgggtgctcttatcccattttacggctaagattgtacccagctggcctgggttaagaatctgtgctctttaccactatactatattgcctttcatgtgaacttcaagccctttttcggaccctgtatgttagctgttgataggctgttctaacttgtcgaggttcctttgctccattctcccagtacttagcctacctgactttttagtcccccttcccttcctgttttatctttccctgccagaacactacaacgtaaatgtaaaaaacaaaaaaacctccaactttttcttcttttagaatatgtattttaaggggccaggcacagtgactcacacctgtaatcccagcactttgggatgccaaggcaggaggattgcttgagtccaggagctctagaacagcctgggcaacatagtgagactgccatttctacaaataatgaaaaattagccaggcgtggcagtgcacacctatagtcccagctgcttgggaggctggggcaggagaattgcttgagcccagaaagtcgaggctgccgtgagctgtgattgcaccactgcactccagcctgggtgacagagtgagagcctgtctcaaaaaaaggaaaaaaaaaagaaaaaaattatgttgtcctagaccttctttctgcataggaatggccttcttttttaaaaaataaatttgacatttaaaaaaagctcttgtacgatgagccctaacctttgcatagaagcttccttgtttttaactgtgactgttgtacctgttcacaaggattagaagggatgctgttttgaattacagtctagtaatatttctgactctatacctatggccaaaaccagtgtcatatgcttgaaactaaggaaaacttctagcgtgtcttgccataaacgtacattagacattttttccgttgtagctaatagtttctgtgggttggaattaaaattaaacctgtatatctttagagtaggaacatttgctgtgtgaaggtccttgttggctctggtaagaaaaaagttcccttgcttattctcttccttctcttctgagaaggctttcagaaactttttttttttttctttttcctttttttttttttttttttttcttgaggcagtccctcgctctgtgtcccaggctggagtgtgatggtgtaatcttggctcactgcaacccccacctgccaggttcaagtgattctcctgtctcagcctcccaagtagctgcgactacaaggcacctgccaccacagccggctaatttttgtatttttagtagaggcaggatttcgccatgttgcccaggctggcctcgaactcctgacctcaagtgatccacccaccttgacctcccaaaagtgttgggattacaggcatgagccaccgtgcctagcccagaaacttcttaacagctgagttttatatcagctaagtcagtccttgagatgtttgcaaataatcttccattgctttatcctgaagatcctcttgcatgtaggcttttggtcaaccgattcaatgttactaaatatatgtttaatcccaactaaggtaggtagtttggatgtttttagaaaagtttgaatttgaggaaatagtatatttatgtgtgtgtgtgtacagaatttgtcacgtgctagatgttgcgtggaagttgtttgagaatctactgaaaatgtggtcgccatctgcacagggattatattctggtttaggtagttcagaataaggggttaaataatatctagtcctgcagtcaatatttgtccttatatactggtaggcgagtttcctgatatgcatggctgcattttctctgttcctgcctacctcttcaactttacctgctgctgttttctctttgctttctaggttccatctgcctctctgttttctaggttcctccgccacctgagttcaaacgattctcgtgccccagccacccaggtagctgggattacaggtgcatgccaccacgcccagccagtttttgtatttttagtagagatggggttttgctctattgccaggctgatctccaactcctggcctcaagtgatccacctgactcggcctcccaaagcgctgggattacaggcatgagccaccacacccggcctagtatgtgattattttatgagatttttgggggtttttaaatgtatatgtttctcactagactgtaaatgctataaaggcaggtgtcttatttttattgttttagcattttatatccaggattttattagggtgcttgatacatagtaaatgctgagtaaacatatgttaatgaatgaaataaatgaatatgaaatattggagaaggccgggcacagtggctcaggcctgtaatcccagcactttgggtgggtgaggcaggtggatcacaaggtcaggagttggagaccagcctggccaatatggtgaaacctcgtctctactaaaaatacaaaaagtagccaggcatggtgctgcttgcctgtagtcccagctacttgggaggctgaggcgggagaatcgtttgaacccagaaggcggaggttgcagtgagccaagatcgtgccactgcactccagcctgggcgacagagtgagactctgtctcaaaaaaaaaaaaaaaaggaagaaatattggagaaattgaggagaaaccatttcattctgtgtccaggtccttcaacccaactatttctccaaagaaatgtttccctgaagagcatgtacaaaccgttcctttgtaagaggtaggaagggctgggcgtggtggctcacatctgtaatctcagcactttgggaggccgaagcgggtggatcacttgaggtcaggagtttgagaccagcctggctaacatggtgaaaccctgtctccactaaaaaaaaacatacaaaaattacccgggcatggtggcttgcatctataatcccagccactcaggaggctgaggcagagaattgcttgaacccgggaggtggagcttgcagtgcaccaagttcatgccatcgcactccagcctgggcgacagagtgagactctgactcaaaaaaaaaaaaaaaaaatgtaggagggacatttttgtttttggccatctgtaactcccccctccccaccattcattttaagaaacatgattctcaattcttaggaaattataaagatatataaaccacagttttcatatccacattcctgaatggatacacctctccccagagttgaatcagaggtttctctttttaacttttattatttatttatttatttaattatgtatttatttgtagagatgggatcttgctctgttgcccaggctggagtgcagtggcgtgatcttggctcactgccaacctgggttcaagcgattctcttgcctcagcctcccgagtacatgggactgcaggtacatgccaccatgtctggctaatttttttgtattttttagtagagattgggttttgccgtattagccagtctgttctctatctcttcacctcactcaggtgatctgcctgcctcggcctcccaaagtgttgggattacaggtgtgagccaccgtgcccggcctctttttaacttaaaaaaaaaaaattattactttaactagagacaggctctcactatgttgcccaggctggtctcaaactcctggctcaagtgattcttctgcctcagcctcccaaaaatgctaggattacaaatgtgagccatcacgcccagcccaaaagttgtctcttattaaggagctagcacatatttaaaagcactacatattttgccttactgattagtgattttatttttttattaatgtacttagttttgttcaggatttggagatcattgtggcatatttaagtcaaaggactcatttttttttttaaatggcaagcattttgtcttttccttttctttttcttttttttttttttttgagatggagtcttcgctcttgttgcccaggctgcagtgcaatggtgtgatcttggctcactgcaacctctgcctcctgggtttaagtgattctcctgccttagcctcccaaatagctgggattacaggcacacaccaccatgcccagctaatttttgtatttttagtagagatggggtttcaccatgttggccaggctggtctcgaactcctgatctcaggtcatccacccgccttggcctcctaaagtggtgggattacaggcgtgagccaccgtgccaggcctgcaagaagtttaacagctcaaactcaaaccaagagtgttagtgttttaatatttctgcttcttgtccgttaattcttacctcctgcatctcagaatacttctaaggtttctaagattgacactttttgtgagagatttggtactcctgaacacttttggcttagastactcagtttcaaaaattgttttcataagctcatcagatggctttaaacttggtgtggtggtagtgggatgaaagtgccacaaacagactcactccttgtaaaactttcctttcttctaattattttgttactttaagctttctaaattgtctgtgttacctagaaatttcttttcatagcaaaatagttacataaaataaaatttagagaatttatagtttaacaaatgttcataactaatcatgataaagatggatcagttaaagtttacaaattacttttaagatgcacattgcgaagtggtggtgttatgggtatgaatttcttagcttttcaggatgtcatccttttagccctgtagctaaaactcaagaggctacatgttcaaccataaaacattagcctctgccaacattacatcagctccacaaaacctcactggctaattatcccttgggactaggacatggatttggcagcttgtgaaagctgctttttccaatttctcccttactggctgtgacatatcccaaaggaatgaagttgagaaataatcatctttcgaaagctctcaacctctcattcccacagtggttctcatggttagggatagatgatcctttcttccacttgaggaatccctttagcttatgatgtattctttcagtagtaaccaaggtaccctgagtggaaggatgatggcaaggatcctcattaggtatgtttctaggtgattgtctataaggaatttaatgcttctgttaggatcttctttatattaccaaaattgaagaagctggaagaccagcattgggacccatgtgtggttatcatctgtgtccattgacatttgctgtaagaattagtattgctcatttaacatctccttttgatgagcacctgtaaaacaacttttttgaggacactcttggatagcaaaaagaactgtatgatcttaatctcttttagcctcagtttatttatcctaaaataaagatatggtacttggccttattttcctcacaagggaccgtaaggatggaaggagatgacacatatgaactaatttcatagtgacctactagtcaccctatatagtgggcccattctaggcctcatctcacctgttctatgttccctcctcgttctgtactactcaggatttttcacataatcttggttcacctaagcataaaataaatatattggaaaagtattggatagtgcacagccttaaaaggaaggctggataacacagttcagaaaatgagcagaaactgagtgaggcaagacatagtaaagaccatgtaatgggatcagttggctgaggactctctctagcactgcttgctggaccttctctgccactgctgctggcctggtctcccatgaacatctgttactactggcactgccaccagtaggcacttgccacagtgccatgaataatttctgattatattttccacctttgtgttattctttcaatattcaaagatctacataggaggatctgattgacttgggttatatatttgtgaactagatgccagggaacagagagagggaatttctgttactgtcagttcctgtagtgggaaaaggtgactgcctttccccgtcttagaatttcctccaaataggaaaggtattcacatgtgatacgtgtatatgtatctatatccctgacctgtttactgagttctagattcagttaatccactaattcttcccacctggacatctaaatgactagtgtgcacttaaaactgatatcgccattctcagtgactactcccaacctgcattccctaatttatagtgccagttgccctagccagaaaattaggagtcagtctcaattcctcctttcttgttgtacttgtcatatctatttgacttgtgagttctctagattttacctctaccttgacttcttatattttgtctctctgccctatatcatattgtcagcatttttctctgtggtttcaggggacttgttattgggctccctggctatagttcaactctcctccaatctgtccattcagctgccaagatactttcgctaactaccaattctaatcattttctttctcctgctcagaattcttccatttcttgtggggtaaaacttaagctattttatttgtctggtctctgactatgtggttatctcatatcacttccaaactcacagtccccagcagtactgaccagcttttggttcccagaacacttcgtgctttttttaaaaaaagcacatatattcctttgcatataaccgttagtctttctgcttgccagccttctggcctcacttcaagggctgtctcttctgagatgtgtgctgtctttgattcccccagaaacttcggtgccccttctgctgtgctctccttatgtttactgcataccaccaaagactgattgtttgctgcattttcattcctagcaggtctcattgttagaagtatggcccctttaaagcaggggtggtatccaatttctgtattgccagttcctaacacatagcaggtacataataatttttatttaatgattcagtgaaagcactttgagaagtaaagcactgtacacatgatattttcatcactggcattttcttgtaagcatttaggaccttttgaactctaaaattctgttttgtattaatctgtttctggagaacatttcgggttttatttcaatcaattatttatctgcaggtggccagaggttcaagaaccctaccagcccctcacatgagcttgccttctttgtgatcagccttatatattccttcaccgagaagttgcttaaatgtactttcctttagttttcccggcctctcacctaatgtacattttaatcctgaatcatgatttgcttaatgtgtgacaccattccttacccccagccactaattcaatcactttactttagttgtcctagttattgtaaattatacagtggctgggaccttacactgtattggtactccagagactatctagagaatctggagacatatctgtcaatttgactggattgctggttctgcaattctttttctctcatcccacagctctcatttgggttctgtactcccactgggggccttggcagagcaaacagtattaacttcactttttttttttttttaaagtacttggctgctgtttcttgatttactgcagtgggaagaatacgttttgattttttttttttttcttgttcctccctctgagggagcctgcgtcattgagaaatgtttaacctcatggccttgcactggggctggaaatttgcctaagggaacttgaagttggcagtattttttctcaaattcctccttatgaggagggggatttcagcaagacctgcccaaacaggaagatgttgggaaatttttagtagcaaagctgttgccattagattactgaaagtatttgaagagttttctggagataaacttaggtattttgaatttccactaggagaaagcagtagcttctatcaggtataaacaaaaattcaggccgagaaacttagcttttcagttgtgtggtatgttgttatcagaaaactttgaccagctggatgagaaagagaagctcaccagaaagtttagaaactctcacttagggaaaatagccttaggctgaggcaaacctctttcggctatggggagaatttggctttttatcaatcctggattatcctaagagtaggtcataacagggatatttttgacaaatctttctttcaaatacttaatgatattggcattatattctgtgtacaaaatacttagttgacacaaacaagatatttgcccagtaagagttagaatggatgatcttttgtgcccaaaagtgatttccctaataggggaaggtgtgaaccaggaaatatttagaatgtgaccacctctgcttattttaatctttgtatcacagatgaggaaaagttgtatagttgtttgccagtatgaaatgataagctgagcaggcactggaccctggcaaaggaagaattgtatagttaaacaatttgtggcagctttgtgacttcctcgaaaattggaaataattactcagtactaaatacaaatacaagcattcctgcccactctaaaagatactgtctaccatcttttctttctgtgcaatgtattttctgctgttagcatggatgtttgagggttgagctgttgataccagcaccttgttaaaagctaccgtgaacacaaagcatatgataatcttagaaaccaagttcttttttttttttttttggtagaggcagagtctcgctatgttgcccaggctggtcctgagctcaagtgattctcctgttttggcctccaaaattgttgggattacaggtgtgagccaccatgcccagccagaagccagactcttactttgcaaaaaaaaaagtaccctcaaaccacagttacaatggaaagaacatattactaacattcttccaccttaaagaaacttccaattgagagacaacctcaactgtgaggccaaagatttcagtatgaacagaatacattatatccatagaaagtggtaatgagtctaaatgaatcctttttttttttttttttttttttttttgagagacggagtctgtctctgttgcccaggccggagtgcactggcatgatctcagctcactgcaacctctgcttcccgagttcaaacaattctcctgcctcagcctcctgagtagctgaaattacaggcatgcaccaccacgcccagctagtttttttgtacttttaatagacgtggggtttcaccatgtcggtcaggctggtcttgaactcctgacctcaaatgatctgcccgcctcggcctcccaaagtgctggaattacaggcatgagccactgtgcccagcacgtaaataaatcttattgggaatagacaaacacattttttcacatcctatcagcatctgtgatttatttgaatttttgttgtttacttaatcaaattggggacgaatctaattgtcttcaattgctgctaggagaaacttatgtttccctagaagccactgtgctaatcttagtaacagcacctgtgcccaggtactgttctacgtactttatatataaatcaactccttttttttttttttttttttttttttgaggtggagtcttgctctctcttgctctgtttcccaggctggagtgcagtggcttgatctcggctcactgcaacctctgcctcccgggttcaagcaattctcattcctcagccttcctggtagctgggactacaggtgtgtgtcaccatgcctggataatttttgtatttttagtagagacggggtttcgccatgttggtcaggctggtctctaattcctgacctcgtgatccacccaccttggcctaaggtgctgggattacaagcgtgagcaactgcatctggcctaaatcaacttctttagtccttgaaataacccagtggttcttaatctaggacaatttttttttttctttcagagagggccttgctctgtcacacaggtgggagtgcagtggcaccgtcatagctcactgcagccttgacaggctcaagtgatccccccacctcagcctctctaatagctaggactgcaggcacccttctaattttttgtattctttttagagacaggattttgccatgttacccaggctggtctcgaactcctgggcttaagtgagccctggcgcccagctgggaagtttgtttgtttcttttttttttctttttgasatagggtctcactctgtcacccaggctggagtgcagtggtgcaatcactgctcactgcagcctcgaactctcaggctcaagtaattatcctgcctcagcctctgaagtagctgggactgcagatgcatgccaccacgcctggctaattttttgtattttttgtagagatggggttttgccttgttgcccaggttggtctcaaattcctgcactgaagtgatccacttgcctggtctcccaaattgctggttttacacgtttgaaccaccatgcctggccaaaggagaagtttctaagattgtagtatgcttctcttggggcatagcagcttttaacaaggtgccattggagaccgtaatgtatcctagtcagaattcaccaaccataataagcagaatcagcatttcttatatgtggtcattgaagaattaaaataatggtgtattcagcaatatttcattgacatattttatagagcactttttgtgtgtcacatgtgcttgctggtagctagtacactcggttagctgtttgctaatagtattatgctactatatttttaaactctccttaaacagtgaaaatggtgataaatgggggtcattagttttagagacatggtatatagaaaaacagtagttgataaatgcagcagtcagaatgagctagttgaataaagtcatgattcatcacccccccatttagagaattattatttgcctaagattcttaacaagtaggttggaataagtccctgaacatccaacctcgttgggcactgaagaagccacatctccttcaaatgccagtgagacgtagattgtaagatattggggataaataccacagtttcttaatagtaaagagctgggtgttcagttcccattaatatgtaaatattgcataaaactgagttatgctgggaagtataagtgtgcatctgtgcacaatcttattttctagactacttggcaaattaccttactgcagagatcatttttgtggggaagttcactacagtgggaagcagatcacattcaagaagggattatattttatatactatattttatcaaagaattggtgtcataatgcactttatttatttttttttgagataagagtctcgctctgtcgcccaggctggagtggctggagtgcagtggcacaatctcggctcactgcaagctccgcctcccgggttcacaccattctcctgcctcagcctcccaagtagctgggactataggcgcccgctaccatgcccggctgatttttttgtatttttagtagagacagggtttcaccgtgttagccaggatggtctcgatcttctgacctgttgatccacctgccttggcctcccaaagtgcctggattacaggtgtgagccaccgcgcctggccaatgcactttaataatataatctatgttatatctactttttctttataattgtcttagttcattttgtgctgctgcaacagaatacctgacactgggtaatttattaagaacagaaatttatctctcatagttctagaggctgagaagtcctaagatcaaggaaccagcaggtttggttgtcttgtgagggctgcatcctctgcaggggaagaagaacgctgtgtcctcatatggcataaggcagaagggcaagccacccgaaagctgtgtgaagcctctttaataagggctttaatcccattcatgagggaggttccctcatagcctaatcatcttttaaaggcctcacctcctaatactatcacgttgacaactcctgaattttggaggggacatattcaaaccatggcattacttattgaacagtaagattagctaccatgtattgactacttctcttgtatcgggcactttaagtagttatgtcatttaactccaatagcaattctttaagataagtaaaattttactttgcaagaaactggaacctagctgataaatgctgaagttagagtttaaacccttgacctcaaaacacctgactattaagccatgtagtctcttgattagatacagtatgagagaggatggataagactcatagataattttttaacttcattttgacataaatgtcgatccctacagtctagatgttatcgttagcaggggctaattttgagtttgaggtctttccatttccctttgcctgaaagttggcaatgatgataaattactaagaattcagtaatttgtgagcatctgttgaaagacagtggactagatgctgtgagtatctgataatgtttattgagtatccattgcatagagctctgttttattttgtggccaaaaaaagtaaacaacatggctaatccttttcctcaaagagcttagcattcggttggggatagatatagtcattatgctacaaaataagaggaaactttatcctgaaggtacagcaagtagaggatcagctttttgagaaggtttcttagaataggtaagttttaagccatgtttgtaagatgatggacatgaaggggtggcrggactgagtttcctcaaagatactatatccagagaattcattccaatttggaatgtttcataatttaaaaaagagtggcatggcctttgtcacacatcttgaggttcattctaagttgaggattctgatcaaatcctcttcaggtttctcacttacataagtaactgctttcctctttctttccttgtcatttagattgcttacatttgtgtgggtgaagttttaagatctagtttcagaaaataattttcagttccttgttttcataaaaatattagaattagaagtaatgttaaattgtttttcaccactcatctggttttattaatcagaaaaggtactgtttcctaacagaaaggctgatgtgatgtactgacttgtttggaaccagccatggcctaatttctgattagatatagcatttatcttgagattatctgataatttaagtctttgtatttttttagagaccaggtcttcctcaggctggagtatagtgatgtgatcatagcttagtacagccttgaactgttgggttctggtgatccttctgccttaaatttccaagtacctgggattacagatgtgagctactatgcccagctacaagaacttgagtcttaagaaatttgagaagtctaggttaattttttttcagccacaaagcaattaggtagtcagttatgaatttttatatctaattttcaattataaaatatttgttttcttaaaataatgaacttatgcagagaaggctcatcatcctcagttcagttttgaactttatttaccatttacatttaaagctgtgaaattaattttatataaatttaactgaatcttttgaattaatctatgaagtttcaggcagtttattattttttaagtatcctgggaatttttttttttttaaacttgagacagtcttgctctgttgcccaggctgaagtgcagtggcacgatctcagctcactgcaacctctgcctcctgggttcaagggattctcctgcctcagcctcctgagtagctgggattacaggcatgcgccaccatgcctggctaagtatttttagtagagatagggttttgccttgttggccaggctggtttccaactcctgacctcaagtgatccacctgccttggcctcccaaagtgttgggattacaggcgtgagccactgcgcccagccagtatcctgggaaacactgatgccttctttgcagtacagccttgataaagactatttgttgttgatcaataatatcggagtctcaagctaagtatatgtgataaaggacactccactctaaaaataacattataggctgggcacggtggctcacacttgtaatcccggtactttgagaagccgaggcgggcagatcacttgaggccaggggttcgagaccatcccagccaacttggcaaaacctttgtctctactaaaagtacaaaagttagctgcgcatagtggcacacgcctgtaatcatgcctggcccccagactacatttctgattttgttgacagttcataatgtggagaaattaattgtctggtgacatctgaaccacttaaaaagagtaaatggtgatacattatgggatgatcacacagttgtggtgaagcacaaatgaacagatttctagccttgttagttcagttctgcatctaaagtgaagaacctgcctttgtggtttctttagactcttcttgatgatacacagtacagcttggaggcctttaagcagaatagagcagagcagggaggcacaggttgttcagaagctttactagctgctggtttccctgtgcgtagatgagggtgtgtgggtgtattggggaagggggatgggaaaagtggagaaggggagcaagtaggtatcctctgtgacactaggaaggaaaaaagatcctagcgtttcctggaagcgtgacagttaatctacagaggactatcttcataaaggagattgtaaaccaccaataaaagaaagcaatatggggggaggatggagttcagcgggcagcggagctgtctcagtctttgccgccgcgccggcgagcgccgcccgggaggcagcggctggagaagcagacgggccccgcggggcccgagggcaaggagcagccgcctgccttggcctcccaaagtgccgagattgcagcctctgcccggccgccaccccgtctgggaagtgaggagtgtctctgcctggccgcccatcgtctgggatgtgaggagcccctctgcctggctgcccagtctggaaagtgaggagcgtctccgcccggccgccatcccatctaggaagtgaggagcgcagccgccatcacatctaggaagtgaggagcgtctctgcccggccgcccatcgtctgagatgtggggagcgcctctgccccgccgccccatctgggatgtgaggagcgcctctgcccggccgagaccccgtctgggaggtgaggagcgtctctgcccggccgccccgtctgagaagtgaggagaccctctgcctggcaaccaccccgtctgagaagtgaggagcccctccgcccggcagccgccccgtctgagaagtgaggagcctctccacccggcagccaccccatctgggaagtgaggagcgtctccgcccggcagccaccccgtccgggagggaggtggggggggtcagccccccgcccggccagccgccccgtccgggaggtgaggggcgcctctgcccggccgcccctactgggaagtgaggagcccctcagcccggccagccaccccgtccgggagggaggtgggggggtcagccccccgcctggccagctgccccgtccgggagggaggtgggggggtcagccccccgcccggccagccgccccgtctgggaggtgaggggcgcctctgcccagccgcccctactgggaagtgaggagcccctatgcccggccagccgccccgtccgggagggaggttggggggtcagccccccgcccggccagccgccctgtccgggagggaggtgggggggtcagccctccacccggccagccgccccgtctgggaggtgaggggcgcctctgcccagccgcccctactgggaagtgaggagcccctctgcccggccagccgccctgtccgggagggaggtgggggggtcagccctccacccggccagccgccccgtctgggaggtgaggggcgcctctgcccggccgcccctaatgggaagtgaggagcccttctgcccggccagccgccccgtccgggagggaggtgggggggtcagccccccgcccggccagccgccctgtccgggagggaggtgggggggtcagccctccgccgggccagccgccccgtctgggaggtgaggggcgcctctgcccggccgcccctactgggaagtgaggagcccctctgcccggccagccgccccgtccgggagggaggtgggggggtcagccccccgcccggccagccgccctgtccgggagggaggtgggggggtcagccctccgctgggccagccgccccgtctgggaggtgaggggcgcctctgcccggccgcccctactgggaagtgaggagcccctctgcccggccagccgccccgtccgggagggaggtgggggggtcagccccccgcccggccagccgccccgtccgggagggaggtggggggggtcagccccctgcccggccggcctccccgtccgggaggtgaggggcgcctctgcccggccgcccctactgggaagtgaggagcccctctgcccggccagccgccccgtccgggagggaggttggggggtcagccccccgcccggccagccgccccgtccgggaggtgaggggcgcctctgcccggccgcccctactgggaagtgaggagcccctctgcccggccaccaccccgtctgggaggtgtgcccaacagctcattgagaatgggccaggatgacaatggcggctttgtggaatagaaaggctggaaaggtggggaaaagattgagaaatcggatggttgccgtgtctgtgtagaaagaagtagacatgggagacttttcattttgttctgcactaagaaaaattcctctgccttgggatcctgttgatctgtgaccttacccccaacccggtgctctctgaaacatgtgctgtgtccactcagggttaaatggattaagggcggtgcaagatgtgctttgttaaacagatgcttgaaggcagcatgctcgttaagagtcaccaccaatccctaatcgcaagtaatcagggacacaaacactgcggaaggctgcagggtcctctgcctaggaaaaccagagacctttgttcacttgtttatctgctgaccttccctccactattgtcccatgaccctgccaaatccccctctgtgagaaacacccaagaattatcaataaaaaaataaattaaaaaaaataaaaatataaaaaaaataaaaaatgaaatgttaaaaaaaaaataaaaaaaataaaaactgtaacaaaaaaaaagaaagcaatatgaaagtatgttattatttctctttgtaggcatagacttttactttaatgaagcataaaaaaaaaaaaatcatagactgggccgggcgcggtggctcatgcctgtaatcccagcactttgggaggccgaggtgggcaaatcacaagatcaggagttcgagaccagcctggccaacatggtgaaaccccatctctactaaaaatacaaaaaattagctgggtgtagtggtgagcgcctgtaatctcagctactagggaggctgaggcaggagaattgcttgaaccctggaggcggacgttgcggtgagccggtgagccgagatcgtaccatttcattccagccttggggacagagtgagactcggtctcaaaaaaaaaaaaaaaaaaaaaaaaaaggtctacttgaaaatcttgtccaggtttcctctgcttcttaaatacttgtttttgggctgaagtgtcacacctggttttaatacaaagggaaatttatggtgaaagttgaagtaaaatcagtttgacccttaaggtgtcaggtcacagagaagacattttctttttgtgttttatgtatgccttcaaaatctttaaatgaccagtgttgcttacagagtcatttgtaagaaataaacattttaagaggtagttaaaacatttttgaggatgtaattatagggaggaaggagttttaaaatttggttaaaaatttttttttcacagataaggaggtattaaaattttaaaaaagttttcttctggcttgagaaatatgttaatttctgtgctgcttttctcttggaaggcataattactcaagttacagccagttaggaaactctccttttatcttgatttttctgtttcagaaagttctgcttgtagtctgtggtcagtccatagtgtgctctggcacctctgctcctcagttttgtgttcagactgcttatcagtgctctgtgttgtctgtgttctttaaatgactcagtattagtcagagaatcagaacaaggaatccagggagagattgtggctggttccctattttgggtgatagattttatttaatttactaggtcatgtaatgcagacaagatgttaacagtttgagaaatcctaaaggaatgtaagttccaagcatgacatctttacgagaaaaacggttgtgaattcactaagatgtgaatttagaaatgttaaacagatcatttttatacctttctttccctttttttctaccctgtgaatatttttgtctgtgttgtgggacatcattgtctgttctaaaagtggaaaattaataataaaataaaagggacgattggctgaacattctgtatacccaacacactgattattgattgattgattaaattcaccctaaaaccgtataaatttggtcatattatctttattttcaggtaaggaaatgaaagcttagagaggttaagtaacttactcaaaaccagagttggcaacaggtgataagagctaaaatttaaacaaaggtctgtctgatttcaagtgcaaattcctagccactgtatcatcctgcctgtggcctgctcctgagaggtagagatctgcataggtcttggccatacaaaaagacatctggttggttgtcttgggtgctttgatggttcatttgtttactgtctgtgtctgtcttctccctcagcacctaccatatgcatgacacatactcaacaaatatttattgaatgaggctggggacagtggctcatgcttataatcttaccgctttgggaggctgaggtgggtggatctcttgagcccaggaattcaagaccaacctgcgcaacatggtgaaacctcatctctacaaaaaaatgcaaaaatcagctgggcatggtagcttgtaccttagtccccgctacttgggaggctgaggtgagaggatcatctcagcccaggagatcagggctgcagtgagctgtgatcatgccactgtactccatcctgagctacagagtgagaccctgcctcaaaaaaaaaaaaaaaaaaaaaaaaaaaaatatatatatatatatatatatgaagtgtgtaccgttaactgtggaaaatagaagcatgctgacattttgtttggtaaatttttgtaagtgcatgctatatttgtaaatatagtaaagtgcattcttttttttgacacagggtcttactctgtcacccaggtgctggagtgcagtgctgtgatcttggcttactgcaccctccacctctcaggctcaagcagtcctcccacctcagcctcctgagtagctgggactacaggcatgcgccactacacccatctaatattttaaaaagatttttttgtagagactgagttttgccatgttgcccagactggtctccaactcctgagctcaagcagtccaccagccttggcctcccaaagtgctgggattacaggtgtgagctactgtgcccggccaaggtacatcttaaactaatatttatcaggtttgtttatggcatatgtagccttttacataagaagaaaagatttactaccccatgcgatttcctttttttttttgagacagtctctgttgcccaggctgaagtgcagtggtgcgatctcagctcactgcaacctccgcctcccaagttcaagcgattctcctgactcagcctcctgagtagctgggattataggcgtgcactatcaagcctggctgatttttgtatttttagtagagatggggttttaccatgttggtcaggctggtctcgaactcctgaccttgtgatccacctgttttggcctcccaaagtgctgggattacaggcgtgagccagcctgacccatatgatttctgaagattattttcctcttcctcaccagcctctctgctgctgtctttgtccctccttgtttccacactgctgtccaaatgacctttctctatttctctttctctctattctccattcctcaagtaattgttattttcataacttttgcttttgtgcgttcctctgcctttggttggaatgcccttcccatctttttggtttgacttaaacaaaaatgattttagatttcagtgcaggtgccttctctcctcctggaggccttctctaactctccagccccagcaaggtcccctcttctttgtcctcatcagagcacttaccatgctgagggattgtataaatagttacaaggctgtctccgtttcttgaacagcctgtagtgtcaactccatttgggcaggtgtttcacctttctgtgtccacaacacctggtacttgataggcagacagtaagtattgacagaaaaatgaaacaaaacaaagggtgtagctttgccaaatcccaccataaatcttagagaaccattccattttagagatagaggacaccttgtctactccagccactcctttgtagagattagtaatattgctggaaaccaggactcctgactcagcctggtgccctttcttgagaaaaagatttttggcttattataaagacagtagttatttgatgtagaaaatgtagaagatacagataaacaaaagggagaaagagaaaatagattgttctattccaaccacccagattggtgactgtgcttctactctctcctgtgcatatatagaaacatgtatatgtatgtgttacataattgtgtgaggacaacagctcaaatttactgagtgcttatagaatgggcactgttttaagtcctttacttaaaatgcatttattatggatcttgctggaaaccaggactcctgactcagcctggtgccctttcttgagaaaaagatttttggcttattataaagacagtagttatttaatgtagaaaatgtagaagatacagataaacaaaagggagaaagagaaaatagattgttctattccaaccacccagattggtgactgtgcttctactctctcctgtgcatatatagaaacatgtatatgtatgtgttacataattgtgtgaggacaacagctcaaatttactgagtgcttatagaatgggcactgttttaagtcctttacttaaaatgcatttattatggatctgaggtgaaactgttactttcatttgacagatgaggaaatggaggcatagagatgttaaatatctcaaggtcacagcagctgctaagtggtagagccaaaatttgaacccaagcaatctagctgtagagccttattattattattattattattaatttatttttttttttctgagactgagtctcattctgtggcccgggatggagtgcagtggtgcaatcttggctcactgcaacttccacctcccaggttcaagcgcttctccagcctcagcctcccgagtagctgggattacaggcgtgtgccaccacacccggctaacttttatatttttagtagagaccgagtttcaccatgttggtcaggctggtctcraattcctgacttcgtgattcgccctcctcagcctcccaagtgctggattacaggcatgagccactgcacccagccagacagtgtactttttttttttttttttttgagatggagtctcgctctattgccaggctggagtgcagtggcttgatctcggctcactgcaacctccacctccccggttcaagcgactctcctgcctcagcctttcaagtagctgggattacaggcgaccgccaccacacttggctaatttttatatttttagtagagatagtgttacaccatgttggccaggctggtctcaaactcctgacctcaagtgttccattcacctcggcctcccaaagtgctgggatatcaggtgtgagcccccacacccagcccagacagtgtactttttttttttttgagacggagtcttgctctgtggcccaggctggagtgcagtggcgcaatctcggctcactgcaacctccacctcccaggttcaagtgatcgtcctgcctcagcctcccgagtagctgggactacaggcgcccgccaccacacctggctaattttttttgtatttttttttagtagagacagggtttcactgtgatctcgagacggtgtactttttaaagtatttatttaatttttatttttagtagagacggggtctcactgtattgcccaggctggtcttgaactcctgggctcaagcaatcctctcacctcagcctcccaaagtgctgggattacaggcgtgagctactgtgctttgccaagcctgtactcttaactatgcataatatcttgtaatctgcttttttaaaaaaaaaaaagttgagatcagtttatatgcagtaatagtcacttttttaggggtacagttcagtgagttttgctaaaaggtaaaccaccaccttttatcaagacatatagattatttccatcacctcccaaaattccattatgcctctttgtagagtctccttccctgtttcccagcccttggcaatcactgatctgatttctgcctgttgttttgccttgaagccttctggcttcttttagcataatagtgcttttgaggttcatcagtgttgtttcctgtaacaatagtttattgggtttttaaaaattgctgaagtagtattctgttaaaggggtgtaccataattttttttttttttttagacagagtctggctctgttacccaggctggagtgcagtggcatgatctcggctcactgcagccttcgccccctgggctcgagtgatgctcctaccttagcctcctgagtagctgggattacaggtgcacaccagtatacctggctaattttttaaggtttttgtagagaagaggtctcactatattgccctggttggtcttgaactccttgggttcaagtgatcctcctaccttggcctcccaaactgttgggattacaggcatgagccaccgcatctggcctgtatataattttttattccattcacaagttgaagaacactttttggcaatcacaaataaagctgctacgaatattcacatatagctcttttttttaacctagtagttttaatgacatgttaattacaattaatataaaataataatatctccctttattactaaagtcagatgaactaaaaggcatttgagtttatttttatttcagagacaatagaaaagcacttttctctaagccaatagataagagctctttaatataatttggtagtgaaataccacatacacgtgacacatataaaccatataggcatagagacacacagaaatctaagatctttcatttaccagttttcaaatagtttctctctcccactttagactatcaatttcaattacctgcttcattcccctgaagagttgttagctaggcaactctaaattcacatttccaaagacacgcttcttaggtgaaacaaggtagacaatttacatcaggcacagaactgagacctaaacactattatccaaagacaatgtacagttctttatgtggatgtatgttttcacttctcttagataaatactcaggaataggattactgggttttatggtaagtgtaaatttataagaaactcccaaactgtttttctacatagcattatcgttttccatcctcctcagtaatgtctgggagttccagttgctcctcatccttgatgacaaatcatttattgctggtatttgtattctgacagtagccaagtaacaatctccacatgctcttgctggaaaaattgttgcttaaattaaggatttctcatgtaaatttttcctctttcattttccttttccttttctttccactttataaatatttattgagcagtttacagtgcaagggatggacgagcatcagtgattttactctcaaagtgcccctgttggccctgtgagtagaggtcatggcagatgattgtgacacttttgattcttatactttatctagtttcctagtggaacagattgatcagcatagaggttttcatttttgtgtctctatactgcatgcctcgcttagctttcaagtgtgaggaaccttgtagggagaagaatatggtggcacatctggttccagctgtgctgtcagccttaatatcttcccccttctgtttaggtggaaatgccagtgtcatggtggcctttgttttcataatcagctgggtagatttttcagttgcctgttagtgtagctgtcctgatttccttcctaatgatgtgaatgatgggactgtgacatacaaggagtaaaatcaaatggtgaggtaagctgaggtcaacaagataagggtttgaatcccaaattttggtgggttgtcactattgtgccaatatattatctctgactctagccagcatcttaagagcctatattgtctttctaaaggaaaggtcaaatatgtattgaactgtatcttcttttaaatattttgtcagcaaagtgtttacaaattggtgagaagtgtccatttgttttttcattcattgagtacacttgccagttaaccattacgtttatggttcccacatcagtactgtgataggacttttttcaaagtaaattcttcctgagtttttcctttggtacctcccccctctgctttttggtaycttttatcttcaaacattttaaagatgaatgtgtccagtaaaataatgttgtgttatagctccttgttccattttgggtgcaggctttgtacaagaagggagggagggcaagagagagaagagggaacctagtcatgtgatactgcttgtctggcagaagccttttggttctgagcagagaaaccaactgtttactattttgggtgaatgaggttggttggttgctatgagcattttctctaagggaaccctctcctcttccagctctacacattgaaatcatctcagttctgctttttggcatttggatagaagagggaggtgtctgtgtctaggcccagtgctgacaggaagaaatgttttgccagtagagttactgattctgaccttctgctgtcactgcttttaatgccccactccctaagtaaacttgggatctaactgttcttgcaaccctttgcactgtagaatgaagtgcccactttaacttaaagagcagggctaatcagatcttcggcaaataataaatggcctctttaaggagagagggaaggaagagtggtttattgcagcattggcctgtggagactcgaatctcctccagcatgctggaggagaaggccaagattcatcagtccacctgcaggattctgccactctcgtggattgtcctgaagccgagaaaggacagctattactcagcagtgtgcctgacccattatcacagtttgcgggaaggttcgagtatttgtgcctttgggatttgcatgcttttgtttcctttcaaacttaactgctgtcttttatcccagtcctatttctctgtagccatccaagctttgactttgggtggtttattctcccaggatttgtattaaagtttgttgagcacccaacaaatagataactgaacatagtactgtagggtgcatttcatgacctggtggaacagtgattaggatgtttcactttcttactccttttttccccaccgtgcagagctcatatagccaagcctagattgtggaataagggaagaaaaaacttttctttaataaggcggaattactctttatgtgggtcagattcaatgttttatccataaaatgcactttggccttaggtactatacaaatgggagctattgatgatcatttcagtttcttctgtctgttgaatacttgaaagtagatagataaccctttaaggtttataacactaagacatcataatttaaaataaaataacacttggaaggctttttacttgtattgcgtcttagttttgcttagggtgaacaatttggactggtcttatcaatattaaaagagtttgcctatgtgaacagccttccttcatagtcttggttttgttttttttttaagacaggttttcactcctgtggcccaggctggagtacagtggctcaatcatggctcactgcaacctccacctcctgggcccaagtgattctccagcctcagcctcctgagtagctaggactacaggcgtgcaccactgcacccggctaatttttatattttttgtagagatggggttttgccattttggccatgctggtcttgaaccccagccttaagcgatcctcccgcctcatcctcccaaagtgctgggattacaggtgtgagccaccgtgctcggcttctttcatagtcttatactgcaggaaaagaaaatcctttgggagtagaatggacacatttgagttatttagaaaagttcacttttaaatttgaggaaaattcttttagaagagttctaggttatgaaaaaaacgacaataggagctttatccaaatcctgtcaaatatgaataaaagagaattgtcaatattttcttctcctatcttggaaaccctaattatctactatcagaatttatatacaatgtataataattatgtaaatgctacttttctaaacacttagacatttcttttgagttttccagatttctttgggattttaataattttaacaggatgatttgagcctgtggagtcagcaatgaatggacacatcgaagacgagatggagtgattatcagtgcccagtttgcagagagaatattttttttcttcttttcttttcttttttttttttttgagatggaatctcactctgtcgcccaggctggagtgcagtggcgcratccctgctcactgcaagctccgcctcctgggttaataccattctcctgcttcagcctcccgagtagctgggactacaggtacccaccaccatgcccaggtagttttttgtatttttagcagagacagggtttcacgtattagccaggatggtcttgatctcctgacctcatgatccgccggccttggcctcccaaagtgctaggattacaggcgtgagccatcgcgcccagctgagaatagttttaagaattggttgagaggcagttgctttttctttgaatatctagaactgttctggactaacgtcaaagaaacaccatggcaacattaaagggaagattatttgagaggcgggggatagtatggcttaggacttgggctgctacctttgactttgtaattcaaaagattgtaatgttccatattttcaatctgatcattaaaaatatctgtgttacatgcaaaaaaaacctataggcaatagagattcaggcttgtgataagtaggatcagaatggtaatgttagataactaccctaagcaattaactacacttttctgatttttttttttttttttgcgacagagtcatgctttgtytcccagactggagtgcagtggcgcgatctctgcccactgcaacctctgccttcaagcgattctcttgcctcagcctcccgagtagcagggattacaggtgctcgccaccacacctggctaatttttgaatttttaatagagacaggatttcaccatgttagccaggctggtctcgaactcctgacctcaagtgatccactcgccttggcttcccagagtgctgggattataggagtgagccaccatgcccggctactttgctgattttatagtgtgcttagaacctttcatttagaattctgtatattgactcagtcttgaaaggactcaaattatgggctgggtgcagtggctcatgcctgtaatcccaacacttggggaggctgagtctgggagggtcactttagcccagcatttcgagaccaggctgggcttcaaagtgagaccctgtctctagaaaaaaaaaaatgaaaaaattagctgggcatggtggtgtacacctgtggtcccagctacacaggaggctagaaccatgttcacgacactgcactccagcctgggcgacagaacgagactccgtctccataaaaaaaaaaaaaaaatttgaaattatgtcttctacagatacacattatttttttaattgctgtcattttgtaaactgcacaagagaaacagattttgcctcaaatggtaaaagtattaagaatatctgatgtccctgcttttgggctgaagcaggtgttcgagggacaaagatcattcttcyttgtaatactcaaagatacccagtgaaaatgattgtgtcttgtgttttattattataaattcttaatattttctttttttatagctttattttccttattaatagactttggcatcaatcacatctgcatgaattttttttcaggactgagccatcatgaaacgttggtgttttatgattttatacaacctctgatacaatatgaatgatgttagatctatgaaagatctaacatcaatcagtattggtattgatataacacaatatgttagccacaagtcaaatgtacccattgagatttgaaatgtggctaaagcagtgaggagctgaattattattactttttttgagacggagttttgctcttgttgcccaggctggagtgcagtggcgccatcttggctcactgcaacttccatgtccagggtttaagtgattctcctgcctcagcttcctgagtagctgggattacaggcgcccgccaccatgcctggctaatttttcgtatttttagtagagacagggtttcaccacgttagccaggctggtctcgaactcctgacctcagttgatccgcccgccttggcctctcaaagagctgggaggattacaggcatgagccactgcacccggctgaatttttaatttaattaaaaaaaaagagagagatggagtctcaccgtgtcgcccaggctggactcaaactctgggctcaattctgtcagcctccccaagtagctgggacatgtgctgctaattttatttgattttaattaaatttaaatagcatgtgtggctagtggctgccatgtctgatagcacagttctagacccttcacagtctgaccctagtcagccttccttctgttactctttttcacaaacgtaatgctccagctaaactggggagtgttggctgtgaccttaaccttgtagatttcctacctccaagtcctagctcatgttgttcatctctagtttatgaaggccttcagatagcttatatgctgttgccctgtgaagcttacctaatcccttttgtactctagtaatgtattatctgcaaactcttaaagcacttgtaacgctatctctgattgtagtgatttgtttttcatttctcatattctctattatatttatagattcctcaaggggcttatgtggttttgatggttgtatgtgtgtgataggtttaagtttttctttcttctttttttctccacggtgtctagcaaagcatttttatacatggtaggtggttcatatgcattaggtgagttaatctactgagattgctgattgttactgtgcttcctggcactagagggcagtatcatatccataagcaaaatgaggtatttatcccaaagtgacagatacattttgagcactctgtcctaattcagttttattcagtctcattaacgattctggcctccagaaggaactcacatctgttcattgtcagtgatattaataaataacctttttctataaatatcttgattagattcagtgtatgttggaccaggagatagtgagattctttctgagaagaaacttggtacatctgagaaacaccagtcaaggcattaggtgtcagagattaattccttgagggcagaagcctttttgtggtaggcagctaatatcccagtagtggtctggtagtcaagaacccaaagttcttggtttgatcttgccaatggtgaacttggctaagttgctctaagcttggcacactagttcttctcattgtgtagtagtgggtataatgactaatgactccagttctggctcatagggtcaaatgagatacgtatgaaagtagctttgtaaagtattatataaatgtatagtggtgttttccttctcagttcctatgtcatacttagtaccaacgcatacacaaaataagtgattacttataaatatttatgacattaatttgaaaattttaggtaagggatatactgtggtaaaggctgtactcaccaaggctgcatacactgagaggtgattatagtcacaatagtggttaacatatatcctgtccttagatgttatttagcctcagagtgaactgtgtgatacacacacaaacacacacaagtatatatgaagtttacactcttttgttagtctcttgtgtagtgaatttatttttgtacacctgctacccttctcttttgtttgtttttgttttttgagacagtcttgctttgtcacccaggctggattgcagtgatgcaaccttggcccactgcagccttgaccccctaggctcaagtgatcctcccgccttagtcccccaagtagctgggaccacaggcaagtgccaccatgcccagctaatttttttgtagagatggggttttgccgtgttgcccaggctgtctgagatcaagtgatccaccagcctcagcctcccaaagtgctaggattagaggcgtgagccacactgcacccggctccctgtacccttcttaatacgaacttaaagtgttcgtaatgagccaaccgttgtaaggtttttggacttcttataaaaagccagattcaaatacagttgtttagacaaaaatgtcttagtatggaaatatgcatgagcatattttcctgccagatttgtggttagaaaagaagcaaattttcctcctagagtggaaggaagaaaaaaacaataaagaaaagaagcaagctattcaagaagaaggtagtatagtggtagctttttgttgagaccagtcaccagcctggaactttctttagtaagtaattagattcattgaataaaatgttcaaccgagcttggtgcaatctcatagttacaaaacactcttgccaaagaaagttgcagtcttaatatccgtaatcgaatcatttcctgttcgggcttgcaggtggggaacaatctgaaactgcagtcctataagattagttataaagaaaacgccttggtgggagaagccttgatgataatattgaatagacagcctaacaagtgtggggatgaagaaggtacaccaggatcctgggactaaccagatttaaaggcgtaagtcgggatctgcaagcccactcccttggggtgatctgaataaagctactctagggcattcaggtatgtgctgaacacactcgggcagtgggccaggcagatggctcattcctgcaccgaccttcgaaggcctgccaggttgaaaagctaccactggggaggcatggctgtgctctagcaagaacaagaacatgcatttcatgtagcatttggtccttcccagttgagggagatgccttaggactacgttaatctctgagtccacttagggcttgggatgtattctcacagcccttgctcctcctccatcttagagtttatttttaccrtcattgcaacctcctctaagtgattcttccagacccatagttagcctttgagattccgcagttctcctccctactcttccccaccatgtcttcattgagacccacatttttaggtttgactaaaccttccatctaggaataggtaggaggctaagcaatttaggccgcattcatgtatcctgtcatttgcttcactgcatcttcttggctgtggtaaaggaaatttaggtgtgatacactccttaggcttccctgccctgcccccctttccttttgcccttttgattttttttaatctgatactcaggctctcctcccgccttcacacaccattggagtctcctaagctatttctgtcagtttaatgatccccagctgttgccacagttyrggctgttttcatgcccaggagaagcatcgaagaggcagaggaaaaggggtcttgtttgttgtctgtcccacagtgtgtaaaacaaatcaaattcatttttctgaaactactagtgagattccttagggatggatgttaatactgggatgatttgaaaatcaggaggaggaaaagtacatggtagtatcagggacatttttaaaataagcattctgctgataggtgtggcactctgcatcactcagaattatgctagaaaattgaggtatgtggtatggaggaattatttgatcactttgcattcttttagattttttttttttttttgagacggagtctcactatgttgccaggctggagtgcagtggcgcaatctcctctcactgcaacctcctactcccagatgcaagcgattctcctgcctcagcctcctgagtagctgggatttacaggcacgtgccaccatgcccagctaatctttgtatttttagtagagayggggtttcaccatgttggccaggatggtctcgatctcctgacctcgtgatccgcctgcgtcggcctcctaaagtgctgggattacaggtgtgagccaccgcacccgcctctacttttagattttgagctggaatttcccttctactcatgtatgttgaaggagtatctaaattaaaagaattctgtaataggaaatatatggaaattgtttctgaagtatccagaaaaggcatttatttaagttctgctttaacttaatgcaggtttgtttcgtaaaattttgtgcaaaayctgcagtagtgaaatgttccatttgcaaattcaaccacacagacttcaggaaatacaaagttgcggtacttataacatgaactcttctacagttacacctacctttgcttttgaaaagtctttactaaacctgggggatgtggagtgggaaaatcctacagtagttaaatgggctcctaatgtattataatgatctggcttctcctttatgtgtttgatcttgagaattttaacccattccaacaagtttagctgatttgtagcttttacgctcagacactacatgaagtttaattttatggatttctttcttccacagagaagacaaattttgctgcagactttatcaaattttatttttaaatttttatctttttgagtcaaatagctaaaattttacatcatttaggactgaagagtgagaatttactgttttttttttctttatccatagaaaacttgatacataaacatttgaataagcttcagattgtttgtctatctaattatctatctatctataacccaacccatatggtctaatttttaatcacctttctattccctactgcttcccatagaaaagggccaggtgtagtgcctcatgcccaatcccagcaaagcctgtaatcccaacattttgggaggttgaggtgagcggatcacttgagtccaggagtttgagaccagcctgagcaacatggtgaaacaccatctctacaaaaacaaacccccaaaaagcaaaaattggtcaagcatgctactgtgcgtctgtagtcccgattactcaggaggctgaggtgggaggactgattgagtccgggaggtcaaggctgcagtgagccatgatcgcaccactgtactccatcctggcgacagaatgagacctatctttttattttaattttaatttttttttttttattgagacagtctcactctgtcacccaggctggagtgcagtggcactatctcggctcactgccagctctgcctcctgggttcatgccattctcctgcctcagcctcccgagtagctgggactacaggcgccccccaccacacccggctacttttttgtatttttagtagagatggggtttcaccatgttagccaggttggtcttgatctcctgacctcgtgatccactcgcctcggcctcccaaagtgctgggattacaggcgtgagccattgcgcctggctgagaccctatcttaaaaaaaaaaaaaaaaaattactttaggtctgtcatagtagctcacgcctgtgattccagcactttgggagactgaagcaggaggattgcttgagaccaggagtttgaaaccaacctgggcaatatagtgagaccccatctctacaaaaaaatttttttaaaattagccagacgtggtggagagcgcctgcagtcctagctatttgggaggctgaggtggaagaatcacttgagcccagaagtttgagattacagtgagctgtgatcctgcaccactgcattccagcctcggcaagagagtgagatcctgtctctgtgttttgtttttttgagacgggctcactcttgttcaggctggagtgccgtggcacagtggtggctcactgcagtctgggtcaacaggcatacactacaggcacacacaaccagatgttgtctccctgtgttgcccaggttggtctccaactccagctctcaagtaatcctcccaccttgacccccacaaagtgctgggattataggcacaacccactgtccctggcctaatttaattttaaggaaaacaattttttgtcacttttggtttgctctagaatgactaccctattccaagttttgaatctgtacaacaaagttgggtgcagaatgtcagcatcagtgataccagcagggattagcaaatgagattcaaggctgcccatattttctcagtgaatgggcagaactaatgcaataaggaaaatgctgttcttggtgcctttaactttggaagggagtgttcagatggccctacctaaaagtgctaaaggaagcacattcctagtttatctccaccctgttcaggcatctggtgcaagtgcatgctatgcccagatcttacatgatggagttggttgcacattgctttatagatcctcaggaaagagactgatgacattgaagtaattggcactttgagatctgtttgccaccattagaataggaggtcacctcaaggggggagatgagcagctacccaaaatgaagtggtgagcttcagatttttgaggatgtggggaataatatttatttatagttattaatatttttattatgactgtggcataaatgtgatatagtagaaaaagcacaagctttgatatcaggccaacctgtgtttgaactctggctctacctgttaccacttgtgcagcttcttcatctatgagatagtacatatctcaaatagccattgagatgaaatgagtcaccgtagtagtacttctacccagtgacaacacaatgtaagagctaaacacattagagtcctcatttctttttttttttttttgagatgggagtcttgctgtgtcacccaggctggagtgcagtggtgcgatctcggctcactgcacgctctgcctcccgggttccagcgactctcctgcctcagcctcccgagtagctgggactacaggtgcccaccaccacgcccagccaactttttgtatttttagtagagacggggtttcaccgtgttagccaggatggtctcgatctcctgaccttgtgatctgcctgtcttggcctcccaaagtgctgggattacaggcgtgagccaccgcgcctggtcagagtcctcatttcttctattttagttttcttttcaaggcaagccttttctcagtgcctttgcacttgcaatttcttatgtctggaatactctccagatcatttttatggtttgtcatattatttaggtttctgtccaagagtcatcggtctcttcaaaagggccttctctgtgtaccctatctaaaattatcaccacccctgtcactctctgttctcttgttccactatatttttcttcacataatgtactccctgaaattataatacgtacaccttatttattatgttttccctgctagagcatatgttctatgagggcagggacctcatctgtccatgttgttgttttattgcctataaatattgaccttatctgttcatgttgttttatcacctgtaagtatcacctatacatattagttcaataaatgaatgaacgagccaactgacaatcttcctagtgcccgaaaagaacctgtggccgaatgcaggaaggaagttgtaccaggaagcaaatgctctctgcttttgtggagtggatgttcccacactgagagccagataggcagtagtcctgtgacgtcctcttacatccttttagacttcttcctgtctctctgtctgggaagagcccctttgacctttatttagtatttgttgttattttttgagacagggtctcaccctgttgcccaggctagactgcagtggcataatcatggctcactgcagcctcaacccctcagcttccggagcagctaggactacaggcaaggactactacacctggctaatttttttaaaaaattattttttgtagaaacgggggtctccctgtgttgctcagaaaagtcttgaactctggccgggcatgttggctcatgcctgtaatcccagatactcgggaggctgaggaaggagaatcgcttgaacccgggaggcggaggttgcagtgagcggagatcgcgccactgcactccagcctggtgacagagcaagattctgtctcaaaaaaaaaaaaaaaaaaaaaaaagtcttgaactcctgggcgtgatcctcccaccttggcctcccaaagtgcagggattacaggtgcgaaccatcatgcccagcctgaataacctttagatgtgaccaccgttatcctgttaaaatctcgattccttttggaattagaacataagcattgttttcagtctccagagttctactgtgtcatatactctacatgttccatactattcactgaaatcacctggattttcccctagttagtaagtatgtagatcacttttttccatccatatcagcatgtcatgctgataacactatcaatatagtgtcattttaaaacagaggagtgggggtgcagtgtttcatcatgactgtaatcccaggaatttgggaggccaaggtaggaggataactggaggccaggaattcaaggccagcctgggcaacaatgcaggaccccatcttgacaaaacataaaaaaaaaaaaataaacatacagagaactggtgtgttttatgagaaaagagaggtgattgaagattcaggctatacattcagacagagctgggttccaatttctgctctaccttttactttatgaccttgagcaagttgcttaatcggtctaaacctcaatttcctcatctacaaaatggtatgacagttgtatcgtctgcatagctttgttgtgagaaataagatgatgcatgcatgtttacaccattttataagttattacacaatatagagacctttcacttgcatattttaataacttaagttagattttcataagcttattctttgaaagttacctggttagatgtgtaagttgcccaggtttaccagcccaggaacctacttcattaatcaagagccttcatccttgacagtattcagattaaatagaagatatctattatattttggtattataagagtattccttatcagaaatgtttgagactacaggtgttttgcattttggatttctttcagattttggaatatttgcattatatatttgctggttgaacatccatatctgaaatctgacatgctccattgagcatttcctttgagcaccatgttgatttacaggaatcatttataggaattgataatttctttctctccaagagatggcagcatttcagtttgaaaaacctgacatttgttgtgtttcataattgattcatcaatttttctaaagctagggcaaatccatgttttttattttattttatttttttaggagcagaggtttaataggcagaagaaagggaaaggaaaacagctctctctcgtgagaaagaggggacttgcgagaggaaaggccggccagcagcagcggatgccccagattttatagttgggtgtgaggaggtggtgtctgatttacatagggctcacagattgatttgatcaggtgtgatgtttacatagtgagtggggaaggctggttgccccaccctaatcttattatgcaaatgcattctccccttagctggcgccatcttgtctgctccttactgtatatgtggctggcagagaagggaaggtggaggcttcattttgaacatgattagttccaggtagttctttcctgctggcattcacctgtgcaagcgctcagcttgcttatctatttcagcagctcaactttacaggctgctctttgttagaaaatgatttggggctgcttttcattaaaaaggaaaaccttactgaggacttccataccctccctatctgcctaagtaatttcttaactcctgtatcattcactcctctggaatggtaatgctaactgctgttagggggtgttggacaactctttctggctccttcctgctgaaaaggggcattgtgtgtggaacagcagctagggctcctcctggggtcaatctaagggtcttcagatgaaaggtgtgtccatgtgtggttcggtgtacagcaccatttggagtttgattgctgtcggagccattccgatgggttgtaacactggtttgcctccaccagatgttgcatgttgtaacaatgaatgttgtaccttggtatcccagacgaggtccccagtatgaagtggctgtgttgtctggggtaaatacttgagattcgtcgtctcacgccaagaaaatttaggacatggacacgtacgaggagtttaggagtggaggtttcataggcaaaagaaagagaaggaaagagaaaggaaaacagtttgctctctagtgagagagaggggacttccaagaggaaaaggccctccgtgggttttgaaaataaactttatttggaatgattttagacttagaagaaagttacaaagatagtacggagagttcctgtgtatccttgatccagttgcccctaatgttagcatcttacataactatggtacatttgtcaaaactgagagatgaacattagtacattactgttaagtaaactccaaacttcatttggatttcattcgttttcccactaatgtcgtttttcagttcccagatccaatctaggataccacattgcatttaatcataagatttgtagatggttggtcaatagactcccaaggagaatttactttcctttcttcacctccacttcctcctttttatcttaactttggatctgaatctcaagaatttcagcagctcgtttctctggcaaaagataaatggacctttctggatcctttaacaactattttggtattgatagcttagaatttcaggagcatgctttttttgaacactcaactgtatatttgattttaataatgaatgggtactgattcttctgcctctctctgaagcttgctctttataattaccagagcctgcttcactgactacatgttcctaaactgccttccaaagaaaaatagttccctttctttttgtttcccctttcctttttcattcctttccctcctctccttcccctttcctttacccttcctttcatctctccgcatcccccacccccaacccccaccaagaacaacttgggatgtgatttaaataagcgtggcttgatataagatcattttaccttgcagaataaattatcttgttggaggtgtggtaccagattacttacagtttttactttgccctagggaaaatctgatgtaaaagcctctaatgaaacatatgtaatctgtattataattttacaaatcacttttcatgtacattgtggtcttttgagtttcaaagggtatatggattagttttcaaaattgaattatagtgagaaaattgaggaaaaaaagataaagttacttgattaggtagcaacagagctaggattgggacctctgtgttctgattctttctctgatgtcttttggtctccccttagaggtcatttcttttttttattattattatttttattttgagaccgagtctcactctgtcacccaggctggagggcagtggcgtgatctcggctcactgcaacctctgcctcctgggttcaagctattctcctgcctcaccctcccgagtagctgggattacaagtgcccgccaccatgcccggctattttttttttttttttttttttttttgkatttttagtagagacagggtttcaccatgttggccaggctggcctagacctcctgacctcacgtgatctgcctgccttggcctcccaaagtgctgggattacaggcatgagccaccgcacctggccagaggtcatttctgtaggtgtattgcatttatttggaactaatatataaaaccaaccccacattcagtgctgttaaccctttacccagaaatcagttgagttgacagtaaaccctttctggttaaggatagggctaattataaaatacattgggcctttacaatgcttttgtttatattaaaaacaagccagagagatgtttttggcacagtgtacactgtgcttacccattcaggctggtttcacaagttgaaggaagaaaattatcatgaaaaggacaagagaaacttagtgtttaggctgcgcggtggttcatatctgtactccagcactttgggaggccgcggtgggtggatcatttgagcccaggagttcaagactagcctgggcaacaggcgaaaccctgtctgtacaaaaaattagccatttgtggtggtgcgtgcctgtggtcccagctactgaagaagctgaggcaagaggatcaattgcttgagcccaggaagttgaggctgcagtgagccaagattgcaccactgctctccagcctgggtgacagagcaagatcctatctcaaaaaacaaaaaagaaaagaaacatgtttagaaataacattatatgtaagaagcaggagaggaaacaattccattggatgctgtaggacagggtagggctcaagaaccagaaagcaagagaggtaatcaaaccaagttagggaacacagagacatctgtcttctctttcgtatctttttaggctgtatcaggacagactcgtgggcgcatattagtaggggcccagaggagtcttacttttggggaatgttatcaggaaatagcttgaaactttaataccaactgatcatgaagataaaatactttcaagacccccccccttttttttttttgagacggagtcttgctctgtcgcccaggttggagtgcagtggcgcgatctcagctcactgcaagctccgcctcccgggttcatgccattcttctgcctcagcctcccgagtagctgggactacaggcacccgccaccacgcctggctcattttttgtatttttagtagagacagggtttcaccatattagccaggatggtctcaatctcctgacctcgtgatccacccgcctcggcctcccgaagtgctgggaatacaggcgtgagccaccgtgcctggccgagacgccatttttatgtaccctagtgctatcttgcatagaaaagatcttgtttctctttttctctgacttccagtgttgggcagtaccatctttctgctcttatgataactgaaaaatacataactattttaattgttgttttaaagaaacaagcaattctttttatttttaatgtacacatgtgtctcacacaaaaggccacataagacttgaatttgccagtagtagggcatgcccactcttggcatgtgtgctagctaatgttacacttgtctagatgttagtgtctttcttaaaacattgtaattattcacttttttttttcagacggagtctggcactgttgcccaggctggagtgcaggggcacaatttcggctcactgcaacctccgcctcccrgattcaagccattctcctgccacagcctccctggtagctgggattacaagcatgcaccaccatgcctggctaatttttctattttaattgagatgggatttcaccatgttggccaggctggtctcgaactcctgacctcaggtgatccgcccacctcagcctcccagcatgctgagattacagacgtgaaccaccaccttagatggcttttgtrtcttaaagacagggccagttattagagatacaaatctgtgtaagacatggttctcattctcacagaactcctagctctaatggattcaaagtgaataattacaatgttggctgggcgcagtggctcacacctgtaatcccagcacgttgggaggccaaggcaggcggatcacctgaaatcaggagttctagaccagcctggccaacatggtgaaacttcgtctctactaaaaatacaaaaattagtcaggcgtggtggcacacacctgtagtcccagctactcggatggctgaggcaggagaatagcttgaacctgggaggcggaggctgcattgagccaaaatcatgccactgcactccagcctgggtgacagagcaagattccatctcaggaaagaaagaaaaaaaagccatttgaatacatgaattgaattatgggaacaatcaaatcagttaagatatagtgtctgttttctttggaaatactcttcacacaaattagaacttactttatgtatgtttccctcatgaaactgtaaactcactgaaggtggggccttcagtcactactgtatccccagcaacaaacagagagtatctggcatacagtaggccctcatatttcttgaatgaatgcaaggaaagagaggttgggacaaggagctaaggaagaactgaataaggcatggatgtgaggtaagtatatgtgctgaccaactagtacatgaactctagagcatccaagcaagtgagagtaaagtgagtaaatgacactgtgtgccttaacttacttgtttttatgacttcccctgaaatctctacttttcaaagagttttagcatcgtaaacaattgactgtatattaatataaagagcaatgtgaaaagtttattatcatataacattaaagaaggaaatactggagagttcagggctctctcatatccttttttctttttctgtaaaatattgatcacaacttgaatttatttgtttgttgtcattgatttgatctctgttgtcccactggactgaaagctttatgtgagcagagatcataggtgtatctagtacctagcacaggacctaacacaatagtattatgttggtgcaaaaataattgcagcttttgccattaaaagcaatgacaaaagcctcaattacttttgtgccaacctatagttgtttagtaaatacttgttaggtgagtgaatagagaagatctctctccacaccctgattcccaatccttatattggtagtgatgctggaaagtaacccaggcagcagaacttgagtagcacctgcttctggggacacccttcacctacttttaatcatgcattctaagaatgaaactggtgagtgttctgaacagcctttggttctaattggtaggccatgtggttttacaatttggatgccactaaatgatttttcaggcatataggataaatataatgtaaaatacaccagtaaaataggtataattcactgttgcaaagatgggtattctaattatctgcatgctgagcttcacttaaggctagcacccaacctgttccttctctgaccttcctggtaaaacacattccctagtttgaagctaaaagtattggtgtctgttgctgaattaagttgcatttgcttattttttctgggactggtgcctgaaaattagagaaaaaatataccaattattagcagatcaagctttaggaatttataggaggctatgaacttagagtaaggaaataccatccgaaactacttttaacagttaatattggctgggtacagtggctcacacctgtaatcccagcactttgggaggccgaagtgggaggattaactgagcccaggagttcgataccagtctgggcaacagtgagacctcatctctacaaaaaaatttaaaaattagctgggtgtggtggtacaagtctataatcccagctactcaggcggctgaggtgggaggattgtttgagcctggtgggtcaaggctgcggtgagccgtgatcataccactgcacttcagcctggacaacagagtgagaacctgtctcaaataaaataaaaaccagttaatatttattagtaaatgtactacactgtatataaaagagaacttagaagatactgcatcatatcgtatgcattaaatttagatagaaaattcacagaagtgcatctagagataacagattttatctctttattgggttgttctttagccattttcttccccttgacaaacctttagtggtagtctacaaatacattttatggaagaagtatgttggaaaatgaaatttctctcctgttggaaacttttgaacaaattaacaatttttagccagagcttgggggtccattttcactgctctttgtcctctgctccaggagctatgtgtgaatttgttgtggtctctgttgccctgtgtcctccaggtcctgggaggtccatagctaagatgccaagacaccatggaagctgggaaatgtgttgataatttgtgacagtggatatccctggtctgtatcctgttctctagatgtctgagtttaatgctaaacttcatgagatgggagttgacacctcctagaagtgttcacatgattgtttattaaattattcgtttgttaaaaaggaatttgagaaaaaaattatttgttattcattcttaagtttttcaatgtgaaaaaatattaaaaatgatcatggaaataataacatgtttattgtcaaaaaattttaacttaaaaactgaatcattgttcaaaacacagcaaaagatgatgtgccttaaaacagtatcagaggaaaggctacttactgcttattaggtggattaaacctgcttcgcactatttacttgccatgatctatcattggcatcacgaacatgggtggagcatatttaatttctccatataaagtaagcttaaattaggccaaattagcattacatagggtagctcttgacatggcattgcattagaattacctgctaagctttttaaagagatgaggtctaggccccattccagaccaattaaaaaccttcccagatgatttcattgtgaagggtaagggttgagaatcactggaatgagagaaggattacagggataaggatacagaatatttggttccagtcctggcttcatttcctagtattttgttgaggaattttgtgactatgttaataaggcatattcacctgtagttttgttttgatgtctttctctggctttggaatcagagaataataccagcttcattaaatgagttggggaagtgttttctcctctgtttcctggaagagtttgtgaatgattggtattctttttaatttttaatttatttttttgagatggttttgctctggcacccaggttggagtgcagtggtgtggtctcagctcactacagcctcgacctcccagattcaagtgattttcctgcctcagcctcccgagtagtttggacaacaggcacttgccaccatgcctggctcatttttgtagaggcagttttgccatgttgcccaggctggtctcgaactcctgagctcaagcaatccgcctacctgggcctcccaaagtgctggaattacaagcatgagctaccgcgcccagccagtattaattcttaagtatttggagaaatatatcagcgaagctttctggacctgggcttttctttgtgggaagattactatttcagtctccttacttgttatacatctattccgatgttctatttctttcttcaatttcaataatttatgccttcctaggaatttgaccattgcatttctttttctttttctttttttgagatggagtcttgctctgttgctcaggctggagtgcagtggcatgatctcggctcactgcaacctctgcctcccaggttcaagcgattytcttgcctcagcctcccaagtagctgggattacaggcgcgtgccaccacatctggctaattcttggttttttttttttttttttttttttttaatagaaacagggctttgtcatgttggccaggctggtcttgaactcctgacctcaggtggtccaccctccttggcttcccaaagtgctgggatcacaggtgtgagctaccacacccggcctccttttgcatttctgatttttgtatgtattttctgtttttttcttggcagtctaggtaaaggtttatcaattttgttcttttcaaacaacaaacttttatgactattgattttctctgttgtttttgttttttgttttgttttgttttttgagacggaatctcgctctttcacctaggctggagtgcagtggcacaatctcagctcactgtaacctccgcctcccgggttcaagtgattctcctgcctcagcctcccgagtagctgggactacaggcgcctgttgccacacctggctaatttttgtatttttagtagagacagggtttcaccatattggtgaggctggtctcgaactcctgacctcaggtgatctgcctttctcggcgtcccaaagtgctgggattacaggcgtgagctaccacacctggcctgtttttctgttttctgtatcattgcttaccactttaatttccttttttctacttaccatggtttaatttgctcttttcctagtttccttttttaaaattagctgaatttcatattcatctagtttcttaaggtaaaggcttaccgcatgtatttcagatcttcttttccagtgtaggctgtgaattttctaatataaacctatgagtttccctctaagcactgtttcagctgtattccagaaattttgataaattgtttagttcaaagtactttctaatttctctcattctcttttgacccattggctgtttaagggtgtgctctttaatttctgcatatttatgaatttcccaaattttcttttgctctttattatgtttctttatatatatatatatatatatatatatatatatatatatatatatatatwtataaaattttggagatggggtcttgctgtgtcacccaggctagaatgcagtggtacaatctcggctcactgcaacatccacctccagggttcaagcaattctactacctcagcctcctgagtagctgggattataggcacccgccgccatgcttgcctaatttgtgtatttttagtggagacggggtttcaccatgttggccaggctggtcttgaactgctgacctgaggtgatccacctgtcttggcctcccaaagtgttgggattacaggcgtgagccactgtgcccagccatatattctttatatacataatatttatagagatgggggtcttgctattttgcccaggttggtctctgactcctggcctcaagcgatttttctgcttcagcctcccaaagtgctggggttgtaggtgtgagccaccatgcctggcctgtttttgatttctaatttaattccattgtcatcacagaatgattttaatccttttaaatgtactgaaatttgttttattgcttggtatgtgttgtgacctggggagtgttccatgtgtgcttgaaaagagtgtatattctgccattgttaggtggagtgttctatatgtttgttaattctatttggttgatggtgtagttcaaatcctatatgtctgcattagtctgttttgggttgctaaaaggggtacatgaggctggttaatttataaagaaaagaggtttatttggctcatggtttttcaggctgtacaagcattgcaccagcgtctgctcagcttctagagaggcctcaggaagcttttacttatgacagaaggcamatggggagcaggagtgtcacatggcgagagagggagcaagagagatcccatgctcttttaaaccagcatgcacatgagctaaaagagtgagaactcattacttgcggggagggcaccaagccactcccaggacatctgccgccatgacccagacacttcccactaggccccgcctccaacattggggatcatatctcagcatgaggtttggagggggcacacatttgaactgtttcaatatccttactaatttctacctagttgttctgtctattgttgagagtgaggtagattgcgatttttagaggagataaactcaaatactccttattcaaagttagttaaataagcaccatgcaatttattaaaatgtagaaatgctctagtattagttgtaccttacaaatgccagaaatgacatctattaatttactttctagtatactggggctattttaatgtttttagtgtgaaggtcattgttaattctcatgaaaactgatgcattcaaacttggctccaaccagaccagtctttcagttgattgtttctggatagcagtttcccccctgaagtatgacagcctccagagttggaagccaaatatctgagtgggggaagagaaaagatttttkagaaggcttgtctgcattttggtctcctcaagcatatacacctcattaattttcaaatgcagcactgttttggctggcatataatttctagtccaggggcatttcctttactcatcaacaagtttgttttggagccttttctaacataaatattctgaaaagtggtggccaagtttattgtcatttgattagaagtttcatgagaaaaagacttgtcagtattcctgagttacagctcagttaatgaaatgtccctacagtctgagaatcttccttgagaggacttagctgggcaaaagattatgtggagggaggggtcttgtttttttactgtcctgttcttcccatactaaccccaccttcctattcttttctacttcctcataatttatactttatcttctgattgtagaagtcttggtggaatcaatacatgtataaggtaggaacagctatcaactgcatgtttcctttccagtgaaatccaggacaaatgaccggtggaagagctaggcttgagaactccacttcttactcctttcttgttccagtcttgattgacccagctgtttgatgtgttcatttcttgggtattacccctcgaatcctatcaacatccttccatggtcttacagggcagagatatattaaggtcactccttggcttttccctcacccccaaagtagctagttattcaaatagcaattgatgcctttgtttgaggcaggtaaaaaacttgattatttccatggagagtggagaacctagggtttttcactttatggttgggtttcttttctttttattccattcttttctggcaggcaactcagttgattcaccacccatcagctctaaagacatctgttcatctatgtataggttgttcacacaggcccatttagaaacatgatatattaaatttgtggaaatcagtaacagtaaaggattaaagacttatgcttgtatacaaataaatatttttgttgagtctttattggcttggggaatgatgagcaaatctaagtagtgatatacaatgacatagaaagatgtcaaaattcctactctcctaaatctccataggcttatactgtctgtgaaaaatcatcatttgtttcagatatttctcggtgagagtggatgtgtattaaatttatggcctctgaaatttattcctgattttggtaactttggcagtgaacacagaacatatggctctgtggtatttactgaaagtaggttattaaataattgcttctaaaatgaataatcctaaggtctggaaatgtaaagtcattttgtttagaatgcttagaattaagaggaattaatagaccaaggaaacaaaaactccatataaacagctgtttctttgtagttggaagtcttagacgatggatcatttttagtctacacagataaacataaagcagataaattataaaacaaaatgaattataggttgactgccataattctgagtttactgcttcagtcttttttccccctctttgtaaccattgaaggttatgcagtgcataaaacaacacatacctaaatcaggttattgcagtacccaagatgatactgatacaggataattctgttatttgagtggggaactttgtcagatgtcagataagcacagagttcaaagttaactcctgggagggacaagatggaattttcagataactgaactttaatttcattcagttttagagatggaaaaggtttattagataagctttcgtctttgtactggagctgtatatgtgtgtgtataaatatatatatatatatatacatgcataatatatacacggttgtgtatatgtgtatgtatatataagctgaatatgcctttactgtaatctccacagaaaacttgaatcaaatttattaaatgtgttagctttcataaatttaaatttttgcgttcatgaagcaagaagtttttcaatcaagaagtttatgtaatatccctatggccctattcatatatggtttacttaagaaggctagtggttaatatttcaaaattattcttggattaatagccattgcttatgttattgtttctttgaagtgttcagacttactgaattgcattgttcccttattctctgaaataaaattaatttgtcacatttaataattttctaatagttcatcttacactgggctttagaaacactctaaaagatgacaattatttgcccttttatccctcttagattttatcctgcttggctctcctttttctttctgacaaagaggcacattgcatatgatcaggtgcctccactttagagtcacagaaatgtgggtacgaatcctagttccagtacctttgagctgtgtgacagaaggcaaacttttaaaggtctgattcttagtttcctcatctgtaaaatggagataataactgtagcatcctcacagggcttttttaaaggattaaataagttaaaagcatgacagtcacttaacacagggtctgacacatagtagcacactcatttattatttgtgttttattaatgcaattattgttgctgatctatggttataatttttttctgaaatcaacttcctagagtaaatttgttttactgaagttgatcacctgaattcctttcactctggtcgaaccatctgttttagcccctttgtctgtctcaccagagaataaacccaggtgatcacactccactcctgttatcacagtagagcaggctttcagaagatcctagagaggcaaagtaaggagcccaggttttggaatcagaatgcttgtctccaaatcctgttctacctcttattagtgggatagccttaggtgtattacttaaacctgctgggcctcactttgcttctcggtaaaataggattaataatacctatcttggccaggcatagtgcctcacacctgtaatctcagcacttttgggaggctgagacggacagatcacttcagcccaggagttcaagaccaacctgggcaacatggtgaaaccctgtatctacaaaaaaaaaaattaaaaaattaccgggcatggtgtcatgcacctatagttccagctactccagaggctgaggtgggaggatctgttgagccagggacgtcaaggccttggtgagctgagatcatgccactgcactccagcctgggtgacagagtgagaccttgtctcaaaaaataaaacaccaaaatgtatcttcatatggctgttaggaagagtaagttaaaatataaaagaatgtaaaacagtgtctggcacagagtacgtgcgtcataagtgtcagctattattgtagctcctgctgtttttatcgatttagttctccaaggctttgttcttaacaatggtaatttgtaaaataataatagcctcttggttcagtttctcagactgtttgtaacatccttttgagatccagttcagtacaagaaaccattgttgaatgcctactatgtattaagtgctatgggggacatatatcagtaagggatattctcttctctccaggaacttataaactggtaggagaagtaagatgttcaagggctactattacacaaggcaaaatattatacttttccctaacatataaaaggtagctcacaggaggcctagagtaactgaatgctgtggagtgagtggggaagttcagatgaacagggtaggcatttccaggtgaagtgaataaaagaggtaggaaaaaattcacggtacttgaggaagagtaactggccaggcttgattaagataacttgaaatgggagagagacactacaggcaaggacacagccagggagctaccactgcagcatgggaaaacatggcagggtaaaattgataagaggggagtgtgagtgtgaggaggtagagttgaagttggcccagacatttaaaaaatactgggaaagatagtgatatcattaaagaagtaagaaggatgggaaggggattaggtttttgggaggaaaacaagtttggctttggatctactgaatttgagatgtaggcaggcgcatggttatggttctgcgattcttggacgcctccctaaaagctactctgtggatagaaaaaggcagatattaagatgattcccagtagattctggttcctctcagatgtgacttggaaggcccctacacctgaagacttaattatgtaaggaggctttccttggcccgtgggatcctcctaaccctcctcctctgaacattttcttttttttctttcttttttttttttagacggggtcttgctctgttgcccaggctggagtgcagtggcatgatctcagctcactgcaacctctgcagtttctcatttagtctctgaatgacagctgtgccattgtcattctgtgtagtttgtagttgtaacaccgtttaggtttaactggcttttgaaagaaagatagttgttttttttttttttttttttttcctgagacagcatctcactctcgttacccaggctggagtgagagagagtagtgtgatctcggctcactgcaacctccgcctcccaggttcaagcaattctcctgcctcagcctcctgagtagctgggactacaggcgcgcaccaccacacccgactaatttttgtatttttagtatagatggggtttcactgtcttggccaggctggtctcgaactcctgaccttgtgatccgcccgcctcggtcttccaaagtgctgggattacatgtaggcatgagccactgtgcctggctgatagttgatttttaacttaaaaaaaatccctattaagttttttcattaagcagtattgccagagtgaaaataagagaaacacccatcagtctcccctagcccggatgtgctttgagtcatctagctgaattgtttcacctcaacagaaaaggctctaagtgaagagaaagaagaaaaacagaggcatattaacggtaaaatattttctaggctagaaaaaggcattgcttggtgaaatggctataatttttagatacaaaagaaaaagagtttacaaatagtacttcctgatctgtgtgagtagttctttcattcactatacttatggtggtaaacatttgttaagcgtagagcatctggaaagctttttttgctgggtggtggtcctcgttaggatattttgagtttggaagaggtgtttttaaaaaagttttaggaggaggaytcagtgttttggaggttttgagcaaaaggcaagactctgatgctttgtggattgttatcgccctgcaagacccttcgcaacttcctctcaccgcccacagcagaatacggaaactctgctgtatcaggccacttctgcaattacagacagttgcacttcaaggggacccttctttcacactacatccttctgtttttagactttttttgcgtttgaaaatgtgttttttgaggtggaatacccaactgacccctcatctctcctctctytctgctgccctgcagtgctacagttgaaactccagcagcgccggacccgggaagaactggtgagccaagggatcatgccgcgtaagtgcctctctctctcagcatttggtagattgcttttaggacatggctgtgttcaccgagtatgccatgggaagcatctaacataaaacaaggatgatgcgttttattttccactctcttctttctcatgactttccaagtttagagctcaatcactaaatagttaagataactaattgatcaagttcagtgaaacaaactgtgtttaaagggtcaarcctggtttaaattaggtgtaaagggtgccactgaattttcctttactttggaattgcacctttaaaagagttttcactctgttatacttccctttataggaggggcagatcttgagcctggtgtattgtgaggaagaaccacttctcccatatgctttgccttcatgttctggttcttaggaagagaaacctcttttctggtattttgaatcaaccacagttttatgtagagtgagatcctgagatactctaaggctggcctgggcgtgagcatggctgagtagagtcgttgatggcgctatcacggcaccgggctcagtgggtgcagaagtccatcccttaggggaaaaatgaaaccaaaccttggaatctgttagaagtaaggaaatttgcctttaataccaacagcattataaacggagctgaaactggagctggtgaggttttgatctttcggacctttcttttttaaatcatcagcagagaacataggctctcttttctgtttgtatgttatcactacttggatacactgtaagtcaaaaaacaatcatacaacttctggcttcatggtgggagaactgatgtttttcactttaactcattgtctgctggctgactgctaccatattttcctagctctcattcattcattcattcattcattcaaaatctttgagtacctaatatgtgatagttgatgcagcaagataaatccagctcttgctctcaggtgatttatatttagaagggcaagactagtagtagacaagaaatttcagagcagggatcaccttgaaatgcagttggtaagttcagagcctggtaagtactatcaagtaaattaactgattggtgtgttaataagtaataggaataagatggagtcacttcgaataagatgttcaagaaaggcctcactgaagaggaaagatttgagctgagatctaaaggatcagatgaagctggccattcagaaagcaggaagagggctcagagagaagaaaaagcaagtgtctgggcctggtgcaggccagaagttggtgtgtttggagatcatcaagtaagccagtgtggctggggcatggtggagagagagaaggggcaagtgaagatgggtaaggtgggcagggctagagccagggcattatcacccacatggaggaggtggatttggcttttaattttaatttttttttttaagacggagtcttgctctgttgcccaggctggagtgcagtggcataatctgggctcactgcaagctccgcctcccgggttcacgccattctcctgcctcagcctcccaaatagctgggactacaggtgcccaccacagcgcctggctaattttttttttttttttttttgtatttttagtagagacggggtttcaccgtatgagccaggttggtctcgatctcttggcctcgtgatcctcctgcctcagcctcccaaagtgctgggattacagcctgagccactgtgtccggccttcattttaatttttaagagatggggtcttgctatgttgcccaggctgaactcaacctcctgggctcaagcaatccttctgcctcaggctccttagtggcagggactactggtgtgcatcaccatgcccagctggatttggttttaagtgcaatgggaagccattgaaggcttttaagcaagtcagaatggacctaccacaatagtgatagggtccatttctaagagaaccttataacaagtgtaagaagcctggggtctatttcttttaacttttttttttttttttttttttttttgagacaagttcttgctctgtcatccaggctaaagtgcaatggcatgatcatggctcactgcagcgtccacctctctggctttcaagcagatcttcccacctcagcctcctgaatagccctgggactgtaggtgtgagccatcatgcctggctaattatttttactttttatagagatggagtctacctatgttgctcagactggtcttgaactcctgggctcaagcggtcctcctgcctaaccctcccaaagtgctgggattacaggtgtgagccaccttgcccggcttggggtctatttctatcctaaacatcagcccagggagcttaagtcccaaattaatctttttgtttactgcagttcactgccagactatttacctacattatgctgtcttctgtggccctccagtgaaggactctctacccccagttcttaaagtgttaggtggcttgttcattgtatcagcaatgtgatcaggtagggcaatgctgtgctttacaatacactccaaacctcccagtccatactgtggagaaacaagatagctacccagtttctcatctacttgtccctttcaccaaggacatcatatacttagtgtctactttgtgcctagggtagtcctagatgctaccaagattaaagaagtaagaggcatggtatctgccctcaaggcattgaacagccaaaatttgggctgccaaaacgtacccatacacaaaataaagagcaattcagtgctgacacatgggctactaactgtaattacagcactaattctgagagcataatgctacttctcaggacctgtagtatgttcagggtctaaaagcagtgcacagattgagtgccctgctttctttttcctgtctttcctgtagtagcaggggctactggagatcattgtttaataggatttatctattagtctccttacttagcatttcttgtaatattctatgttgttaagacaaatgggccaggcgcggtgactcacacctataatcccagcactttgggaggccgaggagggtggatcacctgaggtcaggaattccagaccagcctggctaacatggtgaaaccccgtctctactaaaaatacaaaaattagccaggcatggtggcgcgcctgagaggctgaggcaggagtattgcttgaacctgggaggcggaggctgcagcaagccgagtttgcaccaccgcactccagcctaggcaacagcgagaccccgtctcaaaaagacaaatgatgctttggttattgcggttatctgcttatatgcttgtatctcctgctagactatgatctccttgagaaagtatcattcatgtgtgtrtatatatatatatatatatatatatatatatatgtatatatgtgtgtgtgtgtgtgtgtgtgtgtgtgtgtgtgtgtgtgtatattttatcagtcccgtccccagtgcctggcaytgaatgaaggaatgaatgaagacagccagttgtaaagtacagtgtgtgcatgtgtatatgagagagagagtctgacaaactgaaatagataccgctctattgaaaacctgttggaattctgggcatggagtttgaaacaacactcccattctgtcaggagcccggattctaaaattgtcctgaatatctaattgtatactttgggttgttctctgtgtctgtgaagtgagaataattgcctttcctgtgggaatagaaatgacctgcttctatgagaatattgcattttcccatataccaagatccaccttcagctatggacatagtcttgttatcagcttttctagagaaggaagtaggtaagaaatgcttagattatgagagagaatgttgaggactgggaatagtttcaggtgtgaatttcctcctcatttacgtccctgttggtacatggatagggtctggtgttcccaaaaacgaggctcttttttttttttttttttttttttgccagacccctacctagtgagtaaccctccctcaccactaccctgtgtcccccgactccttttgtaatctccaacatcctctgccgccccaacaccccgtcatcctgctgactcccactaatcccactcctcaccctccactccatgtcttttttttttttttttgagacaaagtctcactctgtcgccgaggctggagtgcagtggcgcgatctcagctcactgcagcctctgcctcctgggttcaagcaattatctcgcctcagccttcccgagtagctgggactataggtgtgcaccaccatacccagctaatttttgtattttagagatggagtttcgccatgttggccagggtggtctcgaactcctgacctcaagtgatctgcccacctcggccttccaaagtgctgagattacaggcatgagcctccacgcccggccagcctgaggtgtttctgaaaacagctctcagatttaagtttgttgtacaacttaggaggtaggcagagccctcaagccgagggaatgggcacgttagttatggctgtattttgtctcatcatttctggttgatatcttttatcaaattcttctcctttgaattttgctgcctccaggaaggaaaaaaacccatctacctcatcttccagaacacttgcacatagttaccacgtaggactggctgtcagtcctgacatcgtcatatctgtaggacacagtgtgcttcagtggttcccttcccttcagggttgttctgtttctatatgtcattcagtgttggggtctgacctttccataaagttgaagggattaaagaatcccctaattcctatatacctctctgtactgcttgatatgctctgatcatagcatctcaactgtgagatacagaagttggtttctgatgtgctattaaacagaatcattttgcagtattctttattctcatcatgtaaacataagtttcaaatttaacgtcacttaactctaccaaatacagagtgccagatagcagaggcttgtatggtctaggccctaaattttcactaatgatgtctcgcacatatcttgagggataggacagatggcagagatagggagctggtcttgaaatccaaagattaagaccaggaatgccactgtatccaggatgaagactcacagaagaaactggtcatatttggtacactttgttctcaaagcttcccctgaagcctttctctttgatgtttaaaggtgtacaaggtcataaggttaaggtgaaaatttaagaaaaacgttctggcatgagagctgttgcagaggataacctttcaaaggaaaacatggaagtttttctgacctagacaaatcagaaaagggtctcctcctgtattctttctggatgtgagagaagcttgtttgtctcttgtcagtcttttataattgagaatccttgaaataaagcatatagtaccatgtttctaatgctacagttaaccctcaacttactattttcccatgtgccagtagtagaaaaaccttgaataacacgtgaggaaataattatttttgtcgtatagatcttcgaagaccttgctctgtcttcttgacagagcttgtttttttcatttctaatgatgttcctgtgcacccatagcagagttaaaatttcttcttaaaagtgccaggattgattactacggtctctctctgtctgaagttgcatatctctctctctttttctttctttctctttctttctttccttctttctttctttctttctttctttctttctttctttctttctttcyttctctttctttctttcattctgtctctctctctctttctttctttctttttcttttctttcctttctttcttgacaaaatctcacttgctctcccaggctggattggagtgcagtggcgccatctaagctcactgcaacctccgcctcctgggttcaagcgattttcttgcctcagcctcccaagtagctcagattacagggaccggccaccacgcccagctaatttttgtatttatagtagagacgtggtttcgccatgttggccaggctggtcttgaactcctgacctcaggtgatctgcccacctcagcctcccaaagtgctgggattacaggcgtgagccactatgcctggtcctgcaattcttaatgatgtttttgttatttgtaacttgggaatcgttaacttacattattcttcaccaaatatgcaacctaggtttcaacattctttttcctgagtacatgtgaatcaaatacattttggtaaagctcttttaaaactaaattttttaaaaaaatggattagattgtgactcactaatgagatgttcaggatttagtaaccagtagacagaatctaggaccttaggctagcccagtttgtgcagagatgacaaaagaaatcaaaggatacagagacttcaacttattttatgataggctgagccgatacagtaacagtaatggtgataataaagatataaaatgagccaaaagaaaactttttaaaatttgtttatatatatttttgagacaggatctggttctgttatccaggctggagtgcagtggcgcaatctcagctcactgcaacctctgcctcctggcccaaaccatcctcccacctcagccttctgagtagctgagactacaggtgcgggccagcacgtccagctagtttttgtattattagtagaaatgcggttttgccatgttgcccaggttggtctcaaactctgggctcaaaatgatctgcttgtctcggcctcccaaagtgctgagatcacaggcgtgagccactgcaactggcctaagtttaattttatttattgaacaatccccgaaccagaataggtgcagagaggctcccctgaatcttttaaaatagtattttttttttttacagaagtttcagtttcacagcaaagttgagcagaagatatggagatttttcatatacccccctgctaaaaattataagtaatttttcattttttagtttttatagcccctggaaagataaaccaacttcctaaatcttcagtgtttctcgtaataagaccggaaggggttatgatttgacattgtcactatcaggctatctttattaaatacttggatgggctgagcctggtggcttatgcctgtaatcccagcactttgggaggccgaggccagcctggttaccatggcgaaacccagtctctactaaaaatacacacacacaaaaattaaccaggcgtggtggtgcatgcctgtagtcccagctacttgggaggctgaagcagggggaattgcttgaacctgggaggtggaggttgcaccactgcactccagtctgggcgacagagtgagacttcatctcataaatacatacatacatacatacatacatacatacatacatacatacatacatactgggataccatgggatctttttgttgttgttgttgtgtcccccaactcctgttgtaatctccaacatcctctgccaccccgacaccctgtcatcctgctgactcccactaaccccactcctcaccctccactccatatgtttttttttttttttttttgagactgcatctggctctgtcacccaggctggagtgcagtggcgcgatctcggctcactgcaagctccgcctcccgggttcacaccattgctcctgcctcggcctacctgagtagctgggactacgggcacccgccaccatgcctggcaagttttttgtatttttagtagagacggggtttcaccgtgttagccaggatggtctcaatctcctgacctcgtgatccgcccgcctcagcctcccaaagtgctgggattacaggtgtgagccaccgcacccggccgccatgggatcttttctccaagttatgaattcaaaagaactaggtgctagaccagccctgtccaatagtatgttaagtgaagatagaactatttctataagactaaccattagccgcatgtgctgttgaacatacttgagttgaaaaactgaattttaatttttatttaattttaattaatttagatttaaataggcacatgtggctattctaattaaatagtcacatttggctagttgctactgtattagaaagtggagttttaggccaggcacagtggctcacatttgcagtcccagcacatggtgaggccaaggcaggaaggtctcttgagcccaggagtttgaaaccagctggggcaagatagacccccatctctccaaaaagtttttaaaaattagccaggcatgatatcacatgcttgtggccttagcaacttagtaggctgagacaggaggatggcttgagccttaaacccagaaggtcaaggttgcagtgagctgtgttcatgccactgcactccagcctggatgacagagcaagaccctgtctcaagataaatacacaaatatatacatacatgcatacgaacaaaagaaagagagtcttagaccttgctctgttacttaggagttagaagactttgggcaactcagtaacttttctgaactcccagtttcatatagttgggataataacccatcttaaaggttactcacagaattagttacccatggagtgataacttacccacagagtgagtttggagatcaaatgagatgatgtattgttcgtgcttttgaaatgtaggaagtaatattctcatttaagaatggaggagcttggatccaccatcttgatgttgtgactatgaaagcagctttaatatacacacacacacacacctacctctaagttatgtcaaaactagtatttaggaatgcaactgggctgggtgtagtggctcatgcctgtaatttcagcactttgggaggccaaggtgagtggattgcttgagctcaggagtttgagaccagcctggacaacatggcgaaatctaatctctacaaaaaatacagaaattagctggatgtggtagcaagtgcctgtagtcacagcttaggaggctgaggcaagaggatcgcttagcctgggagctgagattgtgccactgcactctagcctgggcaacagagtgagaccctgcctccctcacacccccacccaaaaggaataggaactgttttccaataaatacagttcttaattttactttctttcctatcagtggattaaaagacaattgctataaattgttagaaatcaaagaaccactagtcagcatggtactactctgttaagatcattctccttttggtcatatattagcaggactatcattttatgagcttgccctcttcctgggagtagatgtttctttttaacctctttctcttgaaagcaaacaaacaagtggctgtgttagaaatgtttttaaatttctgggcaacttaccaagagacagaaatgtttaccagtgggaatgcagtagtgattccagggcagatgagggtctggtttgagagtgatctgtcctccatccccactcctattttttttaacaatttttttttttaactaaaattgtaggtttcaagaaaatakcacttgtttgcttttaagtggagtgttacactatcaaagacattaagtctcagtggatacttcatcagtgagtgagtttgggtggggactaaggcaagggcaaatcctctctctctgggcctttatcatctctcatacgctctagtccatttgggagttactgaaagctctgtgtgatcatctctcaactgctgcccctgtgtgtcaaagaagtttggctatgatccacccagtgcccctttccaataggagcccagaaaaggctttccccaaaccttgcagttggccctctgccccagtccggtcagtgccctcggactcccgcttccgtcagagctcagttgcaggatatggtggtgtaacccatttggtgatcgtttccttatcttttcattctttaagaggcagagaaccctacctagtgagatgatgtgtcctcactacaggaatgtgactgtgtaattgtagttgaatccctagtttaagttgcatttgataaacatcacagtgaaacatgttttccagaagtgaggctgacctgatccctagagttgaagctgagagaaaattgtgttaggtatgtggcttcaggaatcttctcttttatcacaggagaaggcacatcagtcccaggcattttacgttgcatttgtgtcaacatccttgtctcgcttctgctgttgtagagtgtgtttctacctcagtgatcagtgactagcatagaacctccttcttggccagttgccaacaaatccttaaataatactctgcagtgagtggtgtgttcatgttctgagtgtattcatggttcggtccgaagaagaatccaaccatgagctgtgttgaataggccataaaaagtagtcgtcatcatttttttttttttttttttttgagacggagtgttgctctgttgcccaggcaggagtgcagtggggcaatcttggctcactgaatcctctgcctcctgggttcaagcaattgcctcggcctcctaggtagctgggattacaggcgcctgccacccacgcccggctaatttttgtatttttagtagagacgaggtttcaccatgctcgaactcctgacctcaggtgatccgtccacctcgacctccccaaagtgctgggattacagtcatgagccattgtgcctggctgaaagtagtctttttgatatgagttcttgttacagtttgatgtctaaaaagtacagcaggtgttaagtttcattaataattggttattgaagaatctgagatatccaaggctaacttcttatcaagagtaaaagaaggttataacgtcacttgtaggtactactcaactattttacctgaacaatacacatcttaatcacatgcccaaggggagtcctgatagataactgatgatggtggtgatttaaaagtcttcaggccaggcgcgatagcttatgccagtaatcccagcacttggggaggccgaggcaggtggatcacgaggtcaacagatcaagaccatcctggccaacgtggtgaaacctctgtctctactaaaaatacaaaaaattagctgggtgtgatggcacgcgcctgtcgtcccagctactcgggaggctgaggcaggagaatcacttgaacctgggaggcagaggtggcagtgagccgagatcacaccactgcactccagccttggctacagggtgagactctgtctcaaaaaaaaaaaaaaaaaaaaaaaaamccaaaaaaaaaaacttcagccaggtgggatgttatttgcaggagggcacaggtgacctggaatttgtattctaaacagatcacttagacgtattgattatggggacttcaraaagaggcagtagcttttttaaaaaaattggtttgcactttgccaaaaagtatactggagtgaaaatagactgatccagggtcttagactgggctgtggtatgaaagctagatataaacatgcctggcctatgtcaaagagaagcctagaaggtcagattcaaaatatttgaccactggtatgttaaccttttggaattccctgtgtcgatactcgtgctaaatgagattgtgtgctcacctgtctcagtcttgagcctctttgaccatcagtgggtcaagagcaggagacgctggaacagtttgcactcttgggaaggaaaagattgagcatcctgcgtctccacttcttacattcattcttgggagttggtcttcctgctggtttgggtgggggtgatagccggtgccaaaacgggtggtggcaagcgtgcataccaaaacaggatgtgtatgaagaaccctttatgactgctagtttggatcgttgcttgccccagaatatgcagtcccttctccacaccccgccacccaaatgctttcattgattcacatgaacttaattttggtgctcatttatcatggtcagtctctcgaactgttgacaactctttggttgatggtctttgttaaaggatttttgtaggcatttttagtgtgtcagctaaaaacagaaagacaaaaaatggaagtcaagcccggtccaattagctctcagcatttgactccatatacctgctgtttcttccagaatggtaataaaggaaaaaagctacatcagtaacagcccttaaacttaacatagcttctagcagatggcaaagcactttcattttaatgctaataattacccagtgcagcagttagtataattgccattttgcagatgaggctactgagcctcagaggggtcatgggacttgctgtaggttacacgggcactgaaagataggcagacccaatccgggttttctggctacaaaccctgtgctaattcctgaaagtcacagtttatactggttcttgtccacattggaatttttgtgatgacagcctgctatgctttcgccaaaatttcaactttaaaaaatctttgaaaattgaggaggctgggtgtggtggctcaagcctgtaatcccagcactttgggagattgaggtgggtggatcacttgaggtcaggtggttgagaccagcctggccaatgtgatgaaaccctgtttctactttaaaaaaaaaaaaaattagccagctgtggtggcaggcgcctgtaatcccagctacttgggaggctgaggcaggagaatcacttgaatctgggagatggaggctgcagtgagcccagattgcaccactgcactccaggctgggcgacagagttagactccatctcaaaaatgaataaataaatacactattaaaaaaaaaaagaaaattgaaaacagcatcaaagcaggatccatagttggtgagatcaggtggtggaagtgtcatttgtaagcgcttcagtacaagtgctttcaggttgctgttcatttgaaggccatgggcatctttcttcttctgtcataataaccctttggtacatcagaggttcttgatttcttttgtgccatatattcttcatagggaatcttccacatcctctcagagttgtctaagcaagcacctaaaattcacatagttccagggatctatagctgctctaaagtgggtacagtgtgctctaggttaagagattctgatctacccggatatggaatcctaagaaaaatcctatctaatgctagtgtcaacccttacataccagtgacacagccaacctcttctgtcactcagtgtgtgagggaccctctccattccctgcactaccagtgaacctctgtgctcctcaccttttgggtgctaagaccaaggactacatttctgtagctgctttccattgggtgactaccatgcccctgataaaaatatcagggtgtggaatccatcccatctgaattaagccctagccagggtgtgaggaagatggcaaaaagcccagattctctgactcccagaaaaatatgcattgcaatgatcctgaaaggagtccaggaaattaaaactctttacccacacagccaacagaattgacattttgaatcaagctattgagaaaattcagcaagtccttctttactaagtgtagttttaatcagcacctggtattagagaataagcaaataaaattcttactttctcacctcttctttgcctttgttagattagggaagcaatgttttccgaatttagtggctttagcattacccaaagagcttactaaagattattcttaaggcctaggaatctgcattccaagagattcttgcacaccacagacattttcatgcaaatgattcttgaactacacttggagaaaccctgggctgtggactgctggcctctttccccttttcatttttagtgtggcacagaatatttttattctcttcttcccaagagttctgaagtagaagattgccctgtccccatgattcaagagttaatggcaaatttccgttcttttcttttctttttttttttttttttctcgtttggagaccgagtctcgttctgtcacccaggctggagtgtagtggcgcaatctcggctcactacaagctccgcctcctgggttcacgccattctcctgcctcagcctccagagtagctgggactacaggcacccgccaccacgcccggctaattgtttttgtatttttagtagagacggggtttcactattttagccgggatggtctcaatgtcctgacctcatgatccacccgcctcggcctcccaaagtcctgggattacaggcgtgagccactgcgcccggctgagagttaatggcagatttctaagacagctgacgcttttgcatataagatgactgggtacagaaaaattctgagcgttcatctccaatgctcggaaaagcctggcttgcctgcctctctcatagctttgtaccatatcgctggtcatttttggcaagtcagttaactgcctaaagctgtatgagaaactaatgctagggccaaaggatgtggcaaaagactcagttaactttggatggagtttgattatacagtgactctcttttctgctgtgctgaagggaaaagaaataggagaatttgtgcccctttgacattttctgaggttagatctgaagccttccctgctgtctcattgccaatattagagaaaatgacaaggcagcatttatttccaaaggaatagctaggaaaagatggccmaatgtgaaagactagattaaaatcactgttgtctgttatttatttggtaacccatcatgcattttgtttcatcttggggttttttatttagagacaggtctagttctgttgcctaggctggagtgcagtggtgtgatcttggctcacagcaacctttgcctcccgggctcaagtgatcctcccacctcagcctcccgagtagctgggatcacaggggtgtgccaccacacccagctaatttatttatttttttgagacagagtctcgctctgttgcccaggctggagtgcagtggtgtgatcttggctcgctgcaacctccgctacccgggttcaagcgattctcctgcctcagcctcccgagcagctgggattacaggcgtgcaccgtcacacccagctgatttttgtatttttagtaragatggggtttcaccgtgttggccaggatgctcttgatctcttgacctcgtgatccgcccacctcgtactcccaaagtgttgggattacaggcgtgagccaccacgcccagccccagctaatttttttgtagagatggggtctcgctagcttgaactcctgggctcaagcaatatgccctccttggcctcccaaagtgttggaattacaaccacaccgggcatatcacacacttcgttttctatactcctttaccttctgccacctcttgatgaaatatatgtaaataaaaagatttggaatcaaaagaaccagagtctagtgttcattctgtagttgattaggatgtgatctcaggaaagtcatttcccaactgtaaaatgtggaaaatagtaagtactgagaagctgaagtgaggtaatttctaacacattgtggaggttattggggaaaacaaggagaccattttcagcaaacctgtttatttatgttacctcagaagcctttttgtcagtgtcaaggttcgcaggcaccattctactttatttcttctcattatagttcacagttttacagggtcctgtgtggctttgtctccctgtgtttccacccactcttcttgttttctgccaccctggcctccttgatgccatgcaggcaggatcccactgagagcctttccacatgctgttctctgcttggagggctgtctcccagaggactgcagggctcactccctttttttacatctctcctccaatgtcactttttttttcttttttcttttttttttttgaaacaaagactctgttacttaggctggagagcagtggctcagtcttagctcatcacagcctcaacctcctggcctcaaacagtcctcctgcctcggctcccccaaatagatcggactacaggtgcgcgccaccatgcctaatttttgtatttttcatagagacggagtttcactatattgcccaggctggtcttgaacttctgacctcaagcgatctgcttgccttggcctcccaaagtgctaggattacaggcatgagctgccacccccagccaaatgtcaccttatcagaaagtctttccctgaccactccatataaaatgacctcaccccatcactgtcacttataacttgctttatagttcttcatagcatatactgcctcctactgtgttacatgtttgttttatgtatatctttcttcaattaagtataagctccacgaaaacatgaataacccaacactaaaacagggtccgacacatgtaggctcgcagatatttattggaagaatgaatgagtaatgaactgttagcacatctgtaagtaacctcttaggggacacatacctctgactccactttctcacttcttattcactctttaatctgttgcagtaagtttgtgcttccaccaatccactggcatagctctgagaccactggctatgtcctaagcataagtgattctctggaaactttataagccttattttgcctgacttccccactgttagtgtctctctgtctttctgtctacaggctttttcttgaagcttacttggggtaatagctttgcctcctcccctcctgcctctgtggccctcctcagattcctgtgctgggtgggctctcttcatgcctgtccttgagttctgtgattctccaagacagaacacagtttctcccccacttccctaagtttactcgccctggatcacctgtccaggagtgttaatagcacaaccattcacccagtcactccaatttgttcttttaagtggcctcttgaacattactagagtgatcataaaaatgcagtccttgctattttgcaattttattgaaaaaatcaattttgtaaaaatcagttcagacaaggatcatcagtagatgctaaaactgttattaggcagttagttgtgggaaaacaggattttcacgtggcatcaaaatgataccccatagattatgtgttaattacaaagacagatctggtgtcacctttcaaacttttagcaccatcactggttatacagcctgataacatatgccccttgatgttaagaagtacatatacctatgttttcttcttgccaaaaatgtttaacctaaatctaatcatgaggaagcaaatttagaatacagaacattgtgcaagacaaacagcttagatacttaagtcagtgtcatgaaaatgaaaaaggtaggggtactgttctagattgtgaccaaattgacaacaaccaaatgcagtgcatgattcttgattaaatcttgggaccaggtgtggtggctcacgcctgtaatcccagcaatttgggaggccaaggcaggtggatcacgaggtgaggagttcaagaccagcctgaccaacacggtgaaaccccgtctttactaaaaatacagaaaattagccgggcatggtggtgggtacctgtaatcccagctactcaggaggctgaggcaggagaatggcttgatcccaggaggtggaggttgcagtgagccgagattgcgccatcgagattgtgccattgcactccagcctgggcaacagagcaagactccgtctcaaaaacaaaacaaaacaaaaaaaaaccccttggcttgggggaaaaatctaaacagctataaaagaacattttggaggcaattgaggaaattcagatatggactgtaggttatattgaattaattttttcaggtgcgataaaagtatcttagttatgtaagaaaatgtccttattcttaggaaatgcacactgaagaatttaggggtaaaatgtcataactgatatctgcaactttcaagtgattccataagtgaagaaaattacggtatatgagagaaagagaataaatatggctaaaagataactggtcaatctaggtcagagttataaagctgttcattatttgttctttcagtgtttctgtaggtttgaaaagtgcaaaattgagggagggaagggagttgtgagagtgtgtatgttgggggtaatgaaattaatatatggcagtcaccaggtgtattcttgataatttttatttatttatttgagacaggctcttattctgttgcccaggctggagtgtagtggtgtgatcacggctcactgcagcctggacctccccagctcaggcgattcttccatctcagcctcccaagtagctgggactacaggtgattgccaccatgcctgactagtttttaaatttttctgtagagtgggtgccgccacattgcccaagctggtgccaaactcctggcctcaagtgatccactggccttggcctgccagggtgctggggttacaggtgtgagccactgcaccaggccctcattttttttttttaaaacataaaacatcaagtcagaagcaactcccctgcccacctccatgcagttctgattatatccttcccttgccacatatcccttctctgatgaatgtggtggctacacgtcgatctcaggatgcaatccttaatagcacgtgagaaatatcgtgccatttcctttgggctccatggtttctgatgagaaatacgctgtcattcaaattgtttttctctgactgtaaagattttttcttttagttttccaaagtttaattatggcttatgttactataaatttttttccagttatcttatttggggtttaacttggcttgttgaatctgtagacttacatatcttgccaaatttgggaagttttcggcaattaatgtaagaactgtttcagccccaccctctttttcctctctttcatcacttctgtgacacaatgttagattttttattaaagtctcacaggctcctggggctctgttcttttatttcccttctccagtctcttttctttctgttgttcagattaggtatttctattctgtattctggttcaccgaatctttcctttgtctcctttattctgctgtaatatgtttgtaatatgttaggagtctctgtatgttctttcctgttttagctgaccctttgaatctggttcagtagggaaggtggggatggtgccatctcgttatgaccaggtggaaatagaagttcaggttcctcatttggcagccactgacatctgagttggtggtaggagagggacttctcattcggggcgagagttccagctcccaatgtagtctgtatgcacaccatggtgggggtgcatgctgttaccactgggcagtggcgaaagtcatggctctccaccagccctcctctgacatcatccagcagggactgggagaggtgccttatgaatgccagatagggaggggtgtttgttactggctggtgggaatgaaagcagcttcctacttggccctttctgacaccaccccagccaagggtattggggcatctcattacacccttgcaaggatggaagtctagattcctaacttggcctttagggggaggtgggaatgagaccaccatttttttctgtggtatttggagtagaacaagtatctaaaagttttctgttgtgctgggctgccctttcctaatcctttggctagagagaacatattttgctagggcttttttttgtctgtacccattggcatttttgggttgccaacatcttcagctttaagcctggatatatgaagcagaaaaaaaaagggagggggtggggaacttaccaccatgtctctttttttgggtcccatggtccctagctagttctctccaccttacagtatctacttttgcttgtttcatatagaatgttcagagttttaactagtacttagtgacaaaaatacagaaaaatgtctaccccatctgaagcagaagcctctacagtagtacattaagttttttttgtttgtttttgtttttgtttttttttgagacagtcttgctgtgtcgctcaggctagagtgcagtggcatgatcttggctgactgcaacctctgcctcctggattcaagcaattctcctgcctcagcctcctgaggagttgggattacaggtgtgcgtaaccacacccggctaatttttgtctgtttagtagagacggggttttgccatgttggccaggctggtttcgaactcctgacctcaagtgatcccccccgacctcggcctcccaaagtgctgggattacaggtgtgagccactgtgcctagcccattaaagttcttaatggagtgggcccagcttattcttctagccacattatcctcacttgaattccttggttcaaccatatcaaactacttgtagttctttgagcttgccttgttcttttataccttcatgtttgtgttctagttcttccttagcctcagctatctccccactcttccttgtctggctttggtgttcctattcaattcatttacacactgttcccccaggttaaattttgcctcttttgtcctttacagcaccttaaattaccactactgttttacttccatcttatatttgtctcttttccccactagaccatcatctttttgaggactgggaccccatctgtatattcttatcctcagtgactggcatagtgcttacttaagggctgcttattggatacatggatggatgggtgggtgggcgggcagatggagggatggatggatggaaatatttctagtttctacctcgtttgttaaatgggtttattcctatacacacatgtagccctcattgatgttctgtgtatatgctccctgcttccacactggaaaaagaaacccagcaggcttgcctgaaagaagggctgcttggactgtggcactccagtgacctctattaagtgtattatgttcatagcctttgagttcctctggttacagaattgttggtgagcttctggcgtattatcagagataggaaccatcatttttattacgataacacctaataaagcaacattcagacctagacacttaatacatattccttcatgatagtgatgaggaaatgaggtttcataatgaattgttgtcattccttgctcagaggcatttctagaactgcttgtgaatcctagaagactcatttacctacttgtttaagtaaatctggagctggcaagggaaaagtgttggcttgatgtcctaaattaccaaggtaggttggtttttaagagtcttcatacttactcttcagtgccagattaaatcaagaccattctggccctggggcccctgcgctgtcatcacacatctgtgtcgacacactgagcacagcactgagctcctcctttgctatatattggatgcctgtgtgaaagtgtgtgtgtgtgtgtgtgtgtgtatatatatatatayacatacatacatgtatatattttttccccccgagatggagtcttgctctgtcacccaggttggagtacagtgtcacggtctcggctcactgcaaccttcgcctcccaggtttaagcatttctcctgcctcagcctccagagtagctgggattataggcgcgcaccaccacgcccagctaatttttgtatttttagtagtggggggtggtttcaccatgttggccaggctggtctcgaactcctgacctcaggtgatccacctgcctcggcctcccaaagtgctgggattacgggcgtgagccactgcgcccagcctggatgccagtatgtatttaaaaattaagtggaaacagtttttcaccttttatatctttaattgacaaatgacctcatttaatttaggcagcaaacaagttaggagagaaagaaaatgggtgctggaaagagggaacaaaatattaattggtagttgtagccagccaggggcggggtccacatctagaactgaaactgtgattaagaatggcacacctcttggccacttctgttcatttgttttctctggggagcttgcttatttttcctttcaggattttctgcacacttcctttgttcacacaaagccacacaagagctccaatggaaccagctcctggggcagcaggaaaggatcgagaactaccctctgatattgaatatatatattcttataaacacacatgactcttgtctttgcattggtctttgggggcttctctttctagagactgctttcttggagtgtctgggaaaatgcagttttgagtaatatgctggctcctcctagcaaagctattaaggtagcagggagaggggagatggagtctaagatgaatgcagccctcgtagttggacacacatttatggggtaactttaagtcctttttttcttcaattggcagaggcctaaacttggaaacctattttctgcttcctcgtgtcttacctccttggcatggaacttgaggtgatctgactccccattgtcatttgctcctacagtcaagaaagcccagggcttaacctgtagcactcttacatcccttcactaggctaccctccacatggtggcttttaacaaagctggcgggacacacacaggagttgccctctccacctcaaaccccagtgcaccaagagcacttgctgtggctactccagcctctccccagatgaactgagagacacccagcaggaagtcctgacacaaacctgaaggaagaggggccagtgctccctcctcctttcacctggcagaagtagctgttgaaattgctgaatctgctatcagagagaagaattaaaaatgaggaaagaggagcacagactaagctggcctactcagggactgagagaaactgacacatttgtcagaaggtttagacaagggaagaaaggaaaggcagaactagacctgggttggggtccaccactcgatgaatgaatgatctggcaggttactgcatctcagccagtgtcagtttcatcacacatgaaataacggtccctgcctcatgggctatgaagaggatccagtgagattataatgttattattactataaaatgaaacagtcttttgggattggtcattatgatcttgaattcttttttttttttttttttttgagacggagtctcactctgtcacccaggctggagtgcagtggtgcaatcttggttcactgcaacctccgcctcccagtttcaagcgattgttgtgcctcagcctcccgagtagttggcattacaggtgcccrccaccacacccagctaattttcgtatttttagtagagacgggctttcgtcatgttggccaggttggtcctgaactcctgacctcaggtgatctgcctgcctgagcctcccagagtgctgggattayaggcatgatccactgcacctggccctatcttgaattcttttcttggtcttcgtttctggttcttctgaccagctattgtgtctcagcttctccaacttgtcttctagtatcagtgccaaaggctgttacgtggtgagctccaggttttgaacgatgattctcaatgcttgagagccctggggcccctcagacaggtctctgaacccctcttctgagccttctttgccttggtctttacctagtgctgtggccaagttgactcttgtatgttgcctggactcagatatgcatctaaacagtgtgtgtcattgaacattgaagctaccttgtccccctacccaacagtttcttttcttctgtctcttttttttttttttttttttttttttgagacagagtcttgctctgtcacccaggttggagtgccatggagcaattttggctcactgcaacttctgcctcttgggttcaagtaattctcctgcctcagcctcccaagtagctgggattacaggtgcctgccaccatgcctgactaatttttctgtaattttagtagagacatggttttgccattttggccaggctggtcttgaactcctgacctcaggtgatagacctgcctcagcctcccaaagtgctaggattacaggcttgagccaccatgcccagcctctcttctctaacttttgaagaagttaagaaatcaacacagaggagtggaaagaactctaggttgagggtgttacagaattaggttatatcttccaattcaggacacttaaaaaaattaggttataatcttatccctgctatttgcttgcctttcctttttggccctgtccttatctataaaatgggatattacctaccatgtagaatgattaggaatattaaattagctaacaggtttaaaatatctagaacagtgctttccatacaagcatccaacagatattaatccctttcttgccattacatgaaaatgtccttaataggaccaaataggaattcatatagagtaatccttccttattcctgaggaacacgtgccaagaccccctagtggatatctgaaactgcagatggtaccaaatcctatacgtactgtgttttttttttctatacatgtgacctatgacaaaattcgatgtgtaaatctgacatagtaagaaattagagcaattttaacaatacactgtaataaaagttatgtgaatatgggcccactcaaaatactgtaacatttttggaccttggttggcctagaataactgaaaccatggaaagcgaaactgcagatgagggggactatgtatgctgtagccatttcacctatcacctgtcctccactagtggtgcaccaccctttgtacatgaagatgatgtcctcaagatgttctggtgaattgttcttctagaagttgggtttgtgcctttgggtttgtgccttaccctttggggatagccagtgtgggttgttgaggcagcaagtcagccagggttttagacagagaatctctggctgtggtacagaaactagctggcctgtaagtgaatcaagccagtgattcaaccaaattacagcatttggtgacagcaacacctgaatatatcgacacatataccatttggttcagggcactctcactggtgtttcttccttacaagggttctgagaggtgggcagattctcactctggaagaaaattagacccagaaagcagtcaaaacccatgtcacccagcagtaattggtagcactcagtactagaacacagatcccttgactgtctatccagaacttctgtgaggtttcgaacccggttgagaaccagaattctggctgtttagatgaaagtttagagctctgccgcagaatcctcctgtcctcctgtcactagtcaccttgtgtccgtttcttacagaatactcactaattcatcgagtgaataattattgagggtatactgtgtgcctggtattctaggcacttggggaatgctgtgagtgactaaaaaaatagacaaaacccttgctgtgctctgatggggacatgttgtaaatgtaaacgtgggagactgagagtaaacaagaaaagtatgtagtattccgccttttttttttttttttgagayggagtcttgctctgtctcccaggctggagtgcagtggcactatcttggcgcactgcaacctctgcctcctgagttcaagtgattctcctgcctcagtctcctgagtagctgggattacaggcaccctctaccatgcctgtacaaaaatgtttgtatttttagtagagacggggtttcaccatgttggccaggctcgtctcgaactccttacctcatgatctgcccacctcggcttcccaaagtgctgggattgcaggcgtgagccaccatgcccagccagatacgtagtatttatataaagactgtcaagacagtgatgagtgctgcggagaaaaatgaggcagaaaaggaagctggggtggggtggacagtgtccgttttctcttgattctttgtacttactgtctcatgcatgtgctaagctttccaagagccaaggttacgtgtgatgcatcacacccgggttcctgcagagcaggacgtttggagttgagctagcgttacacagtagaagcaggtgcagggggtgtctatttacccactgaaatgcccacgacctgcccatgtaagaagtggggaatcctggatagtgcccaggtaggttggggaggtaacttgtactggtttttctttgatgttatttgttaaatctagagctcccccttctgttagaagatgggatctcagtagtacttttaagactgtagtttcttttttatcttaagattcacaaaaaatttttaaaaataaataccactgggacaattgaagctttcttctgggactgctgttgctgaggcccagccccccgctgggggtggagaggaaggaggaagaagcacaacggcccaggcaggatagggtcctatctatgctctcttgctacttttagcagctccttaaccctgcactcctaccgcagccagcagcctagcaaaagttatctctgctcgcagtttcacagctctttggaaattctagggcaggagaagtgaaactgaccacagtcttataaatttctctcttattgcctctgttccctacttgaagtgagtcaggcctttccctctcatcctcagagtgtcttaagttgctatttgtccttacagccaagtttttgacaaaaggagtcagaccttccattcatggtgcagcctttctggaggctcttggtttggtcttgccacctgagtgttgtttgcagaagtcgagacttgtggtctttgtgtggtatccccagaatagagctgagcccttcgtctcagctgtcggttgtgtgtgttccttcacatacaattgccatggggttcttttagtccttagagatgaaattcaagttaattttagcagcactataaataacaggtgcagtgaagaaggaaatagtgccgagtggacatatatctttttggttttaactgtcccattgaaacagtttggccactttatgattcctcgtgaggttgaggaagtaaggttaatttggcatgcatctgtgccccttcctgtgtgcaggtgtcctgagaataatgtgaggcctagcaggcgttcttggagtcctagctgaagggggatttgcggctgacggtccagtcatgggccagggtgtttgttaaagttacattccatgggtgcactttatatagcccaagcttaggcagtgacagttcccattaggagtcatattttggtttctaccaaaactgtttgaatggggtagctaaaccataaagatacatgcttactcaggtgtcattgccttcacttcaactgatatttatagtactactaacagtaatgtgattttttttttttttttttgggggacggtttctcgctctgttgcccaggctagagtgcagtggcgcaatctcggcttactgcaagctctgcctcccaggttcacgccattctcctgcctcagcctcccttgtagctgggacttcaggcgcccaccaccaccacgcctggctaattttttgtatttttagtagagacagggtttcaccatgttagccaggatggtctcgatctcctgacctcgtgatctgcctgcctcagcctcccaaagtgttgggattacaggcgtgagccaccacgcccagccagtaacatgaatttaagatgccttctccactgaatatcgtagcactagacatgatgcttcgcttgaaggtaatctttacggttcttctctcaacagctttgaaaagtccagccgcatttcatgagcagagaaggagcttggagcgggccagggtaaggtaccttttttccccctcagaactcccaaagagcattttcagagctcattgcattgctggttatatttccatttagagctttccatagaactctgaggccagagcctgctagactctagggccagccctggccttgtggttttaaatggaaagctctgcttctcctacttcatcccttctctcatttacctcccatggtgattatatggaacatgattggaatgaggtttctctttttgtacatttaaggatatggaatgatcacccgatcctccttgcctgaattttggagtgctttggagaccactggtatttccccatctttaattccacttaacgttttgtagatgttgggacacaaacattagccaatggaaaagcttcccaagtccggggttacactggccacacctcacaggacgggcattccaaggggcaggaaaccttcttggtctccatctgcccagagtaggtggtatccacttgactcttgtggaaagcagaaactggcccacactccaagcccaagttttctgccacagcaccttacttgcgtccccatcccaactctgtttcggttccccaggggcccctgaggaatattctgctgcccagtgtgggtagagatggggaagtcaccagaacttgcttccccctcacactccctttactttttcctttcacataaaatcatgggaagataatccccctagacagatcatgggctgcatctccttaagacccacggctattttattttactttattttttgagacggagtctcactctgtcacccaggctggagtgcagtggcgtgatctcagttcaccgcagcctccgcctaccagattcaagcgattctcctgcctcagcctcccaagtaactggacctacaggctcccgccaccacgcctgggtaatttttgtatttttagtagagatggggtttcaccatgttggccagcctggtctcaaactcttggcctcaagtgatctgcctgccttgcccttccaaagtcctgggattacaggcatgagccaccacacccagcctcacagctattttagagtctcagaaatatttacctccaagactttttttttttttttttaaactttctttcattcccctctccccagaaaatcatgattaattcttagagtaagtggaaagaatgaggtcatgggtcctgggaaccaaaggagtaacaagcagcagtggtttagtttgctgagagcactggagagtacagtgttgggggaaaggatggcgttgcctgtgcgcctattcggtcagaagactgggcaccatttacttgactgcttctcaaataggcagggaccagcagagctgattagaagagactgttttattgagcacctttatgtaagaggttgtatctgtttcttttttatcctcacatcaactcttatgaattaggtggtattatcctcattttatagatgcagctaagagaagttaactcacttgtccagccaataagtggcaaagctgggagtcaaacctttgtggattctagattttttttgagcaaaatgattttatttcctaacacatggtaaccataacgttcaatttgcttaccatgcacatctattcacaaatgacttccacattacaataactacttccatatttacacatgtactaaaaattatcttagttgagatatgaaacatgaatatattggattggttatagcagaatttgctttacttaattctaaaagcttaaagctttgaaaagctgctacttttgcatctcatacttccagatgaataagacacagcaatatcagctcgtattcaagagaagtttcatttctttttctggtgttggaaccagctgctcacatctgtgcgtgctacataaggcagctatacatggtggtgggaaagcatccacaatggcttcagctatgtcaggatcacacttgaggggctctgagatgctgttgtatttacacaactgattgctttgttttcctttttttgtaattttagaggtgggattttgctatgttgcccaggctgaatcccaactcttgggcttaagcaatccttctgcctttgacctcctgaatagctgggatgtgtaggcatctaccactgtaccttgtcaaactgattttgttccctcagttttcttcgacacaaatgtgcttcagtggtcatgaatgcctttaatgatatcagttgcaaaatccgtatctttaaatttggccctgaaagttctctggttttccatcagagaccttataccctctaaaccagtccagagtagcctctaggtagtcaggtttcagccatttgacatcattaatatgtttactatttgtcacaaaggatacaactcaggaacagccaggtggaagagatgtgtaggtatgtgggaagggatgaggagcttttgtgctctctccaggtgggtgtgtcaccctcctagcacctccatgcctttaacaaaccagaagctcctccatatattttcttaatcagtactatattctacctcagtcatggccactggtcagagcttcagatggcttagagaataagtcttccactgtcatctgtgaagacttgcggcacctgctctaccaatctctgctgcagctgaggcagtacttctgcccactgcacgtggggtgatagagccagagcccacagtcactttaaaccatctcctggattgctcagcctcccctgggctggcacagagctgcccagccagaacaacaaggcagcagatggctaggtgaggacaagtcttttttttttttctttttcttcatttttttccagtctttacctttactatatataatgtcctctgaggcttcattgcctagtgtcctttggcttgtcttatcctatgctggtcttgatccactaatgttctgtggtttgaaaatgttggtgcagaggttaagagcacagactctatagagtcaggtccaggggaatatatatatattataattagccccgtttggtgggatggctctgtgactgttgagggactggtttagtttgcccagagtctcataaatgcagaaattaggacattggactttgaggaactagagctttgctaccwtgtgtcaaaattcatattccatttggcagccattcaaaatgaatggaaaatgcccatgagatcatgcagtgttacaggtttttggggtttttttttggtttttggttttttttgtttgttttttgagacggagtttcgctcttgttgcccaggctggagtgcagtggcgcagtcttggctcactgcagcctccacctcacgagttcaagtgattctcctgcttcagcctcccaagtagctgggattacaggcgccagccaccacatctggctaatttttgtatttttagtagagacagggtttcaccacattggccaggctggtctcaaactcctgacctcaggtgatccacccaccttggcctcccaaagtgctgggattacaggcttgagccaccgtgcctggcccaatgttacatttcttaaagcaggatataaaatcatattcagtgtgattacagcgctgcaaagttaagcctattttctgcatggaagaataactagaaacagatatcccagaatactaagagtggctgattaaagtttattttattttatttttctttctagttttctaaatgttttttgctggacatatattacttttatggtagtagaagtaatagttttttaatagatatattgtcagtccagcctcagagacacagatggtcttgaaggatggtgcccttccttggcaggtgcagttggattttggtgtgctctccccaggcctactcttgcctccgaaccctgcagtcaccaagttaaggttgtgggaactgcagaggtggtcagcagctaccatggccaaggctgctgttgtgatcctgtccatgccataagcctgtgacctggatttgagagtttcttggtgtgttttttctgtagacagaggactatctcaaacggaagattcgttcccggccggagagatcggagctggtcaggatgcacattttggaaggtgtggagattggaattgcttttccatctagatccagttctcactgtgtgtactcactactgcactacccatttccttcctgcctctttyttctcccatttctgttggcagtgggtaagccagagccttaacaccgtacgacagctgtgccatggtagctgccactggtctgagggactctcaaaaagcacagtcacatgctgttagtttggcttggcctcttctccagggtctcaccatcccttggtgtgagatcgcttctctctgccaaaatctgttttgttttgtttaagacacagtctgactctgtcattgtgattgtaggcacaagccaccatgcctgatctaaaatctgtttttaaaatacacttacttagttttttatattcattcattcggtcagtcattcacttggcattcacttgagtgtctgtgatataccgtgctccatccaatattattctagatgtacccacctggccccagctgcacatgtctttcccttttttttttcttcccccgctttttttttttttttttttttgkgatggagtyttgctctgctgctcaggctggagtgcagtagtgtgatcatggctcactgcaacctcttatcttccaggttcaagcgattctcctgcctcagcctcttgaatagctgggattacagacgagcgccaccacacccagctaatattttatatttttagtagagatggggtttcaccatgttggccaggctggtctcgaactcctgacctcaggtgatccacccacctcggcctcccaaagtgctgtggttacagatgtgagccactgcgcatagctgtctttccacatttttagtgaagaaaaggttttggctcctggaagcagcataaatatatttacttattgtttgtctagtcttttttttttgagatggagtcttgctgtgtcaccaggctagtgtgcagtggcacagtctcggctcactgcagcctccacctcctgggctcaagcaattctcctgtctcagccttccgagtcgctgggactacaggcacatgccaccacgcctggctaatttttgtatttttagtacagacagagtttcaccatattgatcaggctggtctcgaactcctgacctcaggtgatccacatgccttggcctcccaaagtgctgggattacaagcgtgagccaccacgcccagccgtttgtctagttttgagctgtttttggggctggaagagaacttttctagtctgagtctcacattttgcagacaaaggcactaaaaaccagagcagagatgtgaattgcctcagtaacacagcaagtttgagggagagtggagaccattctgtcatctgttgctgcttccattctgtagctccacctcagaaagtcttctgggtttgcctctgcctggttataattgtgtgtgactgtgcactgcctggtcacagtgggaaccccttctcttgtctttgtgaaacttcaagacaggccactcttctctgcttggaatatgcttaccgttctgacagtcactcctcttgcccaggaggaaggagagctgctctggagttcccggggcagaaccacgtycactcatatatcttcctgcacccctttctctcccatgggcagagacctcggctgagccatccctccaggccaagcagctgaagctgaagagagccagactagccgatgacctcaatgagaagattgcacagaggcctggccccatggagctggtggagaagaacatccttcctgttgagtccagcctgaaggaagccatcattggtgaggaggacccagccaccctgtgtgagaggcagctgagatgcaggaggggagggagtgccaggctgaagcagaattgggctgaggctcttgacttcttaatctttgacttcctgcttagccttgggagaaccaaggcacagagtttgagagcctcatgcacaggttgtatgaacttgggatagtgcctgttgctttaagaaacagggacatacaacaataaataataacagaggccttgctctgttcactttccatctttgtaaactcgggttgcttcctctttcacagagtagatagatgtcaggatcagtgtgtgtgaacatgtggagatgccaggaattagaaatctgtgtcatactctttattagtgaagtctcttcttggagactggccctttccacggatatttcacttaacaaatactgatggacccaaacagtgtgctaggtgctaaggccacagccccacagggcagaccaagttcctttgtccttatggagctcacgcctaggagcaggtaacaggcaggtgaataggcaggatagagaagctgtgctggagggagcacagggtactttggaaacacagaggagggtcacccaacctggttgcatcaggaagggtgcagctgtcagaggaggtgacagccaagcctggggctgaaggatgagtaggaattcatgaaagcgtgtgggagagggtgggacgagggaggagaggacggtgctccaggcagggagaacaaccctaggacctgatgagaaggcactggaagggagggtgtcaagatgagaggtgggaggccaggtcctcagtgatttggtagtctgaggcgggaggatcacttgagcccaggagtttgagaccagcctgggcaacatgcaacatagggagactcatctctacaaaaaaaatcaaaaaattagctgggtgtggtaacacacacctgtaatcccagctgctcaggaggctgaggtgggaagatcgcttgcgtccaagagttyaaggccgtagtgagctatgattgtgccactgcactctagcctgggtgatagagtgagaccctgtctcaaaaacaaaaacgaggtgggagcagtaagcacagttcaggacgtgcagggcctcttggcacacttgggagtttggacttgattcctttagtgtaaaagggaaaaagccgtttttctctgtatttacactcaatacagaatacttctggtgttggtattctggcatggtattaccccacataccaagcagttctccagtggacaccagctgggtgtcctccatttcttttcagatgccatttacctgcagatagcgtctgatcccacaggttgaggactcagtcccacaagacttagccccacttcccatgctggtcccaagccccaggttattttacatttgcttttaaccaactagctatagattggggttcccataccctctccttgggcttgataatttgctaggatggctcacagaacctggggaaacacttcacttaacatttcctggcttattgtaaaggatgcagaggaacagtcagagggagggacggatggcacagtgtcgtggggtgccagggggaatggtggtattggaacttccctgccctctcctggccttcaccctcccagtagctagagaaactcatcaaatcctgttatccaagagtttttatagagcttgatctcagagcccccactctatgtcctacatacccacccccactttcctggaggttggtggatggcgctgatatttccagtcctctaatcctctaatcacttggtgtctctggtgactggcccaatccttagtctctcccagattatcacattagcataagctcaggtgttgtggaaaggggcttgttatacataactgaagatacttctgaccttaaggaaattccaagggttttagctgctctgtgatgagaactgggggacaaaaaccaaatatatttattatcctactcttagattttggtgataattggtacagacatgtctccttcgctgcagtgggcccaagatccgatccctgacaagacagcacctgcctgcccctcctgaggcagctgtgccttcagagaaagaggctcagggtttcctctaacatgagttttagttttgggcagaggggaaacactgcagcagacccccaacgcatgctgaattaggctttgggccctgattagaggtgactggcagtttctagggcctcctctgcattgtagccaccctactggaggctggcccacactgggcccggaggagccctttccccatgttgatacagtagctcttataattcacagattttccctggcgttcatcctgcctcatctcagtggtttcctccgtgtattcctcagcagcccctagttataggccagtgtaggggccaagccagttctggatgctgcagccagccacagtctgataaatgtgtgctgagactcagcagtgtgccaggccatgtgaagtcctgatgtcacaaagatgaataaaatatgacttgtgcgctaaaagaattcacgtaggtctgatgtgagaagactaatgtataaacaactgatttctgagtctggttcccagtcagatgccagtgctgcctggtaggaaggccatggccctgtgacattgtctctgagtcacctgccttgtgcgactgcttgcaggatcacacacgatgatggatggtccttggcgcctagagagactcacacaatggttgctgctgttgtcagcaataacactcattctagaccagctggcagctgctgtaatggacagtgtaacaatggatatgtgtgtgtcagtgctgtgggagctcagcagagggacttctctcagggatgggaacaggtgttggtggccagggaagtacccacactatagcacgtctgggggcagcttggaggctgggtcagagtttgccaagtggaaaaggtacagaggtacaagagggaacagcatgggcagtggcttggaggcctggctgaacacagcttgtttgtttgaggaatttggcaatggggtgattgttggggactttaaggagcacagagcatttgccagcaaaaaccagattgtacagttgagtaggagagaaggaggtggtgatggcaaatgtagctcatttgctcaatagttctgtggagaaggaaagcagaggcaggtgctggcttaaggagggattttcaggctggatgcaatggagcaggtttttgggctgagaggaaagagtcaaggagatgagaggatgggcaccttcagaggaagaggagggaggaggacgaggaaatggaaccctggctgaggtggaggtttggctcaggagaggcaaagctgggaaggaagtttggctcagatgagtgggaaggaagcgggcagtgggagaagggggagcggaccgttctgaggcctgagaaaagggctgatgggggttggggtcttccccacacatctaagctccccatcccacccttcctccaggcccctcagttatcgtcaaggttcactttaagtcctgtcctccaggaagacttctctgagtctctcctcagtgtgcccttagcttctgtgttttctctctagcagagcattcactgggctccaaggcaactggaccataaactcctggagggcagggaccccatctttgttcccaggatgtgactgtgagtggagagagaaatagtctgtagtgaccctggcctgtaccagccctgggttttccacagtacggccagcagcttccttgggttggactaatctgggggaagctacagttcctccacccttgctcaccgttgtcagtactggctgccatggggctgctgtcccaaatcagatgccgttgccggaagtaggagattgtgggggaaatctagccgtgtgtctggcatgaagtacacatggtcagcaagccctgttctgtgtgttgcatacttgcccctgctgggacagatgaggggacagaggagcaagccaccaccacagtcgccagtaaggaagaagctcagatgcatccttcccaggtcctgagggaggagagagcctcaggtcctggccctggccctggagggcaagagctcctaggagagccactgcaaggacaaacccagcctgagctgttgcgctttgttcctcttccttatctggggtcttcccacacagcatacttccccaggcttgggcggcagctcacccctgccttcaccactgcctcagttccttctgtatggatggcagatcagctcagaacctgccacccccacctcttcccacgacagtgttgagccggtggctctgacagtgactcttgaaatagcctccttgcctctgttcccatctttccttcccactgggaccccatggaacagaagctctgtgctacgccctcctcccctgcctctgcttccagttggcctcagaaggacttgcattcacagtcatccagagcttggcagtgggtcaggccagggcagtgacagccagtaggatgttttcttctggtgccccacctgcccaggtgttgggtctctgtgagccactggcctctagaggaggtcaccacaccacctccatttcacctgtgcaggcaaacatcccctttctgggataccctccatctgaagcccagagccaggctccttagtctgttcctggcctctggggaattcagctacactcacagggctgttacccaggctcttctggtccctcgttagctggttcagagccctcactgcaccatctgtaagcatcatgggggaataagagagttttgtgcagtgtgggatgaagatacagagtacctttaacaatagggagacggttgaggtagaaaggtagcccgggtctcccagggaggagcaagggagggagggacaacttgacattgaagactaaacacagtatagagttacaagcaagaggctaaaggaggcgtttgctcggcccatgaggtcactctgatagcctaggaggcctttctggcctctcttgcagggtcattatgatgaccagagcttttttggaccaagaaagcagattggctgctagtctcctcggcttgcctgcctcacggggcatgtgggctgtgggccaggcactctgcctgtggcctgcgagccaggcctgtccctgctcatctgttccctgggctggaagtggaatctcacaccagctttgggtttcagtgggccaggtgaactatcccaaagtagcagacagctcttccttcgatgaggacagcagcgatgccttatcccccgagcagcctgccagccatgagtcccagggttctgtgccgtcacccctggaggcccgagtcagcgaaccactgctcagtgccacctctgcatcccccacccaggtgagtgtgtgcttccagatgcttccccagctccaaggtgctagggctgcgcagagtarggtctctctcctgggccacgggatgcctcctgctctggcacagggaagccagggggatgctaccctagttgcttaggtgctggctgcttgagctccccggtggtgggagatgtgggcagtggcccctctccagcagccagaggtcaggtggaggacgacgctggccatggctgccttgcagtgggattgcaaacgtcactggcccagtctgtattcatttatttggagcagcctgtttttcttgagtatattcagttctgtgaccttttcattgccttctctctttcctagctcctccttgctcctgccaccctgggggttgctcttctcctcctccggtctctgcccaccatttgccctctgacaatggtggcgtctgaggaccctgtgtagggtcagggcaggctgggcacaccctacctggaggtggccatgtcctcacttccctttttccctctcaggttgtgtctcaacttccgatgggccgggattccagagaaatgcttttcctggcagagcagcctcctctgcctcccccacctctgctgcctcccagcctcaccaatggaaccactatccccactgccaagtccacccccacactcattaaggtacatttctgccagtgattgtaccctccccttccctgtgccctttggagtcctgctgtgacttcattccagctgtggggacagctgtagagggtgtggtgcgtgtcttctcccattggtctgggagtttcttcccgttctgtctgctgtccatcatgacactggctgttgcaatcatagccaccaattattcgtggctatgggctggccttgggcattccaggtcctcactcctgctctcatccatgaagtcattcccacacattatgtcttgttcactcaacaactccgcaaggcagaaatagagccctgtgctacaagagaggagctgagaagtgaagtgacgcggccagagtcatgcaggaggtgccactgagtggtgttcccctccttcaaggcctggcctgaaatgcctgcaggaggcgggggttaccactgtcggtgtgggggacctgtgctgggcattgctggcctcatggactgaggtgtctgctgttaaattcagctgcaccaagagctcatgcagagtcctccctgctccacagagctgcctggccaccaggatctcaccaggatctcggggaccccagccccacacctctgcctggcccacgcctccctgacttgctccacctgcaccctttgtgctctgtcctttcttattccccaggctctctcctcacacagaccctgtgcctggcttggcaacccctggccatctgagcctcaggagaggctgacagtctgcagcctgggctgtctggtgcttgtgctctggccttagtaggccccactagctctgggagctgcccgcccttcttgtggcactccctggctctgtcccatggtgacatccccagtcccgcctctgcacatgaccctgtcatctctgctgcctcttgcttcctccatgtcagaaagtcactgtggcttcctgaatgtcagtctcctctttcaggccttgggagcagtgagtggcctctcctcccagcctacccctgctttcagcactgcctgcccgggtgctgcctcatcagttagtgcctgtcctgcacctgcattctcttctcactgtcagcaggtgtccctgcttttcccccagagttcctccaatgtgcttctcctcacactcctgttgccttcctttgcctaccacgtttggaagaagagtctgtgtattttgtctacacatctcttcagtcacctcaccagtgtactgaaacattatcttcaggggcctcaatccaagtcccatccccaccactgtgctcctggcccagctgttggggttccctctccttggttgtgctttccctgcctcccttcctcctccctttaattgggggtgctccttaggctctgccctctgcctcytctctgcctctgcctctgcctctgcctctgcctgtacttcttcctgctccccagcctgtgctcacaggctctctgtggctctgttcccttcttctggggcaatcctggccccacagccccggcagccctgccctttctccatccttcccatgctcccagcaaaaccagaacctcttctgtgatcacttctcacctgccacatgttcactttgtctgttcttccactagtgggtcacctgcccaaaccttcctttcagtcctcattgccacaaggtctagacaccacctgttcctacatccagccttgtacgcttttgtctgccattctctgctcaaaacttctcggctctccgtggtctctctctggcactcccttgctaactcacctcgtccaactgcgcccttccttgctccaagaacagacctcccatatatcacctactggcccttattggtcagtttgggtcttctgactctcctggcccagtggctgtgccagccggaggtctttgggggcatgaataggagcttttggagtcctgtgttagaacaagaacaagatcacattgtgactttgggcaagtgacttctttgagcccgttcaccattttcaagtagacacgacagttcctacctggcagaattccccccagccccaaaaagagcaagagaagagcaagcagcattctggagaggcttgtgtggccccgtctttggaaggtgcctggtctggcgcagcccgagctccatcagtcagctgggttttacctccttgtgttcaccctgcttggggtcatggtgatgtctttgcttgagctagaagcttttaagtcgggggtcaggcatagccctctttgtcactccagcccctttcctggcacatttctgggcacatttctgcttttcacggggtgtacggtcccacagggaagagtggaaatgggcaaagtgtggatggggatgtcttctcagaagccacacaggtgtggggagagttgccagccccaccccgagaagcctgaggctgcccctgaatggcaccctgtctcctgtgccctcagcaaagccaacccaagtctgccagtgagaagtcacagcgcagcaagaaggccaaggagctgaagccaaaggtgaagaagctcaagtaccaccagtacatccccccggaccagaagcaggacaggggggcaccccccatggactcatcctacgccaagatcctgcagcagcagcagctcttcctccagctgcagatcctcaaccagcagcagcagcagcaccacaactaccaggccatcctgcctgccccgccaaagtaggcaccygctcctcactgcctgcccctgccctccccgagccaccctgagccaggcaggtgccaggtctggtgggggtgaacctcacatctttaaggacycgctggtctggatgctacagagtggtctgcaggcagggccaccctagcctttgctgggcccttgccccatgcccatctgtacccaatcctgctgcccaggcttgggctgccacctgcagaggccacgggcgaagctggatggggctaatttctgccttttcttcccaggtcagcaggcraggccctgggaagcagcgggacccccccagtacgcagcctctccactaccaatagcagctccagctcgggcgcccctgggccctgtgggctggcacgtcagaacagcacctcactgactggcaagccgggagccctgccggccaacctggacgacatgaaggtacatggccactggaaaacttgagccactgccagcctggcccttcccacaggggctgtctgggtgctggtttttaggcagggaaggcagccagcctaggacccaccgtcatggaaagcagagcagggctttaggctctggtccccatcagacagggcaccttggacacagctctgaggctgcctggaggtggtcatggtgaatgacaccagcttcctcgtggtggttcctgttgttggcagcacagccagcatctgtccaggcagtcgcatgtctcttatcttcctcgacttacgtgttgcatgcagtgtgagaagtggggattggtgcccctttgaggatggtcaggctgaggcagtgacaggaggaggagcttgtccacagtcgcagacctggtcagtgtagacaggactgtccagtagcaaccctgcccgcattttcccctttgccggttaatgcagagctcactctgccgttcaggtgcagtgtctgcctgggaagagagcggcctgtgatcagggccacagacttggcttycatcctagggccttggagaggagtgggtcatgcccagtgccttgcgtgttttctctgccccatcagaagatggattggaccaagctctcccttgagaacttgttctctgaaccaggctgggccctactttcatgagctcagttttctctttgcaaaatacagtctgttccattgaatatttattgagcccatgcaccatgctgggggctgggggctggggacagctgtgggcaccatgtaccagcccccgttgcctgcataggtggggagcattttaaccagacccctgctagagtgagaacaatgaaagagaggatgctgttggctcaggtggtggggggcattgcaccctccaggctgctggaggattagggtagttgatgcatctgcagtggcccatggggcccagactgcccttctgcctggacccagtgccctgtgtycagctgcccctggcctccctgactcttgactgccttgcaggtggcagagctgaagcaggagctgaagttgcgatcactgcctgtctcgggcaccaaaactgagctgattgagcgccttcgagcctatcaagaccaaatcagccctgtgccaggagcccccaaggcccctgccrccacctctatcctgcacaaggctggcgaggtggtggtagccttcccagcggcccggctgagcacggggccagccctggtggcagcaggcctggctccagctgaggtggtggtggccacggtggccagcagtggggtggtgaagtttggcagcacgggctccacgccscccgtgtctcccaccccctcggagcgctcactgctcagcacgggcgatgaaaactccacccccggggacacctttggtgagatggtgacatcacctctgacgcagctgaccctgcaggcctcgccactgcagatcctcgtgaaggaggagggcccccgggccgggtcctgttgcctgagccctggggggcgggcggagctagaggggcgcgacaaggaccagatgctgcaggagaaagacaagcagatcgaggcgctgacgcgcatgctccggcagaagcagcagctggtggagcggctcaagctgcagctggagcaggagaagcgagcccagcagcccgcccccgcccccgcccccctcggcacccccgtgaagcaggagaacagcttctccagctgccagctgagccagcagcccctgggccccgctcacccattcaaccccagcctggcggccccagccaccaaccacatagacccttgtgctgtggccccggggcccccgtccgtggtggtgaagcaggaagccttgcagcctgagcccgagccggtccccgccccccagttgcttctggggcctcagggccccrgcctcatcaagggggttgcacctcccaccctcatcaccgactccacagggacccaccttgtcctcaccgtgaccaataagaatgcagacagccctggcctgtccagtgggagcccccagcaggtacctgggtatgggaggaaccgggcagggcccagaggagggtgggaagagcgtctcgctacagccctcttgggccaggggacccctcgtgctggacattttgtgtttgcttcatttaatcttccttcaccaggggggtactgagacttaggaaagttaagggacctgcctcagaccccctagctgtagggcggagccattggtgagctccccacctctctggctgttgagactagaacatttcggcacctcagcagcaggactcctgagcagcccgtacccaggctgggcctgccctagtgctgctctgtggggagtggccagtgaaggtcagaggtagcctgccccggggagaggctgtggggtcctctggccaggatccagctcagggtcctctcctcagagaggctagctgtccccaccaaggtgtcagcagcggaaagctccctcagcagaccctctctcagcccaggccacaggtgaggctgccctaaggctttatgtagcctcgtggtcctgcagaacttgggggtagagaagacagtgacaggaacaggtacctcaggataggagacaggggtccctgagcagccccaagcagagaaagaagctgcagaaatctcagggggtgaccagcccagcccagagacctctcccaaacctcaaggggccaggcaccccctgcagggttgagggcccccsatcctgtattccttcctacctagtggctttcatgaaagctccctaaaagccagtgcctcccatcttccctcctagagtgtgagaggccctggccctatccccrccccccgccccctacaaggcaggtctgcacccccagccccctggccactggtcctctccctgctctcctgtccagccctcgtcccagcctggctctccagcgcctgccccctctgcccagatggacctggagcacccactgcagcccctctttgggacccccacttctctgctgaagaaggaaccacctggctatgaggaagccatgagccagcagcccaaacagcaggtgaggaaggcgggctaggcctggctagtgttggcagctgccctaggctgctgggctgaggctyctacagccccaccyggaggaatagggggcaggcgaagcccagcttcagggtcagagaggccttggggagtgggttgttaggggacgggctccaggagtcygggcacgcccatgggtcctgtggatctggctgcttattctggggcagagggaggggcctcattcgtagttcgggctgggagcccccattcaagatttttatctcttttttttttttcctttgtcccacaggaaaatggttcctcaagccagcagatggacgacctgtttgacattctcattcagagcggaggtaaccccaggtcccctgctgcctccctgacggccttctctgttcataggtgtctctagccctgggttggtttgtttttattgaatgcttccgtgcgtgaccagtcttgggcaagcactgtggatgcagtggtggctgtgagccctcccgtctccaaggcctgggcgagaggaccagggaaggtgccgtccttcagctggaagcactgccccaaggccctcgcctcccaacgaacagaagagacatttgcccttgtggagctcacagtgcagcctggggaggtggacaacaaatataagaaataagcagatcatatggaagatccgagaggagccttaggacaaaaatggaggagagggagaggtctggggagcctggtggggaaggtccaggatgtctcctgtgagcaggggcagctgtgtgcatctgtgcggcctcgggagtacctggcgggttggagtggagttgaggaaaggggaagaaggccttcatggccagatcatgcgtggcctcctgggcaccagggcagggtggctttggctccattgtgtgggaagccatcgcacagccttgagcagaaaaggcctggtctgatgcaggacccaggcgatagtagccgtgcaagggcagaagcagggagccccaggttggggggcgactggagagctgggctttggcccagcaggcagcagtggcgggcagaggagcggctggaatcagccccatttggagagagccaggttggtgtctttatggatgaagtggggggagagggaaggaacagccaaggatgacttcaagggctgtggcctaaagggccagggtggagtggccattgatggggtgagctggggagggggcacgtgtgggaccacattgcgcggtccctgatggggtgtgtcacgagaccgaatggagggttcacagggacagttgacatcaagtggcatttgtgagagaggtctgggctggaggtaggagttggagtgttgtcacatctagattggcagttggagctgggaggctgccgagggtgtgaggtgggggagcagaggttggggctaagcccagccttgggggtcgggaggacaagtagtggcagggtgcggtgtcctggaatccagccgtgaccaagggagctgaggaccgaggcctggacacggaaggtaggcatcatgggcacaacaggaagtccatgagaggcctgggagcagggtgggggtggccgtagagagctctctgggaggttcccctgcagaggggaagaaggaggtagggcagatgctgggcaggaaatagcgcgcgtctgtgtgaggggacccagctgggagtagaagatcccagatgaccccgagatggtcctggggaggagctcactggcggcagcaggcaagaagtctgggcctgtggtgccgatgctgggtggtgagcgtggacttctctttgagtgtctcagtggcttcaggaggaggaggagcggctgaggggtgcaggcaaagtgggagctcagcctggaaccacagctctaccagagtagatgtgatgttgtgtgaattttatttcaatttaagacaagagctcagtcactggtgttcctgtgaggtctgtaattctcaagccctagggagaatccctgggtccctggggtctgaggcgcatctctcaccagtgcaggtggcactgaggcggcaggtatgggacccgctgtgaggacggctgggctgggcgctcaggagcgaggccttggcgtgagcttcaggaggttccaagggaaggaggtgctaccccagagatattgttcaagaaggaaaagggaacaggctttgaactctagcttctaagggatggcagagaaagggagatggtgggtgtgggtgctgcctgccgccaaagggacactgaaaagtggcccaagaggtggcagtgatgccagaagcaggtgtttgaggagagaggtctgggcaggtggtggcagctgggcaggcagcgacctccttgcctggtgagagcggctgcagggcaaagagtgcattctgccaggacrgggggggccagaacccacagggttggggagcaggcctggtttttgcataattctttttttagttgtggtgagataataaaatttgccattctaatcattttttaaatgtacaatcagaggtattaggtccattcacagtgttgtgcaactgtcacccctatccgctccagaacttcatcaccccataaggaaactgtacccattagacagtaactccccattctccccaactccagcccttggcagtccccatcccactttctctatggatttgcctgtcgtggggacctcacagaagtagactcagtttgtccttctgtgtctggcttatttcactcagcataatgtcctcagggtccatctgtgttgcagcatgtgtcagaatttcactctttttaaaggctgaatcataccctgtagtgtggattcaccacattctcttcatccattcatctgtggctggacacctgggctgtttccaccctttggatgttgtgaatgtcagtgtacaagtgtctgtcttgagtccctgctttcagttctgggcataaacctagggttggaattgccggatcatatggtaatttcttcttyttttttccttggagacggagtctgttgcccagattggagtgcagtagcacgatcttggctcactgcaacctctgcctctggggttcaagcaattctcctgcctcagcttctcgagtagccrggactacaggcacccgccgccacgcccggccaattttttgtgtgttttttagtagagacggggtttcactgtgttgcccaggctggttttgaactcctgagctcaggcagtctgcccgcctcggcctcccaaagtgataggattacacgcatgagccaacgcaccccgcctcatatggtaacttctgtgtttaactttttgaggaatcactaaactgtgtccactgcagctgtaacgttttacattcacactagcaatgcacaagggttccagtttcttcacctcctcaccagcacttcttattttcaattttttgatacaagccatcctaatgggtgtgaagtggtatcttagtttgcatttctgtcatttagtgacgtggaacatcttttcatgtgctgcctgaccatttgtgtatcttctattggagaatggccaagtcctttgcacattttttttgattttttaaaaattgtgataaatcggctgggcgtggtagctcacgcctgtaatcccagcactttgggaggctgaggcaggcaaatcacgaggtcaggagatcgagaccatcctggctaacatggtgaaaccccgtctttactaaaaaatacaaaaaatttatccgggcatggtggcgggcacctgtagtcccagcactttgggaggccaaggcaggcggatcacgaggtcaggagttcgagaccagcctgaccaacatggtgaaaaaattagccaggcatggtggcacgtgcctgtaatctcaggagggtgaggcaggagaattgcttgaaaacgggaggcggaggttgcagtgagccaagattgccccactgcactgcagcctgggcaacagtgagactcaagtctcaaaaaaaaaaaaaaaattgtggtaaaatacacctaaaatttacctttttttgttgttgttttttgataaagatggggtcttgccttgttgcccaggctgctctcaaactcctggcttgaagccaatcctcctgtcccagcctcccaagtgctggcatgacaggtgtgagccactgtgcccaacccatcataacctttttttttttttttttttttttttttgagacagggtgtcactctgtttcccagtgttggagtgcagtggtgcaatcttggctcactgcaacctccgcctcccgggttcaagccattctcctacctcagcctcctgagtagctgggattacaggcgtgcaccaccgtgcccggctaatttttgtatttttagtagaggtcggggtttcaccatgttagcctggctggtctcgaactcctgacctcaagtaatccaccccacttggcctcccaaagtgctgggattacagacgtgagccactgcacccagcccattgtaactaaccatttttaagtgtatggttcagtggtattaaatacattcataatgtgtacagccatcactgccatccatctccctttcttttgatctcgtaaaactgaaactatccccattaaacagtaacttcccatttggcccttccgccagcctgtagcaactgccattctactttctgtctctatgattttgactaagtgcaatcatgaattgtcttttgtgacaggctgttgcactaagcatagtatcacttccttcatccattgatggacataggttgcttccacattctactgttgtgaatgcacttatcaacacctgtgtacaaatacctgagaccctgcttccaattcttttgggtatatgcccagcagtggaattgctagatcatatggtaattctatttttaagtaagtaagtgttggaggaacctccatactgtttttcatagcagctgcaccattttgcatttctaccacagggcacaagggctccagtttctctgtatcctcaccaatactttcttaaaaatttaattttacagtagccactccagtgggtttgaggtgtatctcactgtggtctccctcatgactagtgatattgagctcttttcatgtgctgttggccatttgtatatcatctttggaaaaatgtctgttcaaatctttcttttacctattcttgagtcaagtttggttttttgttgttgagttttagaagttctctgtgtattccggatatcacttctttatcaaatatgtgatttgcaaatatttttaaagagttttatagtcttagctcttacatttaagtaagtctttgatccgttttatttttgtaaatggtgtgacgttggggggtccaccttcattcttttgcatgtagatatacaggcttggcttctgatatccatttactctcttgattgattggcagaaatttcagcagatttcaaggagccgccatccctgccagggaaggagaagccatccccgaagacagtctgtgggtcccccctggcagcacagccatcaccttctgctgagctcccccaggctgccccacctcctccaggctcaccctccctccctggacgcctggaggacttcctggagagcagcacggggctgcccctgctgaccagtgggcatgacgggccagagcccctttccctcattgacgacctccatagccagatgctgagcagcactgccatcctggaccaccccccgtcacccatggacacctcggaattgcactttgttcctgagcccagcagcaccatgggcctggacctggctgatggccacctggacagcatggactggctggagctgtcgtcaggtggtcccgtgctgagcctagcccccctcagcaccacagcccccagcctcttctccacagacttcctcgatggccatgatttgcagctgcactgggattcctgcttgtagctctctggctcaagacggggtggggaaggggctgggagccagggtactccaatgcgtggctctcctgcgtgattcggcctctccacatggttgtgagtcttgacaatcacagcccctgctttttcccttccctgggaggctagaacagagaagcccttactcctggttcagtgccacgcagggcagaggagagcagctgtcaagaagcagccctggctctcacgctggggttttggacacacggtcagggtcagggccatttcagcttgacctccttttttgaggtcagggggcactgtctgtctggctacaatttggctaaggtaggtgaagcctggccaggcgggaggcttctcttctgacccagggctgagacaggttaaggggtgaatctccttcctttctctccctgctttgctgtgaagggagaaattagcctgggcctctacccccyattccctgtgtctgccaaccccaggatcccagggctccctgccattttagtgtcttggtgtagtgtaaccatttagtggttggtggcaacaattttatgtacaggtgtatatacctctatattatatatcgacatacatatatatttttgggggggggcggacaggagatgggtgcaactccctcccatcctactctcacagaagggcctggatgcaaggttacccttgagctgtgtgccacagtctggtgcccagtctggcatgcagctacccaggcccacccatcacgtgtgattgacatgtaggtaccctgccacggcctatgccccacctgccctgcttcctggctccttatcagtgccatgagggcagaggtgctacctggccttcctgccaggagctctccacccactcacattccgtccccgccgcctcactgcagccagcgtggccctaggacaggaggagcttcgggcccagcttcaccctgcggtggggctgaggggtggccatctcctgccctgggsccactggcttcacattctgggctgactcataggggagtaggggtggagtcaccaaaaccagtgctgggacaaagatggggaaggtgtgtgaactttttaaaataaacacaaaaacacaggcctgttagtccatcttattcagtccatggaaggggtgggtagcacagctgggtcccgggtctgttgtgtcccagcatctgaggggccacgcagtgccttctagaccactcaaggaagggcagaaccttggacctgaatacagctctgcagccctagctgcacagaagacaggtaggtgctttctcaaagacagacacagtttatttataaaccaaagaggccaggagcctactagccacccccatccccttccctcttcctgagcacagacatggctcccccacctcctcacaaggtttttggtacaaactgtggtttggcctagagcatccctaaggaccctggtggggcagggtaccctctgctcccaccacctgggatgtgctggggaacgtggagtggggcagcctgatattgatatcccgcggccccggccagggctctggagctgctcttccctgggctctgcagcttggggtcctgggccacctcagacgcaggcccgaggttgggctggggaggagggggtcacccgtccacatcccagctgaagaggtggtgcttcaccagcatgtcccggacgccctccttcaggggctgctgcgcctgcaaacagggcagcccctcacctcacaggccttgggcatggctggggtagttcctaaccgctgacaccagcacttcgggttcccaccttagccaccccgcgaacggtttgggcagctccatcagtgcaggccctacgaggcccacaccacccacctctctcttcgcagggagctcccagtcctgggagaggctgaaggcaaagcagcagaggactctagaggtgaggaaggggtggtaaggctcttgtcacccccagctagcccttcccaccccacctccatcccccaagcccagtaaggtcctcaccggagctcacacttgatctggacccagcccgggctgcgcaggaaggaccagggctggtaccacttctccacggtgggcaggctggagcagagcacctccagccacaggtgcagcacctgctcactggggacatggccaggagtggggagcaggggcagctccaggcccttctggctgcagccacggtggaagcctctgacctgtctctcagcagctcccagaccaccctctttggggaaggacctgagcccctgaggttctttgtcctttagggttccctgtaaggaccccccctgatgctgggctgggtccccccactccagggctctcctccaaccccttttccacactcacttgagccccacgcagatcagtgagcggagcttcacatccatttgtgcatgcactgcatcgtgggtcacgttcacagactgcacagcctgggaacggcaccgtcagctgtcactcaggctcccccacaggctaaccccagagaggtctctagggtctggcagaggaggcccccttacccggtagagcagctcctccggggtcaggactttgccatcttcatccaacctgaggggacaccaaagctcctggggtgccggggctgggtcaggccccgccctcccactgctggtgaccccaccagaagaacccgggccgagttacctgaaggtcttacagagcaccagacgggaatacacggaggcaaagtctctctcgacctcccggcctgcagcctgtggggacagcacacggtgtgagtgcagggacaggaagatgctggttcaaagcccttggggccgactgggcacctgtcaccacgctgccagctcttcccatcctctctgtggggcaggaaggacctaagatgggtactagggggcacagcagggctggtgcagggtgggggtcatgggcccagccactgacttacctcctcgataaacagccaggggtggcaggcgcccccaagcagggatggcttcttcagtccatgttcgaacagggccttaagggccgggcagagggtccctcgcacgaggtctgtgaccccctccgtcaccgagtcatcccccgcgatggagtactgatgggagggatgggtctgagaaagccctgcctgacgcctgcagccagtcaccctcctctgtcctctctgccatgctacaggccaggactcgctaggcacgcaggccctggctagaagggtgccagccgtgcctagcccgcccacccccctcacctctttgctgcgctcatccaggacttccacgaacttggctggaaaccagcctgtgggaaaaacaggccctgtaaggagcaaccacgagggccgaggacagagcagacacagcctgcaggcaggctgaggcagtgggaagccggctcagctgcttcagggacctcaagccaggcaggtgtatagaggagaacagcttggtggcggccagggtcacccaagtcttctgtgcccaccccctcctccctctcccagctcaagagcagaccaaggaccccacctcgcaggccgttgagctcccccacccagcagtgctcgtccttctgagacacgatctgcacaggaggaaaaacagcaggaaccaaagctgggtgccctgggccagcgcctcctgcacccccgatatgactcctcagcaactaggccaggccaagacccctacatcttcacaagagaagctcttggcagggaaaggggttggggtggggcttggtggagggagtctggggaacccgccacagcctgaggacctggtagtccagcgcccccacgcactgtgatgatgtcgttcttgcggaagcccagctcgtcgtcgtcgtgccgctcaaagtccagcagggccttggctcggcgccggtggctgcgtgagcacgccacgtagttctcgtggtcccgctggtggctctccatgctatagtctggagtcagctcctgccacagtgaacacaggcccaccaagggggttggaggagttagggccgtgtttggtagcagcccagggagctggcgactcaccacgctgcagtttttggggtctgtgcactggaagtggcgtgccacgcgcaggatggcttcccggaggtcagccaccagttccgtctgcttgatgttcttggccttgagtgcctccaggtcatcctcccctaggaggcccagagaacaatggtgaccacagcccactccaggcccccgaggaggaagctccacgtccacatgagcgtgaggacagactcccgcatgcccacactgcctggcactcgcagagctctcaccgaagagcagagcagtgatggtggacttcctccgctgggtcctgcggcgaacaacctgcaccaagaggagtgggtcagggtggtcctggccccgggaggaagagaacccaccagcccttggcttatactgtctcatctgaaatagcctctgacgctggctccaagaattgaaaacagataatcagagctgggtctgccttcctcccaaaccgtgccaggatcagaacctgaggtgcacaaagcctgaggaggcctggatcaccccacagctgtggtctgactgggccaggctggggggcagagcaggaagggctggtttgttttccgcagcccccgcgctctgaacttcaaggtgacccctcctccccgtgtgctgtgggtcaaggtgcggccccccatcctgggccacctgagagaggttggtgagggtgccggcccccaggagctggccctggtctgcaatgagataggccaggtgcttgcggcgctgagtctccacggccacatcggtgagggagccggccagccgcatggccacccccagaagcagctccgcgtcctccatctgcgacgggatatccgatagcgtgttgaagatggaggccgagttctctgactggatcagctcttcctcctgggccatgccagggcaggatgggggaagaaggttgtcattgcagggacgtggcactgagctgaccccaacccccatcctcagggacccgtttgccttggcacagttgtcaggggccagggggctggtcttgcctggcccagggaggtctcttgctcccctgccccccatctcgggtgcctactcctcagcctgaagtggggccgtggagcaccttgaggtgcagcatgcccagcgtgagctggaacagcacccgggagccctcgtagaaaaacaggtcccagatgcgcaggagcagcttgatgtccaccacgctggcgaaggccgtgaggaaccagtgcagtgtgatcagggacagctctgtaaacacaggagccaaagccgctggggaggaggtggtggaaacctccctccccggaactgcagcaaggtcctccctgcttaagagcaaaggaggggagggggcagggaacaccagagaacaaaagagcgacaaagaccatggttggggggctgtgccctatccccactcggccacccgcctgagtcctccaagctgcagaatgggagccagtggctcaggggcgccttaccaatgtcatgctcctggagcagcttgtccaggcgaggcaggtactggacaatgaggtggcgcaggacccgctggtcagtctggacacccagcagggtggtgctgaagtaggaggcggggagcaggtcctcgatgatggcagacatcatccagaaggcgtcctcctcctccaggaacagcaggaggcaggcggccacctggccagggcacagggacaagggccttctacccaggtctttgtgcagattagaaaaggtgcccctaccctagggagaccaattagcaaaagcctcttggggggcacgcatgctggaacccaggccttccctgggctgctttccttggcctgcctcactttcacatcccttggggagcgcctctgcttgcataacgtgcagctgccccgatctccttggggacgccccggagtgggaggccactccttgttaggggtcctggaggaggccctggggctactgccccgtagcgggaggccactccttgttagggtcctggagggggtcctggggctgccactgccctttctggggctgtgctcaccatgccggtgccctggcagtagccgatctctgggtagagccaggccagggcccggagcaccctgcgcaggcggggcaccccgatgctacccatgctggcgaagcaggcgttgctgggcatggtgcggagcaggtccttctcgatctgtcaggcagccatcggcacccacaataacaagaccttgtgacaccctgggagggaggcagaccccaggcgggcttctcccccagaaatggggattccttgtgttcctgatcaaggtcaccctcctcccttcagggtcagctcccagccagtgtggagccgggacatcaaatccagctgggaaacttcatgccagaccacctgaaaacgtgtggcccgaggcctggagtctatatttagagtccccatctgttcctgaagtggacccgggcttgggaaccccatctccaagcccttccacagcactgatggccttttggacaattctttctttggcctgcagaggaccaaggaaggagcaaatatcctcccctaccccacaacaagggcacactctaagaaccccaggcaggctccctctctcctgcgagcccacacagcctccagctcttcctgcacagtgccaccggcctcacctgcttggcagcgatggtctcatcgttggagctgttcttcacaatctcgcggtaggacagctcagagttcctcttcttctgcagggccccagagagccgcatccacagctgagggaagggagccgcaagggcactcagtctttctcgtgacacctgatcatggggccaggaccctctcaacaccctgtgggtccctgtggccaccttacctgtggcctcatgccatgtgggatgccggccagcaccagggagcggagcttctcagagcggggtagggagacggcaatcttgtcccaggtgagatcccccacatcgtggttatgggtgaactccaggtgggcctgccaccgcagcctctgtggagcatcctccatc

SEQ ID NO: 98204 - DNA, 13201 bp, Homo sapiens
gggaccagtgcttcctgagccctcacccccacccaccatgggatcccgtctctactcctctgtccagaagctgtcagaggtaggggactgagcataggggcaggaatcctccacacctggctgattcctagcaatgcagccctgggttgggggtcagtggggaggtgttatctaactactttgtgcctcactttcctcatctgtgaaatggggaggccattaacacttgtgaagactaaataaataaacttgcagtggctcatgcctgtaatcccagcactttgggaggccaaggtgggcggatcacctggggtcaggagttcaagaccagcatggccaacatggtgaaaccccgtctctgccaaaaatacagaaattagccaggcgtggtggtgaatgcctgtaatcccagctacttgggaggctgaagcacaagaattgcttgaacccaggaggaggaggttgcagtgagccaagatggcgccactgcactccagcctgggtgacacagcaagactctgtctcacaataaataaactcacataaagcactcagaacagagctttgttactacctgactgttattccttccctttagggtagtggttaaactttggtgtgcttctgaatagcccaaaactttaaaaggcagatttcctggggcctgccctcaaatattctgatttggaagaggcaaggtggagctgagggaatttgcattttaacgtggagctgagggaatttgcattttaacaagcgctgccccttgctccctctctgtgaaacaccgcttaaggcactgaactcagcgttctagtaggctggtgcaaaagtaatgcagtttttgccactgaaagtaataccaaagaccgcaattacttttgcaccagctaactattcactggctgcccacctgggccaggctcaggaatgcaatcatcgtggagtgcaggggtcaggagtgtagacctaaagttggacagacccaggcgatcttggtgtggccactcaccagtggccttgagccagtgacttcttgtctctgagcctcactcacctgttataacgtttaacatttccaaaataagtctgaaaacggcacctaccttgtggagctgttgtgaagctggcaaagagtgtgagctcagaggcatcagctacaattctgtaccattatttattaggacggacacagtcctgcccataatgagtgtcacggccattgagccggcagacaatcaacccagtgggatggatgcccagacagactggggtgtgcaggaggcggtgggaacacgttcagggcacgctggagcacccagtgtcacgtcctgcccagaagacctaataacacccaacagacaggcaccacaacaaagtggcatcgactcccactgcaggcctcccacggcaaccctgtgggggagacagcccctctctggctggatcatgaataagaaatccagaggcggaatgggctgctcacactctgctcacactcacacagcaggtgcagggcagcatgaggactcaaacccaggtctaatgggttcttccaccattttgtgccatggatctcttcaaccatctggtgaaatctatgggccccttcccagaataatgcttttaaatggaatacaataaaatatacaggatgaaaaggaaaccaacatagtaaactttggctaagaatgtgattacaaaaattgctgtgaaatattatctgtaacctatctgctcctttattaaagcaatcaataacaagatctagtagcagacagaataatcactgtcatctgcaagcagacacatctgtggcacctaaaatgtgatataaaaatatgggccaggagcagtggctcatgtctataatcccagcaccttgggaggccgaggtgggcggatcacctgaggtcaggagttcaagaccagcctggccaacatggtgaaaccccgtctctactaaaatacaaaaaaattagccaggcgtggtggcagccacctgtaatcccagctacttgggaggctgaagcaggtgaatcacttgaatctgggaggcagaggttgcagtgagccgagatcgcgtcattgcaccctagcctgggcgacaagagcgaaactccatctcaaaaaaaaagtgtggtttctactggtgatgcgagtgctgccactactactgtgatttatcacctatgttgtcacctggaggaaatgttaaactagggtcaataaagatgtaattttcccctcatccaaattcctaggcccccgaatgcagcctggaaccccaattaagaatcgctgccagcatctggctccgttatggacacaaaatctatggctgttagggccagggagccatggtcctgcctcaggagtctagattcaccttccttcccattcctgcccgtttcctcgccccaccatcaaacacaagagcagtagggatttgcaccagaaacacttgatggcatattgtggagcatggtttgcatgttctgattttattttaagaagtaaaagtggccaggagcagcggctcatgcctgtgatcccagctgctcacaaagctgaggcaggaagacagcttgagcccaggaatttgagacccagcctgcggctatcaacatagcaagccccaaatataagtaggtaggagatggcaactgttataaaagaaccatggctcctctccacgctggcatcacacactggcatgtgaccttggctactaagttagcagtgtgaaggccaacagggaccaaagtgggggtgaccctggcagaggcactgtacacatggccctgagggaaagcaaacatccgcagtggatgaggggaggcacaggcaggtggtcagagtcccatgctgccagccagactgggcgtgcacctgcatctaccccagacccttggcagcatcacctccactctctgggcctgagtttcctcatctgtaaaatgggcccaataattcttactagcgatgctgctgtgaggattaagtgagataggggcttaataagggaaagaccagaggggtgtggctaatgccttgcagctcttcaataactgtgagtcccatctgaatctaccgatgagaaatcagcagtggtgagcaggaaaagtggggaaaggagattggcaagctctagactgtgccaggctttgaatgccaggtaaggagcttggagttatcctggggacggtgggaaattgtgagcattggtctggttgtgacctgggaggggacacaggctctctctggtgtaggatgcctgaaaagacaagggctggaggccaagtgatagctgctgggggacccagggagccatctcaaagaagagagatggggtcagacgtggtggcccatgtctgtaatctcagcacttcaggaggccgaggagggaggattgcttgagctctggagttcaagaccagcctgggcaatgtagtaaagctccatctctacaaaaaaattaaaaattagccgggtgtggtggcatgctcctgtagtcccaactacttgggaggctgaggccagaggatcacttgagcccaggaggtcaagactgcagtgagctgtgatcacaccactgtactctggcctggttgacagagggagactccgtctcaaaaaaatatatattttatataaaatttatatatatatattatataaaaattattatataaaaatatatataatacacacacacacacacacacacacacacatatatatatgtcgcccaggctggagtgcaatggagcaatcacagctcactgcaaccaccatctcccaggttcaagtgattctcctgcctcagcctcctgagtagctgggattacaggcactgggccacaacactggctaatttttttgtatttttagtaaagacagggtttcatcatgctgaccaggctggtctccaactcctgaccttaagtgatctgcctgcctcggcctcccaaagtgctgcgactacaggcatgagccactgtgcttggccttaaacaaaacaaaacaaaaaaattaaaaaggagggagatgggagagaagggagaaagcagcaaaggagacactgtgggcaggaggaggatgtgatgtggagagagccccctactgtggtcctcacacatgactcactggctggacagacaaatcatagcttctcttggggtgggcttgctggtctcagccgtcagatggggagacagagagaaggaagggacagagtggtgggggagaccctggccaccctagggagagcaaaagccttgcctggcagggcaggaacagggtgaggcaagcagggcattgtccttgagcacaaaaactcaagggggtgccaaaaaactcagtaaccaagatcaataatgtttcaatgcaatcttttttagattagtggaaaaaaatccatgacaaacaaaaaatataaagtgtttaaataggacaagtgatgttgcgctgtgctaagccacactggagccaaggcagaaagaaaaaaatcagtaatactgatcctgacattatttacaatttttatatgttgtttttcatggatatttttgcatttagattgtttcataacagctttactgagggacaatgcacatatcatataactcacctatttaaagtgtacagttcatgggcccggcgcggtggcccacgcctgtaatcccaacactacgggaggccgaggcaggcgatcacctgaggtcaggagttcgtgaccagcctggccaacatggtgaaactctgtctctactaaaaatacacaaattagcagggtgcagtggcagatgcctgtaatcccagctgctcaggaggctgaggcaggagaatcgcttgaacttgggaggcagaggctgcagtgagccaaaatcgcgccactgcgctccagcctggacaacagagcgaaactccatctcaaaaaaaataaaaaaataaagtgtacagttcaatggtctttagtataatcacagggtttaatatattcacaggtttctagtatgtgcagagtagtacactcacagagttttcgtatagtcatagtcaattttgctacattttcatcacccaaagagaaacctcgtacccttacgtatcaaactgtaactcccttctcctcccagccccaggagaccactactctactttccgtctctatgagttcgcctattctgaacatttcataaaaatggaatcacacaaagcatgttctttaatgaccagctttttccacttagcacactctgttcaaggttcatccgttagttttgatttttcaaattttgcattaaaatattatcttgatcacttgatcatcccctgctgcctagggctctcccaggtcaaaccctggtttctgcaaacccccacttaacagcatggttctattcacaccttcacgcagaagccagggagcttggggctgccagaaacctcctagcctggacagcagggccttctaggagcctctgaggaaatccacacggtgtgacagaccgggtatagaagcatatcatatcaatgtatatgtatcatatacatatcaatgctgtaatacgatataaaataagagaagatgatttctagatttgatgcataactttgggtccttgagctcgggaatgcagagccagcagtggcctcggagaaagcctgggcgagctcagaaaggagagtgtggccaaggtcacacagcaagttaatggcacagccaggcctgaacacctggctgggttcttcccatgtacccagaggccttctctgctggcatcatgctggcttgctctcctaacaagatacggtaggatggtctcctggttaaagtgtggctccggagtcaggctacagatgctggctacagagctacatgactttgggcaagacacttaacctctgtggtcatcaggttcctcatttgtaaaatgagaatcatattgcagcagtgccatatgacttttgtaaggattaaataagatattgcgcattgcagtacactgagctccacagagacagcgccggggcaagtgagagccggacgggcactgggcgactgtgcctcgctgaggaaaaataactaaacatgrgcaaaggagatcctaagaagctgagaggcaaaatgtcatcacatgcattttttgggcaaacttgtcgggaggcgcataagaagaagcacccagatgcttcagtcaacctctcagagttttctaagaagtgctcagagaggtggaagaccatgtctgctaaagagaaaggaaaatttgaagatatggcaaaggcggacaaggcccattacgaaagagaaatgaaaacctatatccctcccaaaggggagacaaaaaagaagttcaaggatccgaatgcacccaagaggactccttcggccttcttcctgttctgctctgcgtatcgcccaaaaatcaaaggagaacatcctggcctgtccattggtgatgttgcgaagaaactgggagagatgtggaataacactgccgcagatgacaagcagccttatgaaaagaaggctgcgaagctgaaggaaaaatacgaaaaggatattgctgcatatcgagctaaaggaaagcctgatgcagcaaaaaagggagttgtcaaggctgaaaaaagcaagaaaaagaaggaagaggaggaagatgaggaagaygaagaggatgaggaggaggaagatgaagaagatgaagatgaagaagatgatgaataagttggttcyagcgcagttttttttttcttgtctataaagcatttaacccccctgtacacaactcactccttttaaagaaaaaaattgaaatgtaaggctgtgtaagatttgtttttaaactgtacagtgtctttttttgtatagttaacacactacmgaatgtgtctttagatagccctgtcctgatggtattttcaatagccgctaaccttgcctggtacagtatgggggctgtaaattggcatggaaatttaaagcgggttcttgttggtgcacagcacaaattagttatatatggggatgatagttttttcatcttcagttgtctctgatgcagcttataygaaataattattctgttaactgaataccactctgtaattgcaragtgttttgttgcaagaaaaagttgcagctgttttgttgacattctgaatgcttctaagtaaatacaatttttttattagaaaaaaaagatattgcatgtgaagcacttagttccacacctagcaaacagcaggtgctctaggtcttatcatcattattactattattagtatctggaatctagcatctcacggagagtcctttgtaggacatggaatgctatcccagcaggcacaggaaggaaaatttaggcttaggtactagggagccacggcagatgtttgagcagtgggtgagcagcatgactttgaagctgcatagggctggccgccagtccagtacccacctacagggaacatctttgccaaggtccttcctcgcaggctccaaatccctggcagtcctcccagtgctgctgggcaaagccagagcacaactcccacaggctacaccccgtgacatttccagccttgtttgcttcctgggtgccagccgggctggtgaacaccaagcagtcaacaagctgggggacttgaagcagcccacacagcctcaatccacagatacaaagaccaggaggcccagcggcccggcgggggccgcagggtggcagaggagaaactgtccttattttggagtcatgaaggcaagcctagctcctcctttgctgtgtgaccttaggagagtccctttccctctctgagctccagtctgcccatatgcgagaaggacttatctgcttctgtatgcttaggggctgctggagagatgcaacacaataaaacaacaatggtgtcctttggcagcacccccactatgagccagacactgtgctgaacattccaggtgtgtaacttcactaaaccctcacagctctacaagccagtccatgtgccatttctacttttaagatgcacctaattgctcaactcattggtacaacctctatattacaaactggagggagaaggcataagtctctttggagtaaaagatccaatcctatgttcttcccccttttctaagatgtaactgctgttgattagtttggaggggagccatctacacttgctttttcttttcttttcttttttttttttgagactgactctcactatgtcacccaggctggagtgcaatggagcgatctcagctcactgtaacctccgcctcccaagttcaagcgattctcctgcctcagtttcctaagtagctgggattacagacatgtgccatcatgtccagctaattttgtacttttagtacagacaaggtttcaccacgttggtcaggctggtctcaaactctcgacctcaagtgatctgcccgcctcggcctcccaaagtgctgggaccaggggcgattttgccattcagggaaccatcggtaatgtccagagatagttttggtgttacaattagggatcatctcatgggtagagcccacggatgctgctaaacatcttacaatgcccaggtaatccccagcacaaagaatcatccagtcccaaatgtcactagtgccaaggttaagaagtcctggattctacatagcctcctgaaactgactgggttcactgaacacgaggtctttccgtgtcagcatgtttgttctatcatccagtaaacattgcttgagcacctactgggtgccaggccttgttctagcaccggggccaaatcagtaaacaagacaaagccccagcctccagagggcactgatatccttccagaagaaaagacacatcaacatgcaacaccttgatggacctccttccctccctcttcttctttttttttttttttttaagacagagtctcactccagcccaggctggagtgcagtggcgtgatctcagctcactgcaagctccgtctcccgggttcacaccattctcctgcctcagcctcccaagtagctgggactacaggcacccgcctccacgcccggctaatttttttgtatttttagtagagatggggtttcaccgtgttagccaggatggtctcaatctcctgaccttgtgatccacccgcctcggcctcctaaaatgctgggattacaggcgtgagccaccacgcccggccctccctccctcttcttaattgttccagagcatcccagcaggaacaacacaccattcagttagccaaggccttctgacagacatgtaagctgctttcatcttcttgcaatgacataccatcacaaaggaccatgcctccttgtgcccatgcatgaaaggtgccctagggcctcactagggtcttgcaagcagtaaggccacctgggaggctgctagtcccatgccttagaaggtacttaaccggctttttaaccagaccccaggcgtttccatgcacaatacgatttgagaagcacagctctaggtagctacctgtagggggtcggcgggctcaggggccactctccctttatatttcagcagatactgcaagtgccctcccaaagaccctcctgccagcagtctgcatgttccccttctgcaccaactttgtgttgccggaggttgccgtttttgccaagctgacgattcctcccattttccaactatggagactgaggctgaacgaggtgtctagacaaccagcgccaggggccaatgacctctaaggcctctcccagttctgacatttaggatctggccacagcctaggtgtcttcgtaccagcctcctgatcaaccactctcactctcagtagctgcttggagcaggaaggaggaaaggttacagctcacccagcaaaggaagcagagttcctgagggagggagcaggcttagtgggctggacatctgtgagcgccactggcaaggctgctgctatgccccttcatgtccagtcatgcaggacggaggaccaggctggggacagcgcaagccttgccccgtcatgaataacaggtaacgccggagggccgagcagaggagggaaagtgctccagggccaagaagccagatgagtccccaactttgctctcaccagttgcacatcttagcctcagtttcctcccctaaaaatgggctcctaccactcactgcagaaggctgcagtgaacacttatgcacagatcagtcaacaaacagcagccaccacctgaagccttgccttgggccggtgctctgttacttttattcaacttactatagcctcacagcagctgactggcactgttattctccccatttgacaaatggggaaattgaggcccagagaggtgcagtgctctgcccttgatcgaacactgagttatagccatggaaggggtatccttggacctgcaaagtcagcattactcatctgaattctgcctctgtggagctgtgtggccctgggcaaactgcttcacctctctgagcctccactttctcagcagtgaaatgaggacgtaacacacagagtggagaggggaagccatctgcaaacagagaatactgtctgcagaccccccactgagacttcataatgccacctccaaaacacccagcccaggaagacctgtcacctgtgggcatctctgatctttcctgagctctagctgcaacatgggccaggccatgcaaagctggtagcccccagagagggaaagccacttgctctagttgacacagctggtaagtagtagagagcagagccaagcagcaagagatgaggtttcaaacctgagagcggtacaggcagcagccagggtggaggcgagggtcaggctcgagctggcaggtggctggagtggggaccaccaggagctggcagacccttggtggccaaggtctctctcctgctggcttttagctgggaggctcctttgaaggatcagtcagccttgcgatgggcctgcctctcctaaaggctcctccctcttctggatccagtcttgttgctcacctgtggactggcagcgggcacctcctctctggggaatcagggcttctcttggcggctgtggctcaggtctcctaggccatgcagtctccctgtggccagacttgccctggtctctggaattccctcttgtcattttggccagaggatgtcagcccctgcctaaaaccttccacagaattctagctccttcctgtagtttgtaacagcgccacccaatagaaatgcagtgtgagacacacttcaaattctcagttttccagtagctatgttacagaagtaaatttaataacattttatttaactcaatatatataaaatattatcatcaatcaatataaacattactgagatagtttatagtcttttttttttaattacttagtccttgaaacccagggtaaaactactttcagcacatctcaatttggatgctaaattctcagtagaaatggctaatctgtacagagatttcataaaattgatagttgaacaaagtatatccacacacccaaactgttgtacacacacttaaaagttttccaagaatgggaatgagtatctgttctgaaattaaaatagataaagacttgaaattcagttcctcagccacagcagccacatttcgagggctctgcagccacacgtggtttgtggttgacgtggtgggcatgaaggttaataaactcctggccaggcacggtggctcatgcctgtaatcccagcacgtcgggaggctgaggcaggcagattacctgaggtcaggagttagagaccagcctggacaacgtggtgaaaccctgtctctattaaaaatacaaaaattaggctgggtgcggtggctcacgcctgtaatcccagcactttggggggccgaggaaggcggatcacaaggtcaagagatcgagaccatcctggccaacatagtgaaaccccgtctctattaaaaatacaaaaatcagccaggcgtagtgacacgcacctgtagtcccagctactcccgggaggctgaggcaggagaatcacttgaacctgggaggcagaggttgcagtaagctgagatcgcgccactgaactccaacttggtgacagagcaagactctgtctcaaaaaaaaagaaaaagacaaagaaaaagaaaaagaaaaaaaaatacaaaaatcagctgggcatggtagcaggcgcctgtaatcccagctgctcaggaggctgaggcagaagaatcacttgaacccaggaggcggagtttgcagtgagccgagattgagccactgcactccggcctagatgacagagtaagactctgtctcaaagtcagtaaataaacaaacaaacaaacaaacaaactccttaaggccaggacaacactcccaatccctctgctctcctctcttcccccgctcatatcgtattgtaattgtccatcttggagtttctcagtctctgcactatagacatttggaccagatcattctttgtggtagtatggggtggggctgtcccatgcattgtaggatgtttagccgcatccccggcctctaccaaggagatgccagtagcatcccctccctgagtcctgacaaccaaaaatgtccccaggcattgctgactgccccctgggggtgcagtcatccccatcaagaacactggtctattgcggggtaagagggggtgagactaagccgattctttccatctcccaggtacctgtccagtgcctgatgcacaaaggtgcccaagcctgtacctgaacagaagaggcttactccaccctgagactcacctcttccaggaagctttccacaatgccttagcccagttagtgtttctgctgggatcccacagccccctgcgctcaccactggtgcagtcccctccaagggtaggaaatgggccttgctcactgtttattttcaaggcctagcctggaagttggtatacagacctgagaaacagggatgacttaggttgaaagccatgcaaggccagttttgcccattttaattcagggcttcctcatcccagcaaaaggtgctaatatcagtcacagttccatctatacaccagtcaatgagctaatatccacaggatttagagagggaaactgaggctcacacatgtgaagcttgtcctggattccaatgaccttgaggcttaaaattcccggttcctcctcttatg

SEQ ID NO: 98205 - DNA, 45555 bp, Homo sapiens
taataaaaaagttgcaggccaggacccacgcctgtaatctcaacacttcggaaggccgaggccagaggatccacttgaagccatgagttggagaccagcccagacaacatagcaagaccctgtctctacaaaaaaaaagaaaaaagaaaaaaaaaagctgggtgtggtggcgcacctataatcccagctaatcgggaggttgaggtgggaggattgcttgagcccagaaggtcgtggctgcagtgaactatgatcgcgccactgcacttgctccagcttgggccactgagcgagactcatctcttaaaaaaaaaaaaaactgccagctcatttaaggacaggcagaaactcaaggaagcggtttaaacacctgggaccctaggagaggtgagccccttaacaattccatgaatttcagcattctcctagctgtttcactctccagttttactgtacacccatgaccccaggtggatacttacatgtcccgggacacagacacaggcccacacggcatacttttctgtctctatcctgagcacatctctgctgaagttcctgcccaagctcagctttaaggccaagaggcacccttcctcctgttggaaaactagcccacctttgaaagttctgggctcagagaggccaagtaattcacctagggccacacagctcagttccagtccaacaacccggcccacactccttggccaggagagagggaagggcctggggtgcccacagggtcctccccagactgggggcgatggggattggagagggaagcgagggggccagagccctccccgaggtgatggtggccagacctagccaccgccaagccgatatgcccccacacacctgtccccgccccctgctctgccacacctgtctctggcccaccactgtcacgaccgcctcacctgtccccagcagcctccccagtcacggcaacctcacctgtccccggttccccatctgtctcccgccccttctccatgcgagacccccgcccaggccgccctacccacccatcccggtgcacctcccacctcctcccagaggaccccgcctcaccaccgcgctggcaagcgtgcagagcgggccgcccattgctgtatggcatccagatcttcttcagggggttctgtgtcaattcccgtggggacgccatcccggggccgggatgagtcggactgcgccgcttccaacccagcagccgggccacctcgggccacccgaggtcccgccccttgggccccgcccctcctcaagccgcgacagcccatgtctatcttcccgcaggtcccgccccagagtgagtaggctccgccccagctgaaaggggcccggcctccgaccacgcatgcccaactcacctacccgcccgttttggaacaagtgggcccagttcttcaggccaggatcgagaatgcgcatgctcaactccggattgtactggtcccgccccagttcaaggcccggattgtgcaggcccgccccggatgcgcaaactcagctctcccaacctgcccgcgctgatttgcataggccccacctacgggctccgccctggcgctgcatccctgagcagcggcacgcgtgaattctgctacctccttgctagggagcccagggcccccaggagggaggggttttcatgcagtgggacgaggcctacgtgacccgcacggccaggttggtcagagccgacaggggccagtaggcctgcagtcccagccgtcaactccgctgcgccctcctgcccctcctcggggtcccccttgactgctccgagccccgggactcttccgccgtccataggagcatgctcaaccacgctggaaaagctcttttacctcatggatagagactcaaaacacatttcaatattgttcctctttctttgctttggctgctgggagcaaatgcgtgggactttttttttttgagacggagtttcgctcctgttgcccaggctggagtgcaatggcgctatcttggctcactgcaacctccgcctcccgggttcaagggatgctcctgcctcgggttcccaagtagctgggattacaggcgcccaccaccacgccctgctaatttttgtatttttagtagaggcgggatttcaccacgttggccgggctggtctcgaactcctgacctcaggtgatacgccctcctcagccttccaaagtgctgggattacaggcgtgagccaccgcgcccggccgtgcgtggcacttagtaaccaagtactttgggtactcactaagccctgggagtatcttaatcgtctttccagaatttcattttttacaatttttttttgatttttagtattttggtttttttaactaaagttttacatattttttgaaactaatatgttaataacattttctcttcaggaaaatgggatgtgcacattgtctatcttacagtattacagtataaattaagtatgtcaatctctaagaaattcattttaaaatacgttatggttgccttttactatatttgtatctccctcttgtctttgaaaatgcactggggacaaggaacaagggagagatccagaagttcctaaacccctggctcactttcttgtttggcccccaccggactcctgcagtttcccgcctcctcgggatccccagccccgcctctccaagctttgtacactctctgccccagcccccaccaacacggcttcaacctgagccacactgccctctagcgatgtcatccacaacacccctggcaggtgccctgcatcctcaggttctctctgcccagtgtgtacccagccaggagccaggtgttgagggcatgggactggcaacaagactggcctcgtgggctataggtgtagcaccccctcccatgccctccctgccacagccctgccttggatcagtccaagtccacccagctctttaaagcttggcaaggacccttaagatgactgacacagatgtcttgcccacttcataggaactgaagattccaaaggtccacatgctggaagcccatctggaccctcccccaaaccagctctagctgcttgccctgggaacaccctgccccaggcagagtcaacaacttcctccttcctcatcctccttttgcagtatctacccgcttattcctccaccccagtcccagcagatctgagcacatccatgggcggctcctgatgagctgggtgcccctcgtgacctgctccctacttctccaaagccactcattctgttcgtgacacagccagccctcttgtcttctggccactgccaaggccatcttggggccaccgtggcctctgagacctcattaccacatgcccacaccctgtctaacccgcagcactcattgcaaaagctatctcctctgatatctacagacacccagcacctcctctggcctgtccattctcttcccagacctcctgggatgctaatcaagggctgggggtagaggacagctggcctgggcagggggccagggctatctctgggaaggcatcctcacacccagacaggatgagcctggttcccaggaaatgcaacagctctgcaccttcctctcttccccagaaagtctacccgtggctgacccaggcaccctccttcaaggccctatgtccagctggaaggccacaggtcaacatcaggagatgcctggggttcctccccaaggccaccgtccacatctgctctgaggatattctccatctcccctcccatggccctgtttgtcaggtgggaaactgagggtcaggaagagggagaagggtccaagatcacaaagcgagtccacagtgcagcatggactcagctcaactcccagccttccagaccttgcctgccacactacagtggaatcgcacagtccaccttcacatgtgtgctcccactcccctgtgtcctctccatggagatgctgtcccagcgtctgctctctcagcatcagcggatgcccggtagaatctctggccctcatggctttttcctcctcagtatatccgaaagtgagccagctgttctgtcccaggcgtgggaagtatgctgggatgtctgtacacacgtgtgaacatgttctgctcagcctctgcccaccatgaacctggctggcctgaccctggttggctcccagggtgccctctgcactgaccactggacttcctcccagtgtcccagcctagaagccatgtggtggccagttctcaaagctcaaactcttcccagtccctgtatctactggccagtcctgacagaactgccaaaccatcccaccacacacacacacacacacacacacagtctcgctcctgttacccagcctggagcacatagtgcaatcatggctcactgcagccttgaactcctggcctcaagcgatcctcccgcctcaacctcccaaagccctgggtttatagccattagccaccacatctggcccacaaaccaccctttgcagcataaagacccaggggtttcagtgcatgccacacaggcccacacactgatgcacacagagacactggcacagctgcacatgcacacacagacgcacacacactcacaagtcctgcaccccagcatgtgcagagacaggcaggctgcagtggggcctgctgctctctgctgcctcccttcccacatatatctctccacccccagccctgctgtccactgggaggttcaggagtttccaggaattccagcttcctctggccatttccagcaaaggattgtcccctgtgtctccctgggcccagggctcacaaggagtgtgaagttctgacttcaggttatagaaccatgtcaccaagcagcctgggaaccctgatctgcacttcctccttccagcctgccacagggcgtacagtaggtgcttagggattcaggaccagcaagggcacacagaaagggttcagagaggttcatgaccaaactgagtacacagcaggtgttcagagaagctcaggactggcacagggcacacagcagacaccctagaagtgctggtttaagggctaaagccacatcatgtgaaacccatcctaaatgagcctctagacttccccaaactggtgtgaccccaagaggaaacctggacaaacatgatcccttggaggccagcaaagagcagagcaggagggcctgggcagcgccagctggcggtccctccccctgggctggaggaagacactatttatagttcccccttggcccagccccctctcccttgcagggcgacagttttccccctccttcgggccactgacagatgaatggccctcagagcacccctaaaccaggagagaccccccaacactctcgcacccctccagcaccaccctgacttcatccaggtctttccctaaccctccaccctccccacgctgtcccgtgcctaccccgcctgctgctccccggccccaggtcggtcagggagctgcctcctaacgagcctctgtccatcctgcaaccaaactggccagggccactgccccctgcagctccagagtggggtaaccccgcctagcactctgaagagagagaagcgactcctgcggctcctgcagccccgcctccccagcccactgtaggcccgcccccacagggctgcttacaactgtgagggcagcgccagtgcccccactccagtcagccggccacgctgtggccagtacagtctccctctcccgccagagctgcccatgccacccagcgtctgccttcatgtccacctagagttgtctgcacagcccagagtgcctgccccctctgcgggcaagcccgtccacactgcctggaaagtcagttctgtctctggcccagcaatggagttgggctgtgaaatcaggcaaaacctagtccttccaaaccaagggaccaggtcagttaaccggggagctagggaggaaggcagagaagccaggtatgactcacccaccatgtgtcgcggcctgggtgcacaccactgggattctcgcacatcccatccttcagtcgctttgtgtttattgagcacctcctgctgcaggacctccatgtctgctatatacacaatgctcacaggcttgctggtgtcgctttgctttacagataaggaaaccgaggctcggaaaggtgaacacctttgcccaggacagtccgtgcgtgaagtgggacagagtttggttggagctccggcagcctgagccctgtctcctgtgagccctgcatgtccctgggtcgaggctggggatgcaggggtacgtggggaggacagggcctggccaggagttgttcttgcttcatgcaggtttgggggacaagcacccactcctctcagacccctcacgtacccttaccctgctcacacacactcacagctgtcagagactcagccacacacgcacatatgcgcccataagacaaggctgccatggtcacaggcttcctgtgttcgggcctttgtgcctggagacacccctcacagccccgtccatctggggcaggtgctgcctcatggggcacagagcaagcaagtgaccctcagccagcatttctctgtgtggtggcctatgggatgacagacctgtgggcctcagagggactggtcggaggcagtgttgagctctcgtgttgaggctcctgaaagtaacatgatgatgactgcatgtggcggtgtccaggtgttctgtgactatggggcacccagacatagcaagactcgccacagcagtgaccttacgtggcagcatccaagctgtccggacatatattaggtctgtggggcacacaggcatggcaagactccatgtggcagtgacccaacttagcaatgtccaatgtccaggctgtccagacacactgtgactctgtggggcactcagatctgatatgacctgcatgacagtggctccatgtggcagtgtccagacactgtatgcccagatgtggcagcgtccagacactgtatgcccagatgtggcagcatccgtccagctgtgtggctgccctccaggtcttcccatccagggtggccctatcactgtgaccccctctctcaggctcagcagtggccgacacgggccaggatgcgggcgttggtggtggcctgctccctggcagccctggcccgggcttgctccagtaagatctgcaagaggccgatggggacatccagcgataggacaatgcgcgagccagggtggcgggtggggctgcagtggctctgggcagcccacggccatgtgggagcagctgaggggctctctgaggccgcaggtcggggagtggtctggggagaattctgagggcggagctggaaggttgggataggggtcactgggacaaccaggactctgcccaacatcaggaccatcagcaacagcagagcacacctggtcatcgtgaggtcaggctgcaaggagaaaatgggctcagggcaggggctctggtcaactggggtccatggacagagacagatggcaagggcagagtgacagagcgggggatggagagagaggaagacaccgagaaaggggttagagaggccaggccaggccagagacagagaaggggagacaagaggagagccagaatgagacaaagaggcagaaagcaagacagaaaaaaagaaacaaagaaatccagagacagagggacagcaagagagggagatgaaggagatggaggcagagcaaaatggagactagaagaaaaagacagacagaaaccatcccagagacagacagcatgatggaaagaaagattcagacagaaacacagagtccacaggagggcaggcggttctcagcaggagagcttgcagctgatccaggaaacagaagggcaggaatcggatctcagaggcagaaaagcagccagagatcccagagtcccctgggtccaagccctccataaagccaaaccccacatccactcaacctccaagacccttcccatcccgacccaacccagtcctaccgccaccagctgcttctggggtaaggcagcctgctgtggctgcctggggctggggccaggcactactgtcctgtggtctgaccctctaccccgcttcagggcccatttatctccctcagccccctggggtgggagctggtacatgcttcctggcatgaggcagccccccacctatgactcatccctcccgggggtgtccttagcccccaccctatctactcttttccggggacaagttggggactgagaatcacaagacagtgaccaggactgggcagagggactctgtacccatgcagaataataccaaccccccaaggaaaaccttcccccttgaaaccccccatcttcccaaacagtcacaacaggagccttttaaaacagcagctttaatgccccccagaatcagcaccatgtcatcacaggcttgggtcaaggggcgggtcagacgccagtcacatccgctcactgcccacagccaccccccsacagtgagtcatctgccagggtggcaggagccacaatgggggtttgtccacaggggggaaggctagacccacgggaccaagtcactgaaataacggacgtgcacwcgcacgctcacgtgcacacaagcctctagcaccaaggggagggacagtggggttctgctgagaccccgactcctccaggggatgctgaatctcagctcattatctgggcctcagtcctgggcagtacctggtgaggacaggttggaaacggtcgtcagccatctgaccttccccggagacgctcaggcagaggcaccgccaaggggagggagcggaggctacaacaggaagtgggggctctgacctcagaggggtccatacttaggtctttaaaggagggaacatggaaggggaccctactgggggctccacggctggggctctatattcagctctttggtctgggcgtctgccccaggtcccctactgcgagggagcgtctcctccaggaccctgacctggaaccctggcccaaggactcctcccccagaacccgatccaggcaggctcagtgcccagttccccacggtgggggctcagcccatacctgtcccctggctctggaccacccggggtgggcagcggcgctcgcaggcctcacgggtcccaaaacggttggcattccctccacagccaccatagacaaaagggtgacaggcctctgtgctgcctgtcacagcccgatggtaccagcgcagggtgtaggcagtgcaggagccctcatccagtggcagggaacaggggtctgggccaatggggtcaagtcagcagggtttgtgggaatcagagagggttgaaaggtcagggggaggtcagcagggctcagccctgcctgcccctccccagaccccgctgggcgcagccccccattctcaccatcactatcccaaggagcttcagggtcctggtactcctccacagaatactmggagtattcagagtactcatcatcctcagggggtacccgctctgcaggtagggcagggtgtgctgggagcagtggctgctggccccggggcaaggtgggcagcactgatttccactgtgtgcacacagtgcccatgcgtgtgccctgcatgcagaccctacgtgcttggcgtgtgccctgcattcatggacacccatgtgcgtgtctcggccccacccatagctgccccacgggttcagctgtcctcaccttcctcctctgcatgagagacgcggagcacaggcacagcatggagctgggagccggcagtgtctgcagcataactagggaggggtcctggagccaagagcaggggcctcagggccctgaagtcaccatgggcagccatcccagccaacccccctgagaggaccccagttgataggcagggcagggcctggggtgaagaaagttctgggagtagaaaactactcacgtgatccagatgcgatgaactggccctggcaggctagagggggcagagagggatagagagacaatgacagagagaaggatgggaagatggagagacagacagagacacacaggcagaggggtagagatacacaaagagatagcaggagagggtaacagacaggagagagaggaagagagagggtgggaggtagatagagagatggaaaaagagaagaaggcagaggagagggaagttgggaacaggccaacaaaaggcaagagacagaagcaggccagacacagaaacaggcaggtggtgcagacagagacgggaagagacagcttcactctgatgcccctcccaccgggtccaggtcaggcccaaggggaccagctctgctcccaccatcatcccactccccacacagccaagctggacatctgagagcactgcatggcaatcctcatctgcctgtgtgtctccctccactggggacacatgtcatgtgtcagtcctgcagcacatgtgtccttctgtgtatccatccatccccccatcttcttgactgcttgccctgtaagttctaggggcctgcctgcccttgcctagggtgctggggtggagtgggagactgcgggctgggcaccactcaccacagtgctgactcatctcttggcgcacaaagccccggatgtcatcctcctgggagcagaagaccacagggaccataaagaacccatggcccacaggaaggacatagggcacataatacagggactatggtgagactgcatggagccagggcccaggggtcagggtgctgggtgagggaggtagggccccagcccacccaggcccacccaggcccwcccaggcccayccaggcccacactcaccgtcagtgcagcttctcccttctcgcctcgaggaccggcaggccctggccgcccctatgtgcaacagatgggaccaggctgtgacctctgacctcagggacaacagaagtcaccccgatctctgacccaagccttggaatccctactcacctgctcccctctctcgccaggagctccagggaccccaggagcccccaccactctctctcyggggggacctcgctcaccctgtcagacacagggaccaagtgagcagggtcagaggcagtggggatcagagtcaggcaggttgggggccacagcttcagaggttggggcaggcaggctggaagatggttatgaggttggaagggtagggaaggttcagggatcaggagtcagagctggggccccttaccttctggscctgaagtccttcggggcctctgggaccaacactgccaggtggccctgggggaccagcagagccatcatttccactggggcctgggaagcccccaattcctggggttccctggggagatataggacagagtcagtaatcagaggccccagagatggaccctctcccaaagtscwcgctcccctcaattcaccatgaccatggcttcaactcacccgctcccctttctcgccctggtcacccttggggcctggctgcccgtcaaagcctcrgtcaccctgggaacagaagaaksatgagagaccttctgccctgacctccctcagctctggaacctccctgaactcccatgagctccctggcctaatgcccaaaccttctgtaacccaagcacctgtgagccaaccagatgtgatccccatgactccaactccactatagccccctgccctgatgcacatgccccctccacctcccatgctttcatcctaactccactgtgaccccaacccaccttgacacctcgagaccagccccacttcagcccccaaagtcccaaccctctacagccttccttgtccctacacccccatgacccgaccatgagcttccctgccccatcctgactccctgtcatgtccactgtccacagaccctgtaccttgggaccgatcaggccctccttgccaggggyccccgactggcccggcacaccaggctccccctggagaaaaaaagacatgaacttggcccccgtccacccgtggccccctcattctgagcgtgcccacactcaccatctctcctttgtgtcctgccagcccggggcggcctgggggaccagcttctccctgcaggcatcaggcagtggggtgagccttaggccccaggccacgtagccccccagcccccatcccctctgtaccttgtctcccttctctccatcaaggccacaggctcccttcactccccgttcaccctgagggagaaaagcagatgaagaagtgattcccagacacctcactctgtgacccccttcaccctgaaactaactctccaaacaggcctcagctactccaacctctgacccagtgccctaatatctgaccccaggtccctcgcccttcaacattaggccttcctgaccagaaaaaaaccaatcttgtttctttcctaccttgaggcmccrgggacccatgaagccaacatctcctttttctcctcggataccaggcactccatcctttcctggggatccctagcagggagagggtccatgtgaggtcagaggaggtcagtgagggaccaaagagaatcgccctggatagtgggtagggaacaccatggggtgggagtcacctctggaggccagagccactggggcttgccatggggacaagggtcassataggcaggggacaccatcataggcggctactgtggaggtgggggaccctgggtgacatgaggacaccatgagagcactgggtcactataaggtcaaaagctaccacastggtgggaccaccatggtgacgggggccctctggggacagggggcccctgtgggagcaggggcatcttaccgggtcaccagggatccctgctgcaccaggttgaccctgtgagaaacacagatgggggagcccttcagtgggactgtccccaacactggcccatccgctgcatgtgtggccactcagatgctcagcggccaggkcccaggccacacacagatcccgggtgaacacacatggggccggcagcaagggagccagaacccccagcacttaagaggacccccaggatatgtgtgtgtgtgatgctggctctggacctgggcctgggcctgggcctggggcagaacttgcctggggtcccaggagtccacgcagtcctggcaacccggctgagcccttgtcacsaggctctcccttgctgccctgtgggagtgaccaggagagggattcagtcaggaccagatcaggctgggggcttagaatacaacgagcccgccagctggggcagagctcaagtcactcccgaacggccctagcagcacgtcctcccagcctgtgccatagcgggtggaactgggggctgtagtccacagactggctcatttctcaccccaaggactccagacccttgccccgccctcttatcactgggttcctcatcccatctgaagcaccttcagatggggacacccaaggagcccctttcctgtccctatagggccccttcatagggccagtccacagagctctcctaacctcacaccaaggccttgagccctccctagagcccctcctctcggccactccatagtcagccacagaaccccttccccctraaccccagaaagcctcctcctgtcctcccctcctgccctcacagwwgctgtggaaccaccacagccacaggaccccacagagagtacaccaccctcttccctgtaccttgtcaccagggtccccattgtctccccgaggtcctttgtcaccatccaagccccgaggccctcgttcaccctgggttggtttgggtaagaagtcacggtaaggggctgaaggtccctcaccctctgggagtttgagctctcagatgccctgggccagccccacggggtccctctcgcacccaggggagacccagtccacacgtgggcccactcaccatgtcccccttggcaccccgtgggcctggaggccccaggatcacagctgagtctccctgagggggcaggcaggaatcagaggagtcgggagcaccctggcccctgccctgccctccccatgcccacactcaccttgtcaccctttagtcctgcactcccaacatcaccctattgggcaaaagagtgtgagtcccgcccaaactggggaggccccgcrcctgaattctaatatcatacaagatccactcacccccccactcatgccaggaccttccccacgttcctaccttctccccacgctctcccctgctgccagggggcccctgtgtgagagaaggtgaccgtgagctacaggaaccagggcagtggaggacggaggaggatcagggggaggagggaaacagtggggaccagacaaaggggacaggggtagacgaggagggccagagggctagggaggatggcagagagtcctggggtacaaagggcacaggcaggggactgaagtcacagcactgtcactttccccagcgggacccaccgtgagtcctcggggtccctcctggccggggcggccatcttcaccctggatggtgacattaggttcattgactcagaggttggaaatcagaggcaagagctgggatgaagggagttcggctgtggagtawgacatacgtacccggatgcctggctccccacgctcgcctcggggcccaggcagccctactccagggtctccctggagaccaacaggacaccggggatcagtgaggggaatcagtgggggacgcagggtcatgggaggtcagtggaggctgaagggggtgaccagggcacaagagagagtcagcagcacttgtcccacctaccttgtctcctttgagtccagaggccccaggtggtccctgtaggtcagagtgaggtgagggtcctgtggctctcaaagcgcctcccccaacaccccacagtgtggcccgccccatcctaagtcctcacgaggacaggaaatcaaatacgtggggctttagggcacctctactcaccactgaccccggtggtccaggtggccccaggggtcctgggattccttctctccctgggrggcctgccagaccctaccagaaaaatggggcaagagaggcagagagtgacttgggaaccctcctaccctctgccccctcaagactgggaacccccaaggcagggccccctcctcacccaccatggattcaccatgcccctacatgctgttcccagcccctcacccgctctccactagggcctggctgacccatctctcctcgagggcctgtctgacccgggaacccaacaacaccaggagcacckggcaggycagggaggcccagatctccctgaaataaaaacagcaaagggagggaatggtcaatgcaggacccctcccaggactctcatcagaactccctcttcctcctgtgggggcccggcctgctgccccyacaactggtgatggggcattgacttaccttcacacctggagggccaggaggcccaggggagcccgggaccccgactcctgggtcaccctttgaggaaaagaggcatcggatcaagctcagggagtctcacraccaggaccccagcagggacccttctgggtacacataccttgaaacctttgggtcctggagcccctttctgaccctaagaaaacccagcaaacagcatttgagagggtaggaacatgagcacagagttcagacacgggctgaaaatattcccaggggagttctgatgtgaccatgaacacatgggaactcagacatgcgaccaagaattggctcacaggagctcagacatgaccatggcctatctcaggacagcacagacagagggacgctcagatactaccatagacaggtgggagttcaggcatggcacaggcacagggagcccacacgcgagtgcagacatctggctccacagacgtgagtgcggacacacgggcgctcagaggggaaccccaacacgtccactcccgggtagagcaggcatggccacaggctgaacgctggcagccaggggcaggggaaaggaggattgtaaacacaggaccaaggagaggttcacaagaactcaggtgtgtcctgggatctgggagatcagaccagagcacacgtgtgcccagatrtggtgagaaacagaccaaggatgggcacacagaagccaagacagggcccccagagctcagagtgtggaagccgacagtgtgtggctccctgtgatccagagagcaggctcctggatgttgggacatgcagcccgactcaggggctcagacatgtgccccggcccaagagtggccccttatgcccgccatcacactcctcaggccaggctcgcccttgcctaggccccggactcacatcttccccagggtctcygggctcccctgcacggccagcttcaccctgcacagaatggcaggtgaggggtgtctggactgagccttctctgctcagtagtcaggccccagggccaacccacctcaccttctcgcctcgcggccctggcagtcctcggtcacctttggctccctgttgacagaggtcaggaggcaacacaggcatcagtmacagaaagatgagactccggagggaggcatggggccagagcttaaatatgcggtctactatgaaagctgagggtcatgagggtgggtaaactatgggtcgaaggtcagaagttaggccactggagagacaggacccccagaacatctgctgtcagaagttccctacttaccggctcacccaccaggtctccagcaaggcctccaggggctccctggtaagsgggagaggtcagtgggattccttggcccccaccagttgaccccccmtcactggcagccccacacacactcaccttctctccctttgctccagggagcccgaccacagcctgtggggaatgctagtgagtttcctcctcctcccccgcccccaccctgccacccccatggcatttggaaacaggcttgtgggtgaggcagaggagttgctgcagggggtggaagtcagggtcaaagatcacctgtccaggggcccccgtggggccaggttctcctttaggtccgacagggccaggcagacctggtgacccctatggcagagcagcgtgaggaactcagtgcctctccaccaccacccctgctgccccactcctcatatttcaggcccacagctgggcaccacaccctagcgagctgcccccagaacacatactggcacaccagggctccctctgtctccatcttttccactggcaccatctcgacctggggctcccggcttccctgtctccccctgagagggaagagctctgtcagggctgcctgtcgacccttgacccctggagcccaacccttgacccccagaactcaccacttgtccaggcaaacctggagacccctgtggaccctgacggagaacaagtcrgatgtcagggtgacaatggacacaggacgacatgagagaacatgggccccaaggagtgaaaacacggtgtccctacaggggccacagggactcactcaccacaaggcctgaagggcmkgggggtccaggaagtcccacagctccagtaggtccagtcaggccctggaggaagagaaagttcagggcagtgccaaccccacccatctccctatgaccctaacctgtgagctaggccactcacccgtcctggaggtcctgtctctccaggctccccctgcaaacaacccagagactgcatgagcagagcccacgtggccagggctcctggagctcatcctcattgcaggagatgacagcccaggaggttggcgcacactaccccaggcatggacacagcttgaaggagcctcctcctccyatccacacacctagactcaccttcaggccagaaggtccttggggtcctgcagggccagcaagaccctagagaaaagggtcaagggcagggaacagggctcagggattaacacagagaaggcctggctcatcagctgtggccaatgcctatcccagcccttccagaccctcaccaggcagtgttccctggtcactcaccggggcaccaggtggtccagggtctccatgaccaccctgttgtggcgaaaaagagtctgatgagggggagttagccgcaccccaccaaggaaactgaggcagtactggtcactggggcagggcacaggatgggggcaagacaggtgaaggttcttgggtactcaccactgggccaggggggcctcttggaccctgcagaccctacatagagagggcactgatgagcctcaawctgggcctcacttgggcctgttcccaacctctgggrgctttttccttgggggtcaatttccatacctcaccctttccagtcacagataatacctacccatggactgcctctcatagatagcacacacgggcctgcacacacacatccacatacaaccacacacagacacaggcacacacaggcacacacagacacaggcacacacaagcaggcacacacmgagaggcacacagacacaggtacacacaaacacacacacacagacatgcacacacacagcagcagcagcacctagyggagggtccggagcctggggccaggtgcttcagccaccactcaccggcttcccttcaggcccagccataccacgctctcctggtagaccctgcagagaataggtttaaggccttagtttcccagttccaacttcccctccacccaccatccccctagacagagtcaggacccagacagtcccaggcagtacagaccccagccctgcacacaggacaatacatgtgagagccaccttcttgcacatgtgtggctgttgggcaaggacttaccgggttgccgtcctgacccctcggtccaggctctccccggtctcctttgatgcctggcacaycctgaaggcagagtgtcgtgccctgagcccccagtccctgccacgtgcccaggtgcatatgcacaccacctctagtgtgcscccagaaaggagggggactctatggaagggtggagagaggcctcaccctgtctcctttgggaccttggtcaccattgctgcccggctccccctgtggggatgagatgtcaagtcagtccctagtgccatggcagagggtggccccgagctgattccacacactgaccttagcacccttgagtccagggggtccctgttctccagagagtccaggacctggctcatccacagacacctacaaacacaaggtcacaggggagagatgtctctgtcatagaggcatgggggagtcatcacagatctcaggatcacagagggttatagggtcagaaattccagggttatggcacacactaccatatttctggggaccaagctaagggtggcttcctgstcactagtcacagractaaggcagggatggggtgatcaccttggggccagggggtccggggggcccaggggttccagggagtyyaggagggycatctctgccctgcaggaaacaagaaaatggggtggcagccccagcacagcctccagacagcctgccccacgaagcccatcgcagcccacctgttctccacgttctcctttctctccccgttctccctgaaatgcaaatagcgggtgagggccaagcccatggggggtcccacccctcccaacccctcttccctcactctcctggccagcccccagcctcaccctctctcctggccttyctgcctctcccacacccccagccctgmctgggagcchgggaatahyaggctttycaggctccchggcaaggcyggaaggcsygggggggsccctctccccaagggccagaccaggtggcycctgagggyyagggtctcyacvgtcgcccttcagcccgcgttctccaggaaagccgatggggccctgcaggagtggaaragagaatgctggtggctgtacagctacaccccactccacggggcacaacccactgagccacttctgctcacctccttgcctggggggccctgttcgcctgagtcccccttggggcctcracgccgttcgggcacaggcaggaagctaccagagctctcatcccaggtctccacgatctcccgcagggcagatgcctgagggacagcaagaggtcagaggagcggggtgygtcgccgcagcccctaygcctgtgggcaccactagccccaagggcccccacttgtccctacccccagcccctaaacaacccaccttgatgccagcagtttccagcaaccgatccacattctggggacaaagtctgggtgaagggctgcccatgacagagaagctcctgccttctgccccrcacggcctcaggaaagcaccttsasacccttttccytaggcctcttgcccagagcaccctttagcacttggttgaggcatggctggagactcctgggagcccctttctggtgtgtccccactgcccaagttcccttgagtgtgggctacaagaaccccaatggggcagggcactgaacacacagcacagaacctatggagcctcatggcaaggggaaggggatggcaaggtggccccaatgggcatgcaaaacagagtcaaggggacatcccaagcctggctcaccggcacacttccaggctctcctcgcaggccacgctctccagggaggccctggagagatgaagacaaactgctaggaaccagcctatgggtgtgcatgtgcacatgtgggtgctgtggctacctgggcatgtggaaaaggtgggggcctcacctgctcccctttggatccagtctccccacggtcaccctgaaaacaagaatgaccaggtggggaaatggcccccagcctggtcagccccctcaccacgccccctacccaacatccgcactcaccttggggcccgtgcctcctgggacaccaggaaaaccctgagatacrgcagaacacaaaggggtcacaaaggcccatggcttcccaggagggttgcccattgaaacatcatggcttctaatgctctgaagtcccagaatgacccaggacactcacctggccaggagggcccactggccctgggaggcctggaggcccctggggtccaaggataccaggagctccacgctcacccttggggccatcacgaccctgtgaaggatgcagccagcatcagcaccctgagacctcagaaaagagtggagtcatattcccccagggtcagggtcaggggtcagaggttgcagaaaastccaatastcacttctctcccagaggcgcctgaatctcctttctctccctaaggaagacaaggatgcttcaggcatggctccaagcagagaccagagagrmcccaggtgggggactttaccttcctcccgtcttctccagggtccccaggttctccctgtgggcagaggactcacatcagcccaaacattcactggtgtctggctgcaagacactaccttgctagatttcagatgactgtgactgtatttctgtgcctgtagctccatggttgtgtgtgtcttggagcatggcctgtggccgtctgagtgagctgctacatgtctaagggtgtgcctgcataggcctgctcaccccaacaggcaactgcacacatgtcctttgactctggctctctagaggtagctccacatttatgcatctctgggttggtgatcgtccacatgtcctgggtgtgtgcatatccatgtgtgtcttagtacatgtacccatgggtctgtgtgtcctggtctgtttgcacatcttggcccatgtctgcatatgggcatgggcttatacatgtctccaaagagcatgggcttatacatgccttgagagccatgtgtmttggcatctgtctgcaactcttgtgtgtagctcaatgtgtatgaccataagcgtgtgggtgaccatataaagtcatgggccagcatgtcctagcacatgtcacaggtcagagccatccatgtgtgtctcaccatgtctcaacacaggtccacatgcggtmttgggtccatgtcttagcacatgagtctgggtggaagtgtctgggtatcaacatgtctctaagtgccccaaatgtggctacacaccagtgtgtttgtgcctgtcgacctgtctgtggctcttcacctgtgcctatggctgtgggttatctgggcatgtgtcagcccatcctggcataaattggcccattcacctaactccctatgtgtctgtgaggctgcctgtgtgtgcatatagaactatgtttccaggcctggcgcaatggctcacgcctgtaatcccagcactttaggaggccgaggcgggcggatcacctgaggtcagtttgtgatcagcctgactaacatggagaaaccccatctctactaaaaatacaaaattagccaggcatggtggcgcatgcctgtaatcccagttactcgggaggttgaggcaggagaatcacttgaacccgagagtcgaaggttgcagtgagctgagattgtgccactgcactccaacctgggcaacaagagcgaaactccatctcaaaaaaaaaaaaactatgtttctggatgcatctgtatgtctgggccaggatgcatgtgtctacacgtgtgcctcatgtgttgctacagatcttggctgtgtaggtgtgctggcgtttcttggcaggtttcgccgcagctgccctggacacactcacgttttttccattcaggccaggtttsccatcctcgcctggctttccctgtgggaacagatcactggttggatgtcggggatcgggtgagsgtagtaagggggaaaagggggtaacatgaaagtctggtctcaccggtaatccagggggaccagaggggccagggaggccytgttctcyacggaggcstggaagcccctggaaaaagtctttgttaagatttatagggcctctgagatatcccttggggcacaccccwwggactaagaggaccccaaaaagatctccctccagggtagagacccccaggactgagaggtcccattgagatccctcaggcacagaccccatggatgggggcccctgctgagactcccaagggaagaacccccaggacttggagggcctatgaagacccccaaggcaaagaaggtcagaaagggggattctactaaaacctgtgtgccagggactgagaccctcccaaaggcaaggctgaaccgaccccccaccaactctctcggatgctgtgactatgatratctggttggagcttacgcagccccgagccccctctgtcccagcatctcccctcacttacgtctctccctgggtccccagctttgcctgcagcaccctgaggagagactcaaagtcagttcatcatggtcatggggtcaggggctctagtccctgtgagcctaaggcctgcatggcaagaacatgccccacccaggcagrgctctgggagaagacacagacaacaggtctcgccccagagctcgtcaaggccaagaccaaccaatgaggctggggtctagggtcctcatgtgaaggggtaggggaaggggacaaccaggcaggactaccaagactcacattcggcccagagggcycagcggctcctggtttcccatccagtccgctccggccatccagccyagggggaccccrgtcaccctgtggaaaatagagtggtaagaggccaccaaggctgaggtggatctgataacccaggctcaygtcctgagaaacccccacaccctctcaccttttctcctgctgggcctcggacacctgggtccccctggagggaacagggtcagataagaggtgagggtaagatggggacttggcagacggggcaaagtgcatcactcacctgtgggcctgggggtccccgaaacccttcaatgccctgaggataggggaggaagaaatcagagcaggccctcccatgcctgcacccccraggaccaatcacactcaccctttccccaggggctccagggaggccaggatcacccttgggccctcgaggaccctcttgtccgcggtccccaggctctccctgtggcagagataagcttgctgaggaacakccttgaagccaagccatgcccaaggtagaacctgctgggaggggcactggggtctttcttaccctccacccacagaccctrataccttctctctggctccaggtcctgtgtctacctgtggggggaatgaccagtgagaagaatggctcaacaaggggaagaggagttggcgaggggatacagggtctgtgaggggctccagggatccgcggaggtttcagagggacagtgggggaagtgggagttagtggaaggaatgaggggacatgatgtggagccaaaggggcaagtgagaacaatgacagaggaccagacccagcgcagcccttaccagccgtcccgggggtyctgggggaccctgggaaaggaaatgattatagtcaataggagccctcaggtcccaggccatggctctggtttgccccaggctcaactctgcccccaagttccccgaagcaccccaatgccagcccccarcaggcatgggtggccatccatgcttcccacctggacctccagaccccttgtgtgaaggcacactggcagcagcgccaggggaccctccatcccttctgagcccaggacaccagccctactcaccggctccccacggtcacccttgggtccagatgatccagggctgccctgcagaaaggcaggggtcagggccactcaaggtaggcagcagtttgggagagctttggaagcaccatgaggactcatgggaatgttggtagccttcagatgcgtgtgtgcaggggtcaaaggaagtgaagattgggagggtttagcattacagggttggggggtaggatcaggtattgggaattgsctggttggagggttaaggttggggtgaggagtcataggctgggactcacatttcgtccatcctctccaggatctccctggtctcccttttcacccacaggcccccgaactscaggtgccccctaagaagagcagctggcctgagacagaccctcccaatattttgcaggtgcccctatgacccgctacactgccccaggttccccattactccaaaatccacatcagaggttcccatcaccccatgcctccctgcagggactcccatcaccccttacccccctcagcctttcctatcaccttcatgcccacctcccatcacccctgttacttctctctgccaagactcacccgaaggccacgctcgcctgcttttccaggcaaacccgggtcaccctggtgatagagagaaaagtcatactgcacagggcagtcaggmtctaactcactcagggagaggggacagagaagggtctgagcagcagctggacaggaggcagggagtggatggatgaactggtggagcaccagcctactgggatcctagttcaagggtaaaggatcagaaaccacagtgggaaggagtctcaccggaggaccctcgtcacctttctctccaacttcaccctgtgaaacatgagagtcagccctggttccaagaacccccatgatgctggcaayagccctactcccttacccgccrtgactcccccgactccagcctcttacatctcrtcctcrggggccaacaggtcctggggggccaggccgcccagggtctcccttctctccaggaggccctgagtcaccctgtggaggaggcaagagggaggtgatgcaggacrctcgaagcaagcagttctcaaggggaggggaccccagaagccttgaggttgcccagggtaacgggtactcactgggggtcctgctctgccagtaaggccaatgggaccctgaaggggacagaaggggggcaggacttagtcagggtcccaccacctcatctccctctgtcacactccccattcccacattgattcacccggtctccagggtctcccttggggccagggtctccaggaagaaccaagccgggtgggccctgtggatggaaggataagaagtcaggaagacaaccttcaccaactgccccctaaacacttcgcttcacttacccgttccccttggactccggtagctcctctgggcccagcgggccccacatctccctggaggtgacaaagaccatcagtgctagtcccaggctccagttaaccccctgrcccagcaagtcctgtgaccccccaagtcccatagataggccctatgacctagacctcaaccctgtagaaacctccccttgccccataccaggcttaccttttctcctttgggtccagcaacagcaggtccctgaaaacaaacaggacagatacagcttggmsctgccttggggttgtatgaycaaagtcttcattggaatggaggtcacatggaattggaagtcatacagctcagtcccckcccagaagtcacagagtcaccgctgacagcagggaaggggttatacaaaatggactgacacaaagagctcatgacctgcatggcggtcttggggtcacaggatcatagccaagagtctgggggcaggttctagcagaaggagagccgcagagctcccrrcctgctcacgggcccagcactgtggaatcacagcccagatagtgttctataggagggtcactgctcaagggctgtgctgtgctcagagcgccatcctcccgtcactcaccaccactgcagggtccccagggcgaccaggctccccctgtggagagaggataggagcagggacaggtcagggagtcacctaggagcccaaaatcccagtgtcccatctgccacatccctagtaccagacagtgccacccccagccgaggacccaccttctctccttggcggccagtgggtcctggtggcccctgaatgtagagaaagtgtgagcccaggaggggaagggaaaggggagggacacacaaaagtcccactcctggtcccaccacagtcacagactcacttcaggacccttggctccaggacgtccagcaacccctggcagcccctggaggagaggaagggaagagctgtgcaggtgggtggggacgggggatatggacagacagggctagaggctggggtgggggctggagaggggtcagggaagattgggatttaggttggcaggggtaagacttggcaggagaacagagaccaggtcagtgaaaatcaaggtcagttcagcagggtcagaggttcaaagccaggtccctggggctgagggttagagcctgtatcagcagggataagtggtcattgaggaggggtgaggagcaggggtagcaggggtcaagggcaagaagtcagaaccagaaagggcacagccaggtcagctggtatgagcattgcagccagtgggtttacccgggatcccgctgggcctgggggtccacgttcgccctgatggaaaagaagaggtcagagctgagttgggcccagatcctccagggcccttggcaccccccaggttgcacttaccttctctccagcctcacccaggggccctggaaagccccggtcaccctgaagagagagggtgagagaaakacagagagagagagggttggtggsggggcttgaacgtcaaaccccagacaaggggtcccwaactccaaccaccccctccaaaaccrcgacctctgacctggagggaactcttatctccttatcttccagcctcccctaacaccatggggagcccagagtagcacccctcacacctgaatcccccaactggtactcactttggggccaatagctccaggaggtccccgtgggccctggaagggatgaatttgggggttcagagatttgggtttgggcatgaggatggagcagtggttgatgattgaggtaggggctggagctgtgcccaccatattcagaatccctggcccctccactcacctgctcacccggagacccaggttgtcctgggaggcctggagctccatcctcagagtcaccctgaaggagaaacacacgggtgggaagaccgaagggaggccctgcccccagcacgcagcctcccaccccagaactgggacatcatcaagtcagccttcctactttttctcctttctttccaggggggccaacggggccttggggtccagggcttccgggaagaccctaggaakaagtgagtaaaaatatgagccaagaactatgaagcccagcacccaaccactgccccaggagagacccacacccctgagcagggcccccagcagagcctcaaggcccctcaccggcagcccaggctccccaggagcaatgccaccttcacctggtccagggggaccctgggagagaacagcaggtcagggaatgaacaggggaatcagactccaagccacccctagcacaacctgtccctcacttacccgctccccacgatcgcctttgtcaccctagaaaacagatgacgaccccatgaccctgggccacrcctcactcccaaagataccagragtgatgagggtcatggggtccaattggatttcaaggaytttgggagaactgaggcgtcatggtgaggatgggggtaatcaaagggtcacaagggccagagtaactggcaggggttatgtgggttcaaatggggtcaccaggtctcygcatcacatggcactcatgaggctgtcaccttcatggctgttccaggaagccctggggggccacggggtcctgggtcccccagtggtccacgaggtccaggggggccctgatggaggagacaaagtataaggtgcaaccccacagacctcactctcgcccccctsgtgttggtccccccactacacatcacttgcctccacataccctgcacttaccgatggtccagggtcccctttccgcccaggaagcccaggtccttcacctccgatgacttgtccgggagccccctgtaaggacagagagcagtgggcaggattcaggctatgggggccttgagctggaagaagcccctagacatgtccagctattcctattcgcgccttaggccctgcacagggtctggtgtggggcagtcctgctcctccctgggacatcccggccgcctcccttcccccttcacctaccggctccccctttgggcctcraggtcctcgctctccctgaggacgaaacagrgsagagggtggtgcttgggctcaggcgaatgtcaacgtgggcactgcaccaccaccccaggctcccaccctgtggaagaaccctgggaagacacttagagagcaaagaagggaaggcaccttaccgggtccccacgagggccaggcaaccctggagagccctgcaaatggaggccagaggcagaacagtcggagccaccccacccactcaggcagcgcccaccctgacctgcaggacaargcttgctcacctttaggccaggggctccaggggtcccaggattcccggcgcggccagggctgcctggacgcccatctgctccagggaagccctgaggaggtgaagaggtcaggacaggaagggaccctcccccaaggcccctggtttgctggaggggcctcaccccatcaacaaggggtcgcctaccccactgacccccaagtgttattgggggtggaacagtgaggcagagaaatggcccctcagagcttcacagagcccaattccaggcacaagggcagcgacaaggcagagggcttccctgcctctgggacttggagctgctgctcaggctctgcagcggggctagaggccccactggcccttctatttcagagtgtcccccaaagtctctgtggtggtttataacctccagctgggcttctaggaattcccgatgattctaactctgcttcttccttctctcttgtaaaaaccccgagacagctttgaggagtgcctcagagaaacctcgatggtctccacactcaccctctcgcccttggcagtggcacttccagggggcccctgggggccgggagcaccggtcctgccctgaaagaagatagcagttaggtggggataagccagtcagggtgcagggacagatgtgggggacactcaccrggaggccagggtcgccaggaggcccaacttgtcctctcaggccctaggaagggtaatcagtgagacctgtgctgccaacctctcctgccccactgacactcaacccattctctattccccgcccgcaggggcactcaccatctctccaggttcccccttctggccctggggaaagacatgtcagatgtgggtcagagtggctagccccaggtgcagcctctgttcacctctcgatgagggactcttacctttggacaatacactgggcagggctctggccggggctgcggacatagggtctctttgaggttgaacatttctaccaagaacccccagaccccttatattctaccacccagtcccccagaggcctcttccaaacctgagtagtgaaggatgcctgacacagggctgtggccagaccactgactgcctggtccaggcttggcccatcatccacggcgaagaaggtctrgacagagtccatacccggcgccaagcgacgcagctgctctgggtccgctccagccattcccaacatcaccacattaagccctaaggtggggtccagtggctgcatgatagccttttcagggccacccctattcccagaccccttccccatcagcctactccttaccagaagcctgggcctcacggatggggctgaatatgtcacctctcaagggttcatccactagcagaaccatcacccctggtacgtgctggcggcgcccaggagcatctggtgccaacatgtatctgtgagctgtgaccacggctgtgcctggaaggaaggacatgtcagaaccctggggcaccaagctcccagtggatagccccaggagtccatgcctgctgcagtcctcacccaggttgttcccacttgggtccatgtagggcatgtcacggatcytttgcaagataatgccaaggtcatgggagccattcagtgggaacagtggggarggccgatgactgtaagacagcaggccaacctggggtggaaggaaacacagagcctgaggaggatgacagagcagggatgggggtgcacagagcctggagaaacacatcagggtgtgtgtgaccaaaccctatctattagggagtcagcagtgatggcaggatagggagccaggcagtaggtgaggtctggagcctgtgagagagctgggagaatgcctgaacctattgggtggtcaggagatggtaactggtatggagcctgggtggggggcctcagggagaggtagaatctggctgccccagggccaaacctgaactgcctgtggcccaagaggcccaagtgccaacaccagacgctccaggaccctcctcgtagcctccgcacggtgagcattgtcttgagtggcatgtggtaggaacaccacatccgccaggccacgggggcacactgtaggaaggggaacaagttactgaagcgggcagcccacccagacacacctttctgcccttcccactaygcccactatacctggcgtctgtgtgacagatgcctcaggaccccgcacaccatccaggacaggcgtcagggagaagatgtaagagacgccaggctctagccctgtcacccgctgggagcttgagatccctggaagtgtctgcggggacccaggcacttctgcaggagacagaacttgattaaaaagctgtctccacagagccccaactgccagcccacccaaatcctggcctccccctcaccctggccagggcctctgagtggccgccaggataggatgtagctggatgccctggacactggagtccaggccaaagtcaccgagtcgatcgaggtgtccaccacacgtagttcaatgcttggaacacgaggtgactctgaaggaggaatgaaagatcgaggatcagaggctgagtcctgagaacccagaagggagagatctgagatcctgggtccggtttgtcttattgaagcatcatgggaggtcatgctggggtcacccagggtcagagggtgaggggtaggggtacaggaggagtcactcagagtcggggtgcaggaagtcagggtgggtcatcagcaggggaggagcacgccaaggtgaggcaggcttaccagtgcgcgcagtcacctctgcagagggcccttctccagcyggccytaggacactcagcctcacgcggtactgtgtcgctggctccagcccgtccaggtgatagctgctgagctcgggccccaggacccgggactgttcctggccacctggggcaggcgtgagggtgggggccaagagcatgtgggatagtgacacctgggggcattaaagggcctgcccacttcactggctctgttaactgggttcaccctcctgactgatcttcctcatcctcactgaccctgcccactttacggaccctgccagactgaccctccatgaactcattgatcccacccacttcattgattgatcttacctactgtcacggatcccgcagacccccagtgacagaccccgcccaccatcactgtcctcgcctaccttgcggagtctgccacagccctgcccccamtggtccctaacttcctcctggggacacctctcaccctcaggttgccagtgcagaaggaagccctgckctctgggcaccggctcccagcgcagcctcagcgagtgctccccgcgctgcaccacgtgaagcgtccccagggctggcggagcctcaggcgctggagagaaagctcaggaatcagggaggctctgcccccatggcccctgcaccaatcccaggcccaccctggcacacgcaccccgcccagcctctcagacccctctccctcctctcagaccctgcccccaaaggctcactaccaatcctggtcctttctccaatccagagcacaagcccggatccccaaaccatccacaccacccatccraagctctccagcgcatgctctgcctacgcgtagtgacaacaatggagacaggtgtgccctcgcggtccccgacaagtgcagtcactcgcactgagtagctgactccaccttcgagaccccggatctctgcagagtctgtgtttcctgggagtatctggtgcctcatggggccgcctggccaggtgggcatacagcaatggttaggggtgagcagtcccagccaggaaggacaggggtggcgtcagggagccataccttcactccggccccaggccagtctgtaagctgtggctccagtgacccctacyyaggtgatccgtagaacgtcgctggaagcattgaggatctgcagcctcgacacacgacccacaggctcaggggctggggacagaggcaaggtaaggggtcctggtagagaacagagaggcagtgcaggaatggttgacgcaggggtgatctgaaagtcagtgtgaggttagtgtggacaggtcactttaggcagccctgaggaggaggaggtcagtgccttggggtgggcagtgtggggccaccaggaggtcaccgtgggtggacacttaatcagtgtggggtgggtcagtgtggacaggacagtcactgagcaggggggtggaggcagctgggcaatcaggaacacacagcagggcagggtagctaatgcggtgtggctagtagctggccagggtccactcaccagtcctcacaaccacagaggcagggggcccatccacgccagccacatgggccctcacatgcaccgtatactcagtatctggctccagtccatccagctcagccaccgtggcctccccagaaaccaactgggatttctctgggcctgggaacagggatggaggcagctccagggctagcaaactctgtgccccagagccccacctgracccccaataaacccccagcccccattccaccctgacctgccccctcccaaaccccagtccccaccgtgggctgagtgccaggaaaccctgtatcctgtggcgccaggaaccctggtccaggtaatggtgacagatgagctgctggcctgagtcacatggaccgtcctcactgggcccagtgggtctagtggggagaggcaatggggagtctgctggaacaggcaggaaggagtggggctatctgataggggaagatgatgggagtctaacaggagacgggaatttgatagaggagatggtgaataggtccagtggaggagtggggaggtggaggttttaggaagcagtgagcaggtctgatggaggagaaagtgtaaatctcagaggagatttgggtccagcaaaaaagggatgggggtctgagggttgaagtggtggatatttgagggcaaaggctgtgggagtcttaggagagaagcggaggaatctgaatacggggagggcttaaggggagacagctgaaactgaagaggaagcagcgtctctgagggaggagggagtgggattctgaagggggaggcaggagttctggggagaagcaagggtctgcaagggaaggcatgggggtctgaaagagcaatggaggcagagagccaagggacgggggcagggcctgacccgttcragccacgatgactgcagcagggccctcctctctgcctcrcagtaccgacacagccacctggtaggtggttccaggctgcagccctgtgatgtctgtggcagtagagtctgggggcagtgtctggctggactccggacctgaggtcagagggaaatgctggcatggctcctgcctgtcccctctggcacccataccctcattggtccctttggcagtccccccacacaccccacactgaccactgcctgtgctccagctaatccgaaatccactggctccagggacgggtccccaggccaccctcactcgcgttgcatctgacaccacaacccgcagccctggaacagcaagtggagtttccrgctctaggagttacagacagaagtcagaagtcagaaccaggaccagagtgaggcaggcagctgtcctccacaagcctcctgcagtactcaccccggcggacagtgaggacactggcactgccctcacggggacccactcragcagacacccgcacagtgtagctaagcccagcctgaacgtcatccaagtcgaatgctgtctgactcccaggaagcaccagggtccgctcmacccctaagagagaagtcagggtaggtgggcaggggtcagaaagagacagggatgtgggacgatggcagtgatggacagggacgcagagtgagaagggccwkgggggkkgggatgtggggtggtggggaccagagagctgggatatggctgaaaaaagtsagtgcaagacaaggacataggatgaaaggggccagtgatggtcagggacactggaggacaggagtctgtgggatcttagcatgtaggatgacaggagtcagtggactgcagtgagaactgatgagccattgacagacactgatgtgggatggcagaggtcagtgctggatggggacatgcaatgagaggttggtgtacagtggtcaccactagggtaacagaaagacaggtgattgagcttgtggctgtgcagaggtgaaagccgtggatggggtgtggggcagggaggagattggttggggtagggtaggggcagacacaccctgttgacagttcagggctcagtgccatcttgggaagcagatggataacgagacagggaggagactatagggacccaggtgtggaaggagagsgctggaggtacactcagacccctcaggctggaacttcagtgtgtgtggtgggggtgctggctgcgtccacctcaccctgggtgctgcgcacaatgatgcggtactgggtggcaccagggactgggctccaggacactcrcacccgctgcccgggcagctcggtggcttgcaggtctgttacagggctcacaggcagctctggtcctgttggagagcacagcatagaggcagcctggggctccgacacctcccccactcactggcccagcccacagagccctcaccagtgggaaccacggttgcaggggtggccacctcgtggccctccagcagagtgtagagtgtgaggcggtactcagtgcccggctgcagcccatccaactggtagcgggtcacatcagagggcagtaccaccttctgcggtggctccaagcctgcaagataacagggtcagaccarcagaggccatgccctgacccttgcctgtccatyccttcccccgcactgaccagtctcacgccgccattccaaccggtagccacgggcctcaggcaccaagttccaggaaaggaggatggatgtggggcccaggatgaccgggcgcagggtctgctcaacagaagcgtctgcccagggcacatgggatgtcagtggcctccgggccttgccctgcctgcccgtcccagcctgaagaaagtgcccagccttctcaccagtgcgagccatcagggaagtggcgggccccacactgcggccaaatagggtgctcacggtcacctcatagtccgtgccaggctccaagtcacgcagcaacactgaaccctgcccagggcccagctcctgctgctgtgtgggcccacctgcatgggggacaccaaggggccagtgggccttgcagactcaggactctacagccttgtctgaggcgcggggactcccctcagcccacatctctcactcaccactgaggacccgccatgtcacacggtagccagtggcacctggcacactccgccaggccaccaggaggctgtgggctgtggtattctggatggtcagttccggcccttctagggcagctgggggagagtcccaccagggattcatggagtcagaagtgggagggggtactggggtcgggggttaggtgaatggggtcagaggctggcagaattgctcactggtccgagctgtcccgctcacagcctccccgatgctgttggcktagagggcaatcacagtcacttggtactcggtcagtggccggagaccccgcagccgcacactggtctcaccagctgggacgttcacctgcccagggcaagaggtcactttatcttgcccagccaagtccccagccaccacctatcactcctgacatcctacctcctrccgctcactcggcagtggctgtcccagccccgtcagaggagtgtactggaccttgtagccagtcacagggccactggccgctgtccactrtactctcaaggattggctgcttggctcagacagcaccaggtctcgtggagcagaggtcgagtcatccgctgggaatgcgggatcaggggatcaggcaggaggattggggtgggcatgtatgatgcagrgttggggtcggggtcaggagcacataggatggaatcagcactgccaagkggggattggggtccggggtctaggtcagggtacaccgtgtgggcaggaactcacgaggtcrggtcacaggcacgccaccagcagtcgtgcacactctccgggaaacgaggggcagtagtgtcctcaagatgctgaagtcattgacgaagaagaagaagtcactggtgggctrtgaggcaactcgcttcagctcctcagggtcagcattcttgatccctgaagtgacgacccatcaggactcagtcacccacatgctctctgactgcccccaccccccagctgacctgtcactcctgctcggtccttacccacagcaaatagcttgaccccctgccccttcagcctttgggcagctgtgtccaccaggtcctgggacttcccgtctgtgatcaggatgcagacctgggacaggtgcaggggtcaaatcacggttcccctggacacttcatttggggtcatcttgggaggcatggtaggggtagggatcaccttggggacaccaggtcgggccagctggggcaggaagacatggtcagccacatggagaattgcagcccctgtgcgagtgttgccccccttgtagctaagctcacggatggcgcggatcacatcacccccagagccaagtgcatccaggccgaactctgtcctgttggagggtaggggtggcaacaggctaggactcaggatctcttctggccctggccttgaggaggcctctagggtgagggttacgggtatcaggctctcttgaggggtcccttcgttctgtcattctccacacccacttgcctctggaacccccaggttaacaaactccccaggggctcctttgtgcaccatctgcaggtgggcctgggcagacctgaaggagcccttaggggctcacagtctgtggggaacaagatgctgcttaattaaataattgcaggaggaggggtccagatgtaggaaagtggatgctggccagatggagcacctctggtgaacggctgcaagggttagagggctagaacgtggagaatccaacaggcgtgggggccccctcctgggctccccatctccagatcagaaaacacagcctcactgtcttgcaccttcctgtcttgcagtagcctggaggtgcctcagggcacgaaggttctacctagggaatccttacctctgtctccaaaggaggtcctggctagggggtctctaggttccccaaaacttgtttctgcaaagacctggcctggggtttccagggtctcctccctctctggggaaggagtcttggtggggatctcgtggtccccagcccccagggcccctactcaccgtgggtcatcgctgtactgcactgtggcaaagcgcacaccctgtgcactggctgctccagagaaaggcagcaccagcccttcgagaaagctgcggacctcgcggaaattgctgcggccaatggatgaggagccatccagtaagaacacaatgtcagcggcgtaaaggcgcgtgcaggtcactggggcgggcaggagagatcagggcctcttctgggaggccaaccacccgcctacccgcacggtggcctcactgggacttgggatggtggggagagtaggcctcatcttatgcaaaccagggccgaatcggcctgagcctgagggccttggagggagttgagctcggtgggtcccagagcagactcccgcggagggttgggggtgtgcgggggagggagagtcgccagcacgggtgtggacttgggactgaggtcagcctctaggggccggcgtggattggcataaggcaggggaccccgcacgcatccagggagccagaatttgggtaggaacaggataggaggcggtttagggaacccagcaccgatcgcggagggttcggggagtcccagaattaggaggaatccgcggggcgtcgtggagttggctgggttgtgggcggggggtgttggggatgaaggccgagtggagcggagggtggcacggtgcagtgccccgggccgggtcctcccttgcggtgcccacctctctccctgtgctgggctcgcactcggggsgcctctgccaggatcccggcgcagagcgcggccaccagaagccgcagcgtcatcctaggcagtaaaagccgtcagctaggacccccgcctctgtcccttgcwcccccgtggccttggcaggtccgagcccagcgcccctccagcccgagtcctggtcttgcctgcgcgtccgcccgctcccgccgccgccgctgcagtctctcgggcagagcagagaaaagtccctgatctcggggggcggagcggcaggcgggaacccaggcacccgccctcacccatatccctgagaggtcgccgccccccccacccctcccccagacaaacgatatgacgcacttaactataaaccccccgaccccccgtggcttctgggaatttcccagaaggttctgcatgggcagatgctgagggagtacccctaactccatctaaggtcacaggtcttggctgctttaggtcaatcacagtgaccaggctgaggagtggacaggttcctgcagagccacaaggcagcagcgccgtggggggtggggctgcagttggggatgactcacccccaatccagtgggggtgcccagacaagccctcaggccatgggtcccgccggccactcctgtgattcagccatctgtctggtgggcctcctgggccccacccggatctccttgacaggcaagaagccctggcaaatgagtgactctgggccggtcttagggaaaccaaggtccccttggcctggatccaagtaactcaccccctctttgtaggggataagccggaaggaggagagaacctgtgtcatgcttatgcatacatcccagtgtcccacatcccctaccatgtcacaggcagatgcaatccagctgtgcctgcagggagggggccgcccatctgtggagggcgggaccacccacagtgacagctcatctctcaggaatcgagccctccatgccccaggccaggtccccctacctacatgtcctcacccacaggcatcctctccttccatctacttttcttgtaggtccctgccacccatctcccctaccaggccgaggtccccttgggccccttcctcctttcctcactgccctcatggtacctgtagcttccagcttcataactgccccctaccttactcctgtccccttacccaggctgacttcacaccctcccccagcttcgcttctgaggctgtggacagtcctccaacacacaccacgccagggccactgtccgaaggaggtggggctctgtatatgcatatctctccattagatgggtgacactaaggcagagaggcactgctaagaagggcaggcccccatctgggtcctgctccccctttttttcctgctaatcctgaataactctgggcagcccagaaagcacatctatactcaccaaggctgctgggccccttctaatatgcccggccccacagcctcccctgggatccacagggagatatggggacagcactggctggactcctccacagcccgaggactctggtgtggccagagctggaggcagtgaagaccatccatgctgcctgctttcctattgcccaaggaaggctggggctctatcccttattactgaccccccaaactatcctggggcatagtgctatgaccttattccaaggtcagggtctcctcagccatgtcccaggaccccccatccctgcaaggtgtgctccaggtggggggctgcagagaaccaggtatgttatcacacaggcagccccttccccctaagactgtcacctcctcccgtgcagccagggcgggcaagagcaggccagtggcatggacagtacggtacagacatatgtgcacacgtgggccagtcttaggggagacaggaggcccagctgggagggtgggtgctcaggcaaacctcatcagaattgaggtgcctccaaaagaaaggacaggctgctgtgagagggtctctcaaagggtgctgggagaggctgttgagaaggtaggagtaaggttggaatgactccacgtctggagcttctatgagactcacgagcaggagtgtggccctctgaagccccagctctggcctcctgggaggaacacagcctagggcacagcccgaggccagtgcctacctgcaaccccatcagggcggtggagcccccagagcacatccttctccctcccaagctttccctgaacatttccttccctggcctcagtcactacctcaccccatctgtttccaaccagggcctctttatcaggtcccagccccacacatcccactgtaccctggacaccaccaaactcctcactggactatggaagattaccctcctccaacccactcgtgcctccgcgtctcccagccctgctgggaatgtagtcctctttgtgtcccctacagctggctccagttcgtgtggccatgacctctgttctgccacagcacagctcaccaagactgatacagaaatatggcctgagagtccccatgctgaatctcaactctgaccaagtcacttctcttcacagtaacctccaacacacctccccagcatggctccagggtaaagaccagagtccctggcttggtacgcaaggtcccttagaaccagaccactcccagcaactcaagctctcgtgtccagcacacctgtagcctctaagggccaggctgggcttagaaatgaagccccatcctccaggagctcaaacttgacaacagacttggcacttgttcccctgcctgggtgttgcacctccatgagcacccagggttgggcctgtcagggttctgcgctgcccagcatcttctctccagccgttcacaaagtagaatgatctgcgcaatgccccagtcccgggccgtagaaggtgcttaacaaatgtctccgaattggcaacgtatggcaaccaatggtgagggaaaggcagtggggcagggtgatagtgatacaagggttccttgggctacttccaagctacgatgctggggggacttctgaacagccatcttctaaaagaccttgtcccagcaccctgcttgtgactgccaggcagcgacttcctcaaaggaaaattgggcccctcgctttcaacttccccctgggatcccagagaacctgactgtggaagcactggggggtgcaggaggagcagcctacctgcgcacccaccatggggaccagagccaaaagagataacagagggactaggtagctaagagctgtaccaggtcctggctgcctcaggaaaatggggaggggattgtcaggccagcagctctggacttgcctgggacaaatgtagtagagggagggggctcgggccccactgagctcagggctattcttggagcctgagtcagcggaggcaaaggattcctgccctgcttgtccaggcagcagttagaaaccaaatgagaacactatgccccaggctatcctcctcccagaatgcagagtaaacacacacaagaggcatccttggagacaccccttggccccttctggtccaccagggaccaccagggggtgacttggcacaaggtccacagtgaggggtttcccacctgagcctgcagggattccaggctgggactcctacaggggcaaaggctgggtttacacttcctatggactcccacagcccaatcttgggaccagctggctgaggaactcccctaagtggctgagtggaaacatctgggctcagctccctgtaggcatcaaagacttccggcctcagctgcaacccccacgcttgcccctggctgaggacacatcagcctgtgggaaggcaggaggatccaggagccacagaactagagggaagtccttgctccccatctactgccccatggactccatgccaatgccaaaagagggatgacacacttctcagcagaggattttattggtggtcacctgtggcacaggttagaggagccgaagtgctgtgtttgtggtgggggggggaccacaaaccccggccctgccctcttgcttacataggcttcccgcctagaagcgcagccagaacatgccgctacggatccggttgtagtctgggagctgctcaatggggcctgtggggatagggtggagcgtcagggtggggtacctggcctgcacagggacacctggccctgtgccgcacccagctcggagatgctgcccagagcagcacaagacaggctttgagtggaaagagaggagagaacattcccccaggggtgctgagcctgtcccttcatgttctggcccttgaagccccaccccacatggaggtgcccgttacctgacgggtgcagggtattgatgaaggcaccttggcaggcagtcaaggaactgctgggacaggttttctgagcaagaactccctggcagccaggggactggggagagctgcttggggccttaactggctgctctgtaagctgagcagcagtgcgggagcagaggtggaaggggaggccaagagaacggcctgaggaaataaacaaagagcagaccccctaggccacttaccatatccagccactgctgggcactggtcatagatgtacttggagcagatctcacgtaccacactggcatccacctcctgcagggtgaggcagagggcatactggctaacgggcacctggccaccacctcagccagtcagcatcatccaactagcagagatctcccacaggcagcatgcagctgtccccagcccaaaagaggaaaggcagaagggatccctgctatagacctccatgggccccgcccatctccacagccatcagcacctatgccctgccctcccactatgctacccctgcaggtgacagctgcctaggacaccagggatgcctataggagcaggctgcgctatgccaggccccaaccctacacctcccaggtgtctgccaggccaagactccagaacctctcccaggggtccatgttaccgcaatccggctttcccattcagccagggggatgcggcggccataggtcaggaggctgcgtccgatgtcctcacacacaggagtagtgcctttaagggtgagagaaggctcagaggtccacccagcccaatcctggacccacaggtacacaaacaatctccagcctcaggttgacaaggacctccctgacctcatgctgactcagatcacagccctctcttctatggtcacctattatggcagtgatgggctgtggacctgtctcacacctgcctgcatctccaagggtggggtgatggggcatggcgtggtcttcaaagttttcctttctaaccttggttagttaggagcagtggccaccttggtgctgtcgctggcaagatgtactctacccctccccgctgagctgtaggactcaccatctagatgagataccagggcatttctgaggatgtttttgccccgggccacctcactctccgtggcactggtacacaggcgcatcctaaagtgggggggtgggtggtattcattctgagccagtgtgtcatctctcagcctcccactgtgctggttaaagccgccatcccacctaggaataccaggctgccacttaccactgcccttgcaggacgaacatcatgtcatcgattttcattcggtcacagacaaagtgtgcacccagcaagcccgtctctgcatagcagatgctgaaggtctggaaactctggcatagcttgttggccacagcacctgaagccagtgggctggacaggtgctgccagggggataggtggtcagcacccaccctcttgtcttcaacgcacactgtgacccccacgcacaggagcacacagccccagcaccctctcttccctgaaggcgaggtcccatgctcgcgctggcactcaccacgccaccaccataagtgcagtcatagtggccgatgatggcattggccacttgcaaggccacattgtccgggctggcccagccaggaccctctactgcaatggccacgtgggcaaaaggtagagcatcatcacggtggcggatctgaaacagtacatgacaaggctgaggaacagccagactgccaggggaacagaaaaggtggcaggtgtgggtagagggtgtatgtgtgtgaacatgtgtgcctgtgatgcagcagccacagaaccccttcccaactgctgaggtatctct

SEQ ID NO: 98206 - DNA, 27733 bp, Homo sapiens
ttattcttatgctctaagaccatgtcagtccaacaagagaatccaggtggctgaaacacaatcaggtttgagcccctagacccccttacagttggactgccatctaggaggtgtgcccaccaggctggcctgggattgctgccaggggaaagcaagcaagcaacacgcccaggaagagtctgatcagaatcccaaattttaaaaatatttctttataaccttcctacacctcttcattcagacacaccttgctaggaagtagcctttttaaagacagctgcatttggtgaccaaaatgttttaatagggccaggcgcattggctcatacctgaaatcccagcactttgggaggctgagatgggaggactgcttgaggccaggagttcgagaccaacttggtcaacatggcaagaccccatctctacttagaaaaagaaaaagtggggtgcagtagctcacatctttaatcccagcactttgggaggctgaggcgggtggatctcttgaggtctggagttcaagactagcatggccaacatggggaaaccctgtctctactaaaaatacaaaaattagctggacatggtggcgtgtgcctgtaatccaagctacttgggaggctgaggcaggagaatggcttgaactcgagaggcagagccaagatcgcaccactgcactccagcctgggcgacagagcgagactctgtcttgaaaaacaaaaacaaaacaaaatgctttatgaaagtgtgtggaccaggaaggagggagaaaagtagagtcagagaccttgagttgattttttttttttttttttttttgagacggactcttgctctgtcacccaggctggagtgcagtggcgtgatctcgggtcactgcaacctccgcctcccatgttcaagcgattctcctgcctcagccttcagagtagctgggattacaggcacccgccaccatgcccagctaatgtttgtatttttagtagagatggggtttctccacgttgctcaggctggtctcgaactcccaacctcaggtgatctgcctgcctcggcctcccaaagtgctgagattacaggcatgagccaccgcacccggcccagtttttgaggaagccattccaatactcaacaatgccagaatctcatgatggcaggagtgtggaagatcttttgaataccactattgttgagtggcttttatgataaaaggtgcaccattgtcacactgcagatggtccagagagccaaaacatgacacagattagtttcaggggttgcagtggtatgcccagagctggttgataggactgcaacaatccaataacctgaaaaagtgtcaacagtggtaaggcaccaccaatagccccaagaggtcaaaggtctaatggagttgatctgccatgagtaggctgaggccacgccctgtgcaagatgacctcctcctatgcaagagaaatgggccaacctttggtaggaatcacagcctggtatgtggtggtagcgtctgcatcagaaatagtcctttccagctgggtgcggtggctcatgcctgtaatcccagcattttggaaagccaaggtgggtggatcacttgaggtcaggagttcgagaccagcctggccaacatggtgaaacgctgtctctactaaaaatacaaaaattaactaggcatggttgtgcgtgcctgtaatcccagctacttgggaggctgaggcaggagaatcatttgaacctgggaggcggaggttgtggtgagccgagatggtgccactgcactccagcctgggcgacagagtgaaactccatctcaaaaaaacaagcaaaacccccccacacacatacacaaatagtattttccattgtgcccagtccatggtggtggatgtgttgccatgtccggcataatgatggatcccagtagcaatatggctagtgcaggctccctcaacagccttatttccgttggtctaatcagagaacaggcttcaaccatggacatctacatgtgtgacccagacagagcaatcacagccaaaacttatttccatagttcatgaccccaaagatgggtgtctttaatctgccagttgaggttttctaagtgtcagaccgaacacctaggccattggcaacaccccaagagtcagtaaaaatataacaagggttaccaagaggagtattggctcagggcctactgagcagagttactcatcaattttctgttctgcgcagctgtttctgagggtgaacagccacagcagccctgtggacaccatgaggcttccacttcatcagaccatcagtgaaccaggccctggcatttaggagaacctctgtgaacttaggttcctgttgacccagtgactttgctttggtggagtgggggatataagtgtcccccaaagggttagctgccagttttttcatgtaaaactgagatgtcagcagggctagactagctgtgttcttaaatataccatttccatcttaagtacacgtacattccataaaagccatccttttgtgggtcaggtattctgttgtaagaagccagatagtaagcttttcaaaagagaagtacctggccactgtgtcagggagacaggcagtaagtccaaaacaggggcacctctgggtacagtctgcttccctttgccaaatgttccaattagcaaaattagtcacagagacttatatagctcaaagggatcattgggttgtgaggacccacaggtagagtgggcttgctggacagcttccaatacagctttctggcctgggccctgctctaaagggtgctggttggcaagttagcagatgtaaaggaccaagtaggatgcccaaagtgaggcatatgctgtctgcaatacccaaggagtctgagaaggtgcagggccttctttttttggtggtggtggaaggactaccagcagcttttccttgactcctggaaggattaaacattgcgaattggccgagtgcagtggctcacacatgtaatcccagcactttgggaggccaaggctggcggatcgcttgaggccaggagttcaagacctgcctggccaacatggtaaaactccgtctctactcaaaatacaaaagttagctgggtatggtggcgtgtgcctgtaatcccaactacttgggaggctgaggcagaagaatcacttgaacctgggaggcagaggttgcagtgagctgagattgcaccactgcactccagcctaggcgacagagtgagactgcatctcaaaaacaaaaaaacaaaaacttgtgaatcagcagttgtattccaagaaatggaattttgtcagggattgtcagtccctgctgctggtggagatgtggtaacactatgatcaggatctccaacactgggactgttgacttgccatccaagaggacatcatctgtatggtgaaagttttggacatcagagggcagagggactgagttaaaccctgactcacccatggcgggtaaatggcaggggagcttatcccactggcattgactgagagaaccccctttggcacttcagggctggaaggagaagcaccagttcctaacacaaattcaggtatagatgcaacaaaaccaagacttcgaattgtcccaaagggccctacagcacttggctttttctctctgcactatgaaacttgtccaaaccctgtcagttgaatttggacactccctttcccccatgagaccaggtaggatggtggcttatgcacccatatccaagagacaagtttcaaggcacttttgtccccagtgtaccttagcatactcgggtgctcacggcctttggtcccccttgaggacagggagacctcatccctgtccctcatcatttctccttaaagcagctgaggttgaggtagagaataagtgagggaccagggattgtgggcaagagccttgcaggcaagagactggttctgtgccattaaatgagggcacttcttacttctaggttcaaagagtgtggcagcaatttgtggctcaaacaaatgagtttccaatattttcagcccacccacagccctgtatcaagtggcaaggccaccattactgactctgtttatttcagctttggggatcccttgactccatagccacattgctttctggttgaggccccagggattttgttcttcgctgactcagactagacgtaaagccagagtgccagaattttcttgcactgattctccatccagggggattggaggccaggggacacctgcacttgcagaaacctgtcatgaggggaatcctaagtttaaataacatgaagccttttttttaaaaaagtgtttttcgtttttttttgtttgtttgtttgttttaagtgaaaaggtctcactctgttacctaggctggagtgcagtcgtttaatcatggctcactgcagcctcgacctcccgggctcaagcatcttcacacctcagcttcccgagtagctgggaccacaggtgtgcaccaccatgcctggctaattttttgtatttttggtggagatgagctttcaccatgttgcccagactaggctcaaacttctgagctcaagtgatctgcctaccaaggttgggattaccttccaaggttgggattacaggtgttagtcaccatgcctggccattttttgtttgtttgagacagggtcttgtcctgttgcccaggctggagtacagtggcacaatcacagctcactgcagccttgacctcctgggctcaggaggtcctgtcacctcagcttcctgaacagctgggaccacaggcacgtgccaccatgcccggctaattttttgtagaggcaagattttgccatgctgcccaggctagtctcaaactcctgggctcaaatgatccacctacctcagcctctcaaagtgctaggattacaggcatgagccactgtgcccggccccacacaagtcttgaacttctagcctcaagtgatcctccagcctttgcttcccaaagtgctaggattaccggcatgaaccactacacctggtcacttgaagcttttctaatgggcagtacatcttgctccttccaccattccttgtaggagagagtgtctcctgaatcctgggtgacatcaaaggattcaagttctgcctcccctttatcattattattaattttttgagacagagttttgctcttgttgcccaggctggagtgcaatgatgtgatctcagctcaccacaacctccacctcccgggttcaagcaattctcctgcctcagcctcctgagtagctgggattacaggcatgtgccaccatgcccagctaattttgtatttttagtagagatagggtttctccatgttggtcaggctggtcacgaactcccaacctcaggtgatctgcccgccttggcctcccaaagtgctgggattacaggcatgagccaccgtgcccggccttctgcctcccctttaatgattacttttagttctgaaaagtacaggaaagctgctgaaacaggtattgttttagcctactatccgttcactcacatttactgaacatctactaggtgtcagatactggggctatagcagtggagacagacaagatgatgtgtttgagggaggatgggaaggaacagaagtgcttctttaaaagtgatgacattggccaggcacagtggctcatgcctgtaatcccagcactttgggagactgaggcaggcagatcacttgaggctgggagttcgagagcagcctggccaacatcatggtaaaacctgtgtctactaagaatacaaaaattagccgggcgtggtcgtgtgtgcctgtaatcccagctactcaggagactgaggcaggagaattgcttcaacccaggaggtggaggttggagtgagccgagatcgcactactgcactcttggtctgtctacctcaaccccaactctgcatgctctgagcagccagctccacccagcactcaccatcccacccactttcgtctctcctgcttcaacatctccctcattctgttgtgtctcctgtagttgcatttgttgcagttcacttgagctgagccccgaggcccttctacctctagtactgcctgtccaggacaggcacaagcatccaggcctgaacgggatggatatggccctagaaaacagaaaacaggattccagtcccagctaaactgggtatggcaagacaaggacctgggttcccatgtgctcatgctgagaacttgagaagggacaggaattctgcagatcaacacagcttcataaaggccagccaggggctaccaccattttgcagtgagaataatgtttattgagaatggctcattacaaacaaaatatatataaaatctctgcaatgcaaaagatccctttcatccccgtggctagaatgaacaaagcccaactgtcccacatggcttcaggtgctgtgctggtccccagcatgtgaacaggctgggcagctgtcggtgtcatgtgctgtgggcaaaagtccctgatgtccaggctctctggctccattttcatgacttgtgcaagaatgcarcacagtgtgtcttacatcctgcctctgtgaccctccctaggcagatgagtcttgagaatgggcagctttctcattcatctttcaggaaggtgacctttaacttgtggcatgccctgagaagccatcctctgggaccagagactgagtgtttctaaacattttggctggactgaggtgctgttaccaccctccatgaaggccactccctagtgacagccctaacagcatgtgcactgtctaaatcacatcccaccatcctgaaaacttcatttcctcccactggtttccttcatacagctattctaacrattttaccagaacaccacctgaagatgcccacaccccacagctgctgtgcatgggtactcctgggccacctggcattaaggcaatggagatgagaccagtctagagccaacaccggtctctgaaacccagaagggctgcccaactaacagcacctccctcttggccaaaggctttgtctagggttgagaagcaatttggctgggtggtctcactgccctcctaaacagagcccacctctgcccccagagtcatctgtgctccaaagcaatgggcgggggcacagctgccaccatgccatgccttgggcattggaagagcaggacccaggagtgcagggatggtatcactgttgcccctttgaaaatgacccatttcccactttgggaggccgaggcaggtggatcacctgagctcaggggttcgagaccagcctggccaacatggcgaagcctggtctctactaaaaatacaaaaaaattagccgggcatggtggcatgtgcctgtagtcccagctrgtggggggctgaggcaggaggatcgcttgaacccaggaggcggaggttgtagtaagccaagatcgtgccactgcactccagtctgggcaacagagtgagtctccgtctcwaaaaaaaaaaaaaaaaatccatttcctttagttttttaggtgcagactggggttcaagacccagctccaccactgtcctgarcagactcccaagactgggccagctgcctcgtcagctgcctcgtctgagaggtgaaggggcaggtacttaaaccactggccaagtccctttctctgaaaaagaacttgagctggctaactgccctgtgcagaggtgttagtggttccaaagtaccttcactcttgctattactgttttacttgaaggtgattacccctcaaaaatgaaaacttaaatctcaaagaaacaacccctgaccccaacctccccaaaaaagaggaaggaaagagctctatgctacttgctgtgttgtaagatcctgggcaggaacccctcttctccatcaagatagacaagacccagtatcctgtgcaatctggtgtgaagaccaggttgggtgggcagctgcaggctgccccagcccgttgctttggagcacaggccttagcagccaaccttaaaggactaggggctccccacactcaagagggcagaccctgctgtcaggattttggctggtgtcaggaggcctcctgggtgcagggatccctctggggctagggcagctgtttattcccagagcactgctgccagccacgaggcctaccagtgggatctaggcccgagagccctccatctgacagagctggaggacctggagggctgtgggggstttaagagtctccagcggccagggctctgcatggcagggcagctgtgaggtgtgtctatgctgggtggcaggggtcagatgccctgtaatgagccacagaaacttgggcccatgggtaggcaggwggtggtggtatcatcaaccactgggcacaggggcatatgcagcacttccaggagagaggggcctggaggggtcctcagccctgggggattggggtcagctatgctgtctccagacactcacatactgtcctgacaagtggcatccgtcaagcaacttctctctccaggctcagtcctgcggtctgtggggagaccattgccatggatctggctcaaaggcaacaagggcactgtcgggactggacttcctgtgggcgcagctggagtcaaggcttggggtcttggggtatgcttccagcagccagcaggtgcttggggtgagtgacatgacaacacacggcactggcagacaaagcagctgtgccagtctccgagttcctgggactctgccagatgggctgaggctgcagttccacattccaaccccagcagccccaagcctgggccagggcrtcctgagcgggcccggctggggtggggatggggtccgagggcctaggcgcaccaggctcctgctgtcagctgtccaagtagacaaagaggatgtcctcatctgtgccatagctggttctggcctcctcaaagttactgatgctggtgctgcacattcctgctgggggtggggaaggcagaacggggtcagtgggttgtgagagagcacctacaccaccgacacagtgcccaggggagctgagtgaggtctgtttcccatccacatggccattcctctcaactcaagtcctccacccccaggaagccctccttgcccatcctggtcttcatgaggtttctctgactcctccccagtaaagcagttggagaaaggcccagagmggggcagaaacgtgctccaggccacatagacggggtaagtctatgtggtcagggcgtccaggggctgtctatgtgaatccagtctatgagagtcagggcagcccttccctgtgcccggagggcagtaggcaggccaggatgggtctagagcaggggctgggtctggccgggcttttctttctgaggaatgtgccggccatcctggtggttgggggaggggtgcagcctgggcagcatgaaagggtaaggcagggacctgggcagtggcgtggggcctgtggtgtgagagggaggggtggccarsgtgtagaggaggctggcacagtttgcggcaggtttgcctgcatggcctgaggggtggccacagtgacaagagcccaggaggagcaggggctttggggaaaaggtagggagggaggccctggccacactagattgaatgggtgggaactgtgggcactgggcatacagaacagtgaatgtggaccactctgcctcacccaccccacccagcactcacggtcggcataggctgggttgttgtagaagatgcagccagtggcccggttgtagccacgcagcacgatgaagtggccctggtagtcaggagtgcggcagaagcagtggtggccactgggggtgaagcagcagtacttgacagggctggagcacaggtcacagtgcagcacccccgagttcmccagcacgatggccacatggccctgagccaggtgcgcctggatgtccttcacactcactgtgctgtgggcgggaggggggtcagctggtgctgctgggcccccattccccatccctcaaatggatccctgcttgtgcctgtttctctgttacaaagcttggggatcggctccttttccctttgccctgaactccctgctctgtcackgtggcccaggctcagcctagagccaagcaggagaccggtggggggkgtgtgtgtgtgtgtctgaatgtgcacaaagatgagctggctctgtcaggcccttcacggggagagcattcagctccaggtgggtccagtcaagggccactagagcagcacacagaaaccatcctcctactgcaccccagcctggttagtgaattctttttgcccagccctgtctctcctctaccctaaatcatgtgtggtttacattgaaaactgccagccaagcatggctcagacactttcaaaaccaaatgcttctctgaaagagctattttactttttttctaaggctcctggtggcagaaggggctgcccaggaagggctgggccacattgcttccaggggagctccagttcagcaatgacatctacctggagcctccctcactggcagaaggcactgccccatcctgtgccttccactaggcagcaaatccaaatgaaaacctagagcagggctgggcacagtggctcacacctgtaatcccagtgctttgggaggccaaagcggaaggatcgcttgagactaggaattagagaccagcctgggcaacacagcagtaccctgtctttacaaaaacatttaaaaatttaccaggcgtggggcgtggtggtatgagattgtggttccagctactcgggagactgaggcaagaagatcacttaagcctggggctgtagcagtgagctgtattgcaatattgcgccacagcactayagcctgtatgacagattaagaccctgtctcttaaaaaaaaaaaaaagaaaagaaaagaaaacacccagagggacagagggcagatggggctgtgggcagggggagctctaggccaggggctcctgcatctttgctggaggggctgctcacccacttggggccttccttaggagtggcagcatcagtaccatgtggcctgacccagcttcagccacagctgagtcacgtggcagtttggattgctgccttggccaaggaaacatgccatttttccatttggtctttgaaacaaaatagctggctgagttcccagtggcagtgcacaggagtgggatttcagctatagggaaaaagcaggggcttggctggaaggaaaaactacaggcttcaaggaataacaagcatgggttcagatcatggcatggccaagatgctgggggtgaccttgggtgtctctctcctcctcagtttcctcccccgagaagcagagatagcaacagctttcccactcaaggagacagcacctgttgagggctgctaaataaacatttgctgcctttccttccaacatgtgcccatgtggtcatagtatgaatggagatcccaccccactatattctttttttttttgagacagagtctgtctctgttgcccaggctggagtgcagtggcgcgatctcggctcactgcaagctccgcctcctgggttcatgccattctcctgcctcagcctcccgagtagctgggactacaggcacccgccactgcgcccagctaattttttgtatttttagtagagacggggtttcaccatgatctcgatctcctaacctcgtgatccgcccgcctcggcctcccaaagtgctgggattacaagcgtgagccaccgtgcccggcctgttttgttgatttttaaagcccggggcagtactcttggaaaatgtcccacatcctggatttgcctttctgtttccttgagggcagattcagacagagtctcgctctgtcccccaggccggagtgcagtggcactatctcggctcactgcaagctccgcctcctgggttcaggccattctcctgcctcagcctcccgagtagctgggactacaggcgcctgccaccacgcccgactaattttttgtatttttagtagagacaaggtttcaccgtgttagccaggatggtctcgatctcctgacctcgtgatccgcccacctcagcctcccaaagtgctgggattacaggcgtgagccaccgcgcccggcccccaaacccccattttctaaatcacctatcatgtgattatactacgtcaataatgaaaatataaatccgcaaagaaagggaaaatctgagaagagcctgtccaggacctagaggcagcaggtctgagccccactcccacgtagcccagaaaagaatgtgacccacatctgggcaaactgcacccagagtcttcctgaatccagccccaatgcatacagatgagaagaggaggcccttgtaaggtcacagcagcccttacacactgggtcctccctgttccccatcccttgtcaatcactgcaccagcacattcctcttaggccatcgccctttcattaggggccttgtgttctgtcccatgctgtctttctgcaagtagcccaagggctgggtgcaatctctctcactcacctatccctccagcacctgctcaggatccacccctggtcagagcctgggtcatgtagccccagtgagctccataaaccaaggctcaagggggcaagtcagtgcccacagccaccygggtagccagttctgcctggctccagagtcctagcctttcctgaacaccatcccgaggcctccccactgcagatctgtgggtgagcaggcatgagaggaagggcaggtaggaaagttggggggctcaccatttctccaccagcaccttgcaggcctttgcttgtgcaaacagctgattcacccgggtctcttctgtgtcaaagtgcttcctgtagaaggactgaacagagaagagggggatggagtggccaccacccaggctgccttcactccatttagatgaaggaaataaagagcgtgttacagaggcagagacagcaggagggcagaggagccccacctgccagggcagacggtacatgcagcaagccagatcagaaagctgtctgtcctaagcaggagcagggaagcaggaccacacagaggcatgaggatgatgcttgagagaggggtgggcagctgggctcaggtcagctctctggggaggatcgatcacccttgggcttgtacactctggcaggcatgagcaggagcccgtagcgaataagcaagggggatgaggctgaaccacctgggacagctcagctacagcttggcttagctaggtgtcgtccacggaacacactttgctggcatggctatgttggcmttatttttcaaaaggcaaaaaaaagaaaagatggtattttggttttcttctagactaccaattatatagcttaaaagctggctctcctggtgaaaagtaaaaaaatgtgcaaatgatggccggatgaggtcagtgatgttctcagaggccctgggcctgccttgtgctgaggacagtagraaagaacgtaggaagtggcctctgcacattctgagggctgtagaaggcaggtggacaggagccaggactcagtacycagatcctctgggcaggcccgactgcaagggcacctgctctgactggctcccaaatcctgcctatagcctctctgctgctgctccctggtctctgcacacctgggtatctacctgggtgtctagcccttgactgttccctcttccaactactggaaccaggtggccttatacctctgtgtggccccacatgggaaggcctggtggctggtcgctcacctggttcttgtagcccttgtcgacacccagggtctgggtacagaagcggtgcctcacgccaaagtggtgcatcaggtaggccaggtcgatggtccagatgctcctggtcagctgcagcttctgcagggctctctcaaactcactgtcgtccagctggcccaggtacctgcaggtagaygagctggggagctcagcttggtcttgagggtcaactggtctgagtcaccctccacccactggcccaagagccccgtcacaggtcccattccccagaagtctccctccttcatcatgagaccctaggtcctgcccacacactgcccaggctgcttggggcaccgtcctggctccagagttgcaggcctggactctgcttctcaaatctattgtgtcttgtgggctgtgaccttgagcaagtcattgtcttctctggcctctttagcttcatctctaaaataaggtccctgatcacatcagtggttttcaaagttttaggcaaagaacgcttttgttgaattttctcttgctgagattcccaggatgtaaaacagatgaagatgcagctgccctgtggttccaggaagccaaatgaaaaactcttgtacaaggtgacggctacagtccctcttggctctcactgtccaggtttctgtgatattcacacagcctcagcttaacggtcagcaccccattctcccaggagccagaaactggggagtggagggcctcctatcccagtcacagaactgccttgtaggacaggcctgggcacctgggacttcctggccaccccaagcccccagacattactatcatggagagctggaaggcctggtccaccccttgctcacttttgcagatgggactaggaccaggtagaagcttggcctcctgcaagccccaaccraagatagctacatggaccatggatcccacccaggtctctcccaagccagagcagaagatgtagatgggaagcacctgggcccccagccctggccccactcaccgcagcaccatcctggagcaggccaggccacagtcccagtggtagagctgctggatgacgggcacaggcagttgcacaaagtcccctgtgcagaaacagagggaggtcacagaccctcagcgcagagcccaccactcccaccctcatgggagccagtgtcactgcctcctgcctagaccctgcaggggctgctcagggaccttcccacaatccttcaggaatcccctcaaatccaggctcctataatagcagtgatctccccaaaacaccggccagagcaggtcagcccaactgaaaatcctccagtgagctgggtcccacattccttaagacaatacctccatggctgctgccctagcaccctctgcacccttgcctttgcttgtcataatccctcacaccctggaggtctttgcacacctggttcctctgcctggacatacctggcttcccaggtgcctgagctaactcctgcccttggatgtcacttctccagtattgcccctctcaggcccagtgacccacatgtgcactcacttcccaccatgcctactcaaagcccttcttttggtgggagctctgaggaggagggacagagtctttttcttttttttcaacagggtcttgctctgtcgcacaggctggagtgcagtggcatgatctcggctcactgcaacctgcgattcccgggtggcaagtaattctcctgcctcagccacccaagcagcctgtagtccacaggcgtgcgccaccatgcccagctaattattgtaattttagtagagatggggtttcaccatgttgtccatggttccatggctggtctcgaactcctgacctcaggtgatccacctgagcctcccaaagtgctgggattacaggcgtgagccattccgcctggccagcaggggctgttttgtttcctgctttcattccagggctggcacatgggaggcactcagcagataatgtatctgagttcatgaggcccctggaggtttgcttgactccaaagaccccaggaccaccagggtgtgagaccatggccaggagaagggaactgtcacgtaagctatgaagcatatgtaatattcttgtgagctccatcccccaccaaccctgggcgacctctcggtctgtctttgccaggctgtgaggtggagcagaaagggcctgacctagcgttccagtctcaactgtgccactgctggctggctgtgggctgggcagctgacttcctcttgctggaatgagtctggccatccctaaacagggggactttggtctgattcagtcattcagtcaacaaatatttcccaaaagcctagtaagtgcctggtgtgtgtactggagatacagcagtgaatgacacaaagtcactctcctggtggatagcaaaaataagcaaacatagcaaaatagaggcctaggctggggaaaacagtgggggtgtgccttagaggggatgggggaacagcatgtgctaaggccctgaggtggggcaaatgggcwtgtggcatgcaggaccctcctccgtagccacctcatgaacctggacaaagttcagagtctaaagaggaagagacttatctctgctgttactcactcatgacactcattcagcacgtgaaaaccttgcccacattgtttccccatctggcaggtctctcctggactgtgtgaccagctctgtgtagagccaccccaggagccctcctgctgtgccagccccagttcccctcacttccctgtgtgcgccagctaagacggccactcactagtcctgggatctgtcctggcctttccaacctaccaggctttgaatcccaagttcctcccttcctatgtctgaccttccccagccttcaaggcctggctcagaggccatttccagggccttccctgatcacagactggctacaccctttcactcatctgtacttctctgggcttgagttcacactttgcctcctaggatgcggcccttgcattgagcttgtctgtgccctcctgtgttgcttatacgttcccaagaggcarggacctatcactgctcctggtgtctttctactccatgtgcagcagggcccatggaaggcacaatggcatgagcaaagcaggccacctgctagctaagttgcctggcctctctgtgcctgcttcttcctctgtgaaatggactaccagacgccagcctgcagggtgatgtgaaccctaaggacaagaacgtctataaagccctttgcaggtgctaataatgtgaacctgcccccagctggggcctggtatgctaagcccaggctggactgaggcctcattctcttccttcctcttaacccagatgcctccaaaagatacccaggccgttcactcaaggcgctcacatgttcccctgctatcactgccaaggattcagtggcactgacccctgcctgtccctgccccaaattccactcccagcacctctcccacctctacatacagcagccgtagggattcccattcagtttcccactgctcttggaataaggttctcatcccttaccggggccctgcctaacctggccygccagcctcatcttggctgccctcacctgtggtctagttaacctgtgaactcatcaaggcttcattctaccccaaggcatctgcacgtgaggatccctctgtctgaaactctctcccggctgctgttctcaaggttgtgtcccttctagtcattcaggtcccagctcaaaatctcttcttagaggtttttctgactaagcctttgagaaacgagggaactctccttcacagcatcctattcgtttccttcacagtgcttggcaaaagtaacaatagcatcaagccactctcttgagacggcaagcttcctgaaggcaggtgctatggtatcctctccaaaatttatgttgaaacttaatctccattgtggtggtatgaagaaatgggtgcagaagatatccacaaccaaaaatataaataaataagaagtgtggccttttgtgaagtcaggagggctctgccctcatcagtgaactagtgccttataaaagggctggaggaaactagcataggccattttttttgcccttctgttcttctgtcatgtaaaagcagtgttcatgccctttctgttccttccaccatgtgaggacacgtaggtggcaccatctacaaggaacaggcctttaccagacacagaacctgccagcgccttgatcttggacctcagagtctccagaactgtgaagaattaaatttctagagctgggcacagtggcgcacacctgtaatcccaactactcacgaggccaaggcaagaggagccaaggagtttcagaccagttcgagcaaaatagtgagacctccatctccaaaaaagaaaaaaagaaattaaatttctattgtttctaaattacccagtcccaggtattttgttatagaagcacaaatgaactgagacagcaggaaacttgctgatcttgttcactgttattctcagttgctggtgttgaatgtttaatagtaactcaataaatatttgctggaagaaataaactttttttaggccgtgcacagtggctcacgcctgtaatccaagcactttgggaggccaaggcaggcggatcacttgaggtcagaagtttgagaccagcctggccaacatggtgaaaccctgtctctactaaaaatacaaacattagccgggcaggggccagagcctcttatcccagctactcgggaggctgaggcaggaggattgcttgaacctgggaggcggaggttgcagtgagccaaaattacgccactgcactacagcctgggcgacagagtgagactccatctcaaaaaaaaaaaaaggaaaaggaaaaaaaagaactttttgttttcttctgaaacagggtctcactctgtcgcccaggctggagtgcagtggtgtgaccagagctcactgcagccctgaactcccaggctcaagggatcctctgaccttagcctcctgagcagctggaactatgggcacacgctaccacacccagataattaaaaataaaataagccctcactgtttgctaggctctggggacacaaaggtaactaaagacccacccaagccctgacccctagggactcataaagagctgagcagtgggagagctctatgcaggatgttgtgctgtcacggtgaatgcctgcctgttcaagaacccctcacagcagccacacactgcctttttgtttttctctactcatactgtttcctccccagcttttgctcttgcacatcccttagtctaggagtgtccaatcttttggcttccctgggccacactggaagaattgtcttgggccacacataaactacactatcactaatgatagctgatgagccttagtctgaaatgttaatgttgtctccatgctctaatccctctcactctcagggcccctcaatatggagtccttaaagaggcaatgagaattcttcagtggcagatggggatgaggttgcatttgcctccttccaaccctcagcccagagtaggcacttagatatgcttggggaatggaaggcgttttccaaaaagacctcataccttgagatgcccaggcctacttgtcacttccctgctctgcacccctcctcccccaggcttccagactacagccctctgtgtgaggctccctccttactctgtggcttgggctgtgacactgactagctgggctatcttctgccaggctatgactgtccatgcctttccatgtccagctataaaatgtggcacaagacagcagctctctctcagagactcagctgcscctcctcctcttgccctgcgctctagaactccttgatcctgaggcctggcaggccccacagggccatctccagcctcggcaagggcggatcggacctagaggtgctcatgttgggggtgataaggttaggcgaggccttggcatctgtccccataacagctttagccttctaaacacaaagccacagccagacgttgctgcctggagccaaagggctgcctggaaggccctggcctgagctcagttagtggctgtcactaaggaaggcaagcagtgcactagcctttaatacttaacccatctcagactcagtctgctcagctgcaaaagtgcaaatcacagtgggcacctacttcactggttcgttatgaggattaatgaggcactgcatgtaaacaactgcacgcagcgcgcgcctgcctcatagaacactccctgtgaatgtaagccattcctcctctgaggctcaggaaaggcaagtatcttgtctcagaccacagggctagacaactggaggaggagggttgtaaatcccccaccaactccacacagcagacacaaaagggaacactccctgggagtgacacctgaaggtcagggtcccacatgctgttgacctcttccacagttggcacttcacttcagagtttactagctagaactccgtttgtcatcaaccccgcgccttcagcaggacaggaatcacgtcttccccctcccctacgtcttgggcaagcaaactaacggccaagacattgaataccagtccgggtctccgccccaaaggggctcaggctaccgcgtggcagagagaacgaaagtgaagaacaagagcaagacaaaacgccgagtctcggaggccagggcactggcccttccattgctcggtgctctcggccagtttcctgcccttcccagcctcagtcctccacggtttcccaaggcatgggagctcccaaggcggctccagcaggacttttcgcttctggggaaggtggtgcccctgctacccggaccttcccaccatgctgacaagggtcgcaatcctgcgagtgtcaggaaacccccactgactggaaccaggcgggtgtgggggcgaggcgggagtcggcccaaggtcgcgcgactggaccctgccccgcgctagggaggggtccctttcgttcctagggtgaagactgggcccacagagaggcactgaccgggctcgagcggcggccccgctgcctccgcctccgtcctcatgacccgggcggcgcggggcgcccatggccccggcccagagcgggctacagcttccgcttcggctggggcgggagggcggtcggtgcgtgtcgagttccttctccgccaccgccgccgctgcggaggggagaacgggaggcggcggctgggccgccccaagcgccgccccagcccttccaggtctcgaatctggaggccccgccccctccttaggccccgccccaaactttgatcttagaggtccccagcctcttgatttaagtctgctccggccattcgccgcctcagcgttgagtggccccaccctctcgcccaatcctcgcgcagacgcgcagcccaccaggacgcgggccccggaagccccgcccctttctttgagccccgccccaaagctcgtgcatttcctgaatagaggctcgtcccttcggcaagccccgcctctgccgggtcccgctcttttgccagtcctaggtgtaagccctgatcccgcccagtgcatccccgaggccccaagcaactctcctccaactgtctttagggataaccctgagcgggcagccgctctactctatacctaactttatccgtaccagatayctagcctcactcagggccccccttacctggcggtgccgggatcaacaaatgaaattgtgacgggaagtcctggcccttggcccaacctcctgctgtccccggtctgagggcccaagccccgcgtctccgccttgccgtccagcctgtccttggtgtggggtgcttggaagtgtgagcaccctctctggctctttgccggccccaagggtcgttgcggcggcccccgggcccagtcatcagccctcttttccggtgccggaactatcgtactggtgccctagtttcccagccggcaggcggagtgaggaggaagcggaggcgagaccgcgctcaacactggggaaaggaaggaggcgggccctgcgcgcagcattttgggaaagagtggaattctgggtgttaggcccgccattcgcttgactcacgccttcgccgtagcatctttcgcagcggaccgaagagaagaaaagtaggccagagccggtgaggctggggacgggcgaggggaggtcgaggcgcctgtgaggggccaggggctggagaaagacttgctgcatggaactctgcggggctcggggagggaagaaagcgggaagcttgggccacccaaacatcagcgtcgcctcactagctcctggaagtaagttcattagctttcccctcaacgtgcatgcttctcacattctgtatctctccaggtgagtgtttttcaaagcttccaggcagtaatctcgaagtcatttctgattgactatctccttcccccaaatcctatgagtttttttttgttttttttttttaagtagagacggggtttcaccatgttgccctggctggtctcgaactcctgggctcaagggatccaccggcctcggccttccaaagtgctgggattacaggcgtgagccaccgcgcccagccggtcattttttaaaaagttctttgtatctctgccccagtcccctttcaggcaatggtcccctcatgctttccacactgttgcagcagttttaactgttgcagaagttttaacaagtttctctgcttctaaaccttacgttctatccattttgtaaataaatgctgctatcttttcattgcgtcattctttacatataattctgcagtggttctccactaccttcagcataaaatctagactcctaaggctgaaagccagggatcctcaccaaaggagcctgtcctttcaacctcatgttctcctgtcttaggtacgcttaagttgaaacttagagttgttgctcatctcaataaaaagttcactgcttgatgcttttgattaggtcaagtcaggtgctttccctgattttcctccatgacaagcatttcctgcatatagcacgttgtcactttgatattttctcaatatccttgatagtaaaataagtgaagggttaaagggctgaattaaaagtacagcctgctctcctagatgtgcatggtcctttggtctgtatctgcaccttccatagggtagtcactagctacatgtggccgttgaggacttggaatatggccactgggattgagggactgggtttttttattttaattctattgtgttttagttaagtttaatttaaatagctacgtgtgtacatgagctgctgtattggacagctcgggcctgtattattctcaaaacgtagtcatctacaattaagggttaaaaaataacagtgcaacaaattaacattccaatccccctcccctgacacacacagtattggctaatggtcctttagctgaagattaagggacatagggtagtggggacacatgacccatgggagatgctctcttttcattcctagttttacttctgtccatcccatcattcctcctcaccccacatcttgcacatatttgccagatagtttcctccaaaccaggagctgagctttttttttttttccttggtagaaaatgcagctttggtgtttttgctaagttttatggagtgccaggccttaaaggaagcatgatgtgtgccgcatgccttttcagactctgaaagatgaactgactgttgtctctctcattgtagaactctcttcctgccaagatgtctattggtgtgccgattaaagtactgcatgaggccgagggccacattgtgacatgtgagacgaacaccggtgaggtatatcgggggaagctcattgaagcagaggacaacatgaactgccaggtattctgctttgcatgtgaggctgtgtgggaggaatggccctgtgtcttgaaggacagaaaagtgtgtgttgagggtctctggaaattgttctcattcagcagtgatttcctaagtgcctaatgcataccagtcaggtgctgttataggctctgggggtgtgggcatgaacgagacacataatcttgaggcagaaaagccatttggaggtttggaatattttactttgtcctttttgttttttccatccccaaatatgggggtctatttgggagaagtgctacttccttcagtagaatccttcagattcagggccattatccatttgcctccacttgctttgcgattagcagaatcttctcacctactgtatttgtttcccttttctcttggaggaggagtctcatttgattattgcaactaccttgtgaggtaagcaggtttggtgatagtcttgtcatccataaaatagggagaatgagattaaagggctcatcactctgatgataaataatggagtagtttcctgatatggtgtccttctcatggcacaactttgccttttgcatagtcatctgaatttttatagcattgtttttcagttgtatcttcacactttctttgttctttaaaccactggttaagaacttggacttgggagtcagagagagatgtgggtttgaatcctaattatatgactttagatgtattaaccactcagttttctcatctgtaaaatgggggtggtattatgttgggttctttgatgtagatgccaagacagaattttgcaaggtatttattgggggaaatgacaataaaggataaaagagcaaggaagcagtagtaggcagggaaattttcagtctatggtgctggtctgactggtgaaatgagaggggaaaggaaggaggattgagcaggaagagccttagactacagcgtagttttgaggaaatctcagcaaggcagcgattgctcgttagaagagtctagcatggggcagaaatgggcggactggcacccccggtgtgttcaggctggcaacatggggagagagtagtctcaagttgaatgccatggtggactgcaaagatggagattgtcggctgcctgcactcctcatagcctgttctcttttgaagggagatgtgagcagcacacccttaagactgccacaggggtaatatccacacccccaggacttttacaaagatcagatgagctgtatgtgtgccatagctgctcagtgcctcacatactgtgagtgttcaacatatgatacctattgcttttttccagatgagaaggtcagagaggtaaagcaccttacaccgcggtcaggcatcctgaccatccattggtttgcagggttcatttatttgtgatttttctgtagctttgagcgtctgtcatcttcctgcgaggttgacaagcttggtcagttccctgaatgcagagaagtagacctctggtgactcaggtttattgcattactgtcaatagatcagtttatctattgagggtagataagtttatcatctctcatatatccagtcctctggcttaaggcatgctcatccactttaaggttctttaatttggtgaggagaatgcaagacttgggttagtgaagcttaatgggtttgttcaattagctgtatgtatttggacaacttgctgggtttccagggcctttgtcatcccatccgtaacgtgaaggtgtctaaccagataaccttggtagccattcagagatgcagtcaacatgacacaaagtgcacagaccttggtgtccgacagacctggaatcagcttgtagcctgccccctagggtgacttggggcgagcttagctttggacctccttcatcctctggtccctcctctaaatcagggataaaaatagcaccttggcctcagaaggaaccacgcctgaccaatggtgggggacagccacctgcctccctgcttgtatttgtatgctagtgctaccataacaaagtttcacagactgggcagcttagacaacacaaatttattttctcatagttctgaaggctggaagtctgagatcaaggtgttggcaaggctggtttcttctgaggaatgtgaaggaaggatctgtttcaggcctctctccttgcttatatatggctctcttcctgtgtcttcacttggtcttccctctgtagtgtttctgtccagattcttcttataaggataccatgcatgtaggattagggcccactctaatgacttcatcttaacataattatgtttataaagaatttttttttttttttttttttttgagatggagccttgctctgtcacccaggctgcagtcttgctctgtcacccaggctgcagtcttgctctgtcacccaggctggagtgcagtggcgcgatcttggctcactgcaacctctgccttccaggttcaagcgattctcctgcctcagcctcctgagtagctgggactacaggcatctgccaccatgcccagctaatttttgtatttttatatttttagtagagacaggtttcaccatattggccaggctggtctcgaactcctgaccttgtgatctgctcgcctcgacctcccaaagtgctgggattacagatgtgagccaccatgcccagcttgcttgcttttttttttttttttttttttttttttttttttttttgagagtctcactctgtcgcccaggctggagtgcagtggcatgatctcagctcactgcaacctctgcctcctgggttcaagcacttctcatgcctcagcctcctgagtagctgggactatgcccagctagtttttcgtatttttagtagagatagggtttccccatgttgcccaggctggtctcaaactcctgagtttgcctcagcctcccaagtgctaggattataggcgtgagccactgcacctggcccttttttttttttttttttttttttgagacagaatcttgctctgttgtccaggctggagtacagtggcacaatctcagctcactgcaacctccgtcttcccgggtttaagcaactctcttgcctcagcctcctgagtagctggggttataggcatgggccaccgtaccccactaatgttaatattttttgtatttttaatagagatggaggctcatcatgttgcccaggctggtctctaactcctgagctgaggcaatctgcccaccttggcctcccaaagtgctaggattacaggcatgagccactgcacccagccttttttttcttttcctttttcttttctttttttttttttttttttttttttgagattaagctttggtctgttgaccaggctggggtgcagtggtttgatcatagctcatgggcagccttggacttctgggctcaagagatcttttcacctcagtcttctaagtatccaggactaccagtgtgccccaccatacctggctaatttttaaatttttttgtagagacggagtcttgatatgtttttcaggccagtttcaaactcctggccacaagtgatcctgctgcctcagtctctcaaactcctggaattacaggcatgagccaccacatctggcctgtaaagattttttgtctctaaatatgatcacattctgaggtgctgggtattaggacttcaacaatgaatttttttgagggatacaatttagcctgtaacaggatgtagaggcctcactgggtctatcaaaacctaggcacattgaataagagccagcagactgtggcgtagctaaagctggtggtgggtgaactctgagcacagtttagtttgttcagcacatctcaggctgtgaggcttgcctgtccttcccagatccagtcattctgccttttgggaatgagaacatcctcttagcacttttccttgcttgttcaataacattttctgttataaaagtggggtgggacaaaatgtggtggctactcctataatcccaacactttgagaggctgaggcaggaggatcacttgagcccaggggttcaagaccaacctgggcaacatgacaagactttgtctgtaaa

SEQ ID NO: 98207 - DNA, 19668 bp, Homo sapiens
tatcatggagacactcttcagacatcaatcacaatgccacctcctcctgaagccctctggcactgcatctcactctgcaggccggctgcgactgctgcctcctccacagtatccacagtgcccaacaatcttcactgaatggatggatgccagctgtcaggtggctagctgtttttactaaaatgcatcttctaggactttacactgaatccacctagccacctgacagctggcatctctaatcttgtaatcccagcactatgggaggacgaggtgggtggatcacttgagactaggagttcaagagcagcctgggaaacatagagagaccctgtctttaatttcttaattaatttttttaaaaaaggcccaagaggacagggtttggggagtttcatgtggaggctgacaggaaggggaacaagaactcatccatggccaggtgcagtggctcatgcctataatcccagcgctttgggagggcgaggtgggtggatggcttgagcccaggagttcacgaccagcctgggcaaaatagagagaccccatctctacaaaaataaaaaagttagctgggcatagtggcacatgcctgtggtcccagctacttgggaggctgaggggggaggatcacttgagcacgggaggcagaggctgcagtgagctgagatagtgccactgtactccagcctgggcaacaacaaaaaaaaccaactcatccatgtgtccagctctaccaggacagaaacttctgtacttaggagtcttccagtctttaccctatgtatctcttcatctgactgtttatttgtagcctttatctttttttttttttttttttttgagacggagtctcagtctcgctctgttgcccatgctagagtgcagaggtgtgatcttggctcactgcaacttgcacccctcgggttcaaccgatgattctcctgcctcagcctcccaagtagctgggattacaggctcctgccaccacacccagcttattttgtacttttagtagagatggagtttcaccatgttggccaggctggtctccaactcctgacctcaagtgatccacctgcctcgacctcccaaagtgctgggattacaggcgtgagccaccgtgcccggcctatttatagcttttaaagtttcctttgagctactgactttaagggatgataaagtatgtctgaggagaaaataaaataaaacatcctttgaaataaaccgataaacaggtctccctgagttgtgtgagctactctagcaaattaattgaacccaaagagggggccttggaaccccaactagaagccagttagtcagatgttcccaatgcccagacttgtgactggtgggatgggggttggtcttgtgggaccaagccctcaacctgtggtttctgaggccatctccaggtagacagcaccagaattgagttgaattggaagacaccagctggagtctgctgcagaattgattcttgctgggtgtgtgggagaatccacaaatttggttacaagaagtcttctgtgatgattattgtcttgtgagaacagaggcgaaacacagttgttttgtgtgtgtgtgtgtgtgtgtgtgttttgagatggagtctcactctgtcacccaggctggaatgccgtggtgctatctcggctcactgaaacctccgcctcctaggttcaagcgattctcctgcctcagcctcctgagtagctgggactactggcacatgccaccatacccagctaatttttgttttgtattttttagtgaagatggggttttgctatgttggccaggctggtctcaaactcctagcctcaagtgatccgcccaccttagcctccccaaagtgctggaattataggtgtgagccaccacgccaggccaaaaaacacagtttgagttggtttttcctcacacgaccttatttggaaatagagtctctacataagtaattagttaagatgagatcatacgggattagaatgaatgagccctgttgggcacagtggctcacgcctgtaatcccaacactgggaggctgacaggggtggatcacctgaggtcaggagttcaagaccagcctgaccaatatggtgaaacgctgtctctactaaaaatacaaaaattagctgggcgtggtggcgggcacctgtaatcccagctacttggaaggctgaggcaggagaatcgcttgaacctgggaggtggaggttgcagtgagccaagatcatgccattgcactccagcctgggctaacagagtgagactgtctcaaaaaaaaaaaaaaattaaaattaaaaaaagaatgaatgagccctaaatccagtagcttcagttcttttttttttttttttttttttgagacagagtctcgctctgtcaccaggctggagtgaagtcaccacgcaatctcagctcactgcaacttctgcgtcccgggttcaagcgattcccctgtctcagcctcccaagtagctgggactacaggcatgtgtcaccacaccaggctaattttttttttttttttttttgtattttagtagagacagggtttcaccatgttggacaggatggcctcaatttcctgacctcatggtccgtccaccgcagcctccaaaagtgctgggattacaggcgtgagccaccgcacccaggcactagcgttattacaaggaggccatgtgagccgggcatggtggcactcactcataatcccagctacttgggaggctgaagcaggaggactgcttggacccaggagttcaagaccagcctgggcaacatagtgagaccccactgcaaaaataaggaatgccatgtgaaggccacacagacacatagggtagatggtttcagagactggagtgatgcagcagcagccaaggaaggccaaggattgccaggagccaccagaagctgaagagacaaggaaggatcttcccctggagtcctcaaagggagtgtggcttggcctatacttggatttcagacttttagcctccagaactattctgttgctttaagccactgagtttgtggtaatttgctatggcaggtccttactctgcctatggttacacatccaacaagtggcagcccaggggatttgaatccaggccctgagcctatacctgtgatctcgcctcaccccgccaagctctgctgcctactacagcctcatgacaattcctggccctgcagaaggttgacaacccgttcctgtagagcaaacacagaggacattctgtctccatagagtatccatctgcttccttcctcctagcgaatgcccccaaaccattctgtgtccttctttacagtggctaccaggaggctcagtgccactcagctacttgctgaggtaacattaaccctgagctggcctttttccctcctgggcttgaacaatactactgggtgggtagagaagggcccagaggcagtgcaaggccagttccagccctggctgcagccctctacctgcccattgggccagctggaccttgtgttcctgtcatttgaactaggccaccgcatgggtggcagagggcttgagactccaaaggtgtggctgtcatcaattcttgtctcctggcaggtcccacttggagcctagtacgttcccatcagggcctgaggtctagctgtgtcctccctacctgattctccagcccccaacctcccaactcactgactcactagggatggcagggctaccctgaagaatccagggcaagcccttgagcttccacatcagccccgggaactgagaggacaacatcgcaatccctccaccccatggagtctcaacaaacacagctctgctgctcagggtaaccccagggagacgggccagcagccctccgtgaagaacacatgtgggctagcgaggtggaatcatgcccccatgcctgaggggagagctgtgcctctgggggctgctgtccaagtcaggttaggccagaaattgtctccaaaagcccactcgccctaggcaccccacaagcaggcagagaaaagcccatccaaggatctaggcccagacaccaccctccctcttttgctggaaaaatgtcctccaggaacctctcggccagggacacagagggtgggggatgagaggcaggggctggggcagttctctgccttccacaggactctaagctctgagcactcccccataccgctgcctaggttgcccctttcatgcctccaggctcagccctccattccctcctttctcccctccccctgcccagtattctcacatttgaggggacagtgcccaggcctggctcagcctctgggaggatatggtcaggatctgggagccctcccagctgtggctccagccctgaggctgcaggggaagaggaggagggcttaccgggctgcctgctctgggcaggggggtctgagaggtccctggggcatcagagctgcagcttaaagctctgaccgggtaggttgccacttcagttcagcaacagcgccttggccctgggggagggcacgcaaggccgtcatgcaggtttgccagggaggaaacctgtggtgccaaggtggccccaggacaatgctggctgcactggagtgggaggagaggctgttgggtccagctggcaggtgccaggggagaagggggtgcaagcactgctccagcaggggttgggggtccgtggatggtcaaggggctaagacatcctgctgtcctctgccttgtctcaggggcccagccccacaggatgacagagcctagcaccctgccctctccccactgccatctctgggcaggcagtgcttaacccaaaggaaggaaccttgaatcttcatagggtaattagcagacacacacacacacacacacacacacacacacacatacacacgggtgcttggctgtcgtccctcatatatgccctcggacagtgctcagcccttcctgcacaacaggtaccagtcctcacaggctaaacacgtgctccttgcttagagaagtgggaactgcagatcagtgcctcaaacgttccccacgcaggagatgtgagcgtcccagagccgggattggggctgcaggggcccagcaggcctgcagcagagacctaggcttctgctgagggagccctgggaagtgggatacaccttgagctgggtgggtccgtacctcaccctggtcctcagaggagccagggcccccatctcactctgcctgccgccacccccaccccttgtcagggaggcagactgaagccagcggcagatacagcccgcctgctgccagcttgcccagagctgggcttaacggttaacctgactcttcgtccggtttatttcccaggctggggtcagaggtgggggcctgccccaaaccaagaagcaggaggcagtaaatatttgccagtgcaggagtgtccatgtagcgtgagcaggtcctacaccacaactgccagctgcagagatttcttttcttttcttttttttttttttgagacagagttttgctctgtcacccagggtagagtgcggtggcgccatctcggctcactgtaacctccgcctcccaggttcaattgattctcctacctcaacctcccgaatagctgggattacaggcgcccgccaccacgcccggctaattttttgtattttcaataaaaatgtggtttcaccatgttagccaggctagtcttgaactcctgaccttagattccgcctgcctcggccccccaaagtgctgggattacaggcgtgagccaccatgcccggcctaatttttgtattttagtagagacggagattcaccatgcagggcatatttctaaaagcaatgggggcaatacctaacactggcacacacagcagaacccccccaccccgcctagaatgctctttgcacggtcaaagcgactattccccagtcagcactggggccagagggtaaagaggtgccaaaagccacctcgtctcggccgagctccgcgtctcccctggcggctccaggccctcgggttctagcgccaagactgacgcaagcagggcctcctccagtgtgatcaggccaaaccgaggaacccactggcctcgctccggcgcggggtggggcgggcgctcagccttcggacccggacggggcagggccgcggtgattggaggcggggcgactaggggcggccccgggagcggggcgcagacagcccggcctcctgtgggttcggcgaccatcgcgcggcggccatgggggcgcggctgggccggcgggccgggcccgaggctggctctgaggccggggcggcggccggctgcgggcccgcgccctacgarcgccgggtgcggtggctccgcgagatccagtccacgctccgcgagcggcggccggagcgcgcccggcagctgctgcgcctcctgcgccaggcgagagaaggagccgtccgcccctgggctggcggccagggagggtctgggggtctgggggtctgggaggcgcggggctatgggttgtgggcctgtatccgccgggaggcgaggcggagctggtctctggcgcgcgcaggcgggttccgagggcgcgacaggctgcagcacgcggggtcttgcgtgggcgagagggcgaccgcctggagtgagggctgggtgaggtcggcggaccgtgtggaggagggggctgctgagtgtgtccgggtctttggggtttgagaggggttgtgtgtgttgagggtggcccggtagcctggacctaagagcccaaattcaggccctggcaagatgggaggggcccgggaggagtggcaagtgaggtcaaatcatcttgtattgagagacaatggaagagggtaacttccccctcctccaggatccgggagacagtggaccctggagagaggacccagggctggtctagggatgcagcctcaccccaagacaccatggcagcccacagagagccatccatgcatcaccagttctccaacaggcggctcatgcccttagagtacacatccccagcatctgtgcatcacaacactcggtccggtggtggctctgctcctacacacaccaggtacactaaacccagatcccaacccctgggttgtcccaggatgctggtccccccaatcacctgggcatgccacttccctcaccaccccgtccccaccccctacagcagctaccaccactacctgccccatcctgtgagcaggaagtcagccatgcaggtgttcggcctgcagaaggtagattagaaatggggaaactgaggcatggagcgaagtggtcaycccagggcccacagagaaaatgtggggcaagccagggccagagcccttcttcctcccttcccttctccacctcctccaactctggattcagcaggctggaaaaatggagctgtccgtttaagaggagctgtctagacccatggaaggcaggctggcaggttgcggtctggggccctgtctgggtctgccaggctcatcagccagccttcctcctggatcttccctagctggcatctgtggcaaacagcagagcagcactgaatcagccagacaaccagaggcacagatctcagtctgggatgctgcctggagtccaagacaccagttgggcattttagctgggaaactagagggaaagaaggatcctcagagaccacctctttgtgtctcagaggttgggatttgaggtccagccggggcctatcctgctccataacctgcagggaccctgcagctgtgacccacggcctcccctgcctggcccaacttcctgtgcttgggacccacgcacagagcatatcacctatggattggagaaggcccacatggggtctagaggcccctcctggctgtggctgccccatcagctctcaaaatgtcctctaaagagaccctctgggccagatgcagtggctcacgcctataatcccagcactttgggaggctgaggcaggcagatcacctgaagtcgggaattcgagaccagcctgaccaacatggagaaaccccttccctgctaaaaatacaaaattagctgggcgtggtggcacatgcctgcaatcccagctactcaggaggctgaggcaggagaattgcttgaacccgggaggcggaggttgcggtgagctgacctcgcaccactgcgccccagcccgggcaacaagagcaaaactccgtctcaaaacaaagagaccctctgaaagagtattcagccccacaccagtcctgtgggagtagacaggaggagaaagtggaggagtgaggcaggaaggccagggcaggtctatgcaggcggtggggtgagggatgggtaggagaggaggctggaggcctgaatcttggcaggagtggtggggagagagaagggatgactaggtgagctgggggagagaggaggacggaagagtgctggggggttccagagcttctggccccagtgcctgggaagatggtcatggaggtgccctatactgagctggggcatgggtggtgaggctggcttcagggtggcatgcctttgagacatctgagagagaggtccgcccccaagggaaggatccatacctgtccgcaaacagatgctggccgcagcttaggaaaaccaagggataggtgggaaggcagaggatctgaagggaacactgggggacaggggaatttgaggggtcataagaagagcaaacccccccaccataagacgaaagaccccaaagaatcccactgacaagtcctaaccccagagaaggcagtgtcacagcacaacactacctcaagggaactggtctaagggttctgggattcacttaccacttccctgagggctcccatgtccctcccctctacttatccaaagggtcctccaaggctgagtggctcacacctgtaatcccagcactttgggaggatcgcttgagcccaggagtttgagaccagtctgggcaacatagtgagaccccatttctacaaaacattttttttttaattagctgagcatagtggtgcctgtctatagccccagctcctcaggaggctgaagtgggaggattccttgaggaggcagatgttacactgaactgagatcacgccactgcactccagcctgggtgacagggcgagaccctgtctcaaaaaataaataagcaaaaaaagaagggggccacccgccactggactgttggcccatggccgcctgtggggagaatccagccagccttagggaggagatggagagacaggaacgggcataagcagcatctggctggctggggtggtgcctcgagatgggagacccaacgggctcactcaactctctcttcaccactcacaggacctgggccttgagaggaccctccttcctgatatcctctacagagatgtggccttcctcaacccggtcgaccccatmtcccatgacctgcttgtgaacctggcccgggacctgcagtgccccaagaaggtgaggctggcaggcacgggccctgggctgggcactgtggtggacakgggggccaacagagcccagggctggggactgggaggctaggtccttctgcggcttgctgtgtggccttaggcaagtcactgtccctgtctgagacctgctgccagcatcagtatattaggctggccaccagctagagcaagtgtgagctgtgctttgcaggaccctcagagtcctgggcagacccattttctgtgtggcagcactgtgcaccaggcctgggggcccagaccaggaagactatagctgggcagaagtcatatggggaccctgcgggtcacagactgttctgagaaatccaccaacggaaacaaactcctagcctctgaattcctgggccagaagagagccgctctcggctagagcccccgtctgtccgcaggtctccatcctgtacagacacccttgcggacgggtgctcactgctttcccctacaacagctggggtcataagcaaggccctcctccttgctggggtgggagtttgccacctgcagcctccaccccacagctgcccagaaccccatgctgacagcacctgcagatgtcctgccatgagcatcgacacagccccaggatgtgtggctgtgaccagccaccggacccagactcctagtcacagtgagtccccaaccaaaaccagggtatccgctctgggccctgccagctctgaatgcccaggtctctgcacagtcggcccctaggactctgcgcctagcccacggccatcacaggaacagccagggcttgcagctgctgtgtgtgctgcctgctcctggggctgctcacagagggactggataaaggatgcagtggagcatgctcagtgccagctttgtgggccgcgcacctcggattccaccctgagctgggcctctgccggagcccagttaggactgagagagagccaggtggtggtgctgtaaaacattacatcccccagccctgtcagcccagacccagaccccgcaggcgcagtctcgcttggagagtgagaggaagaagaacacgctgacctggcttgttcctactccctgggattggcgtcagtggagcacggctccctcgaggggcctggtctggcctcctccccctgtggcaagtccccgaagggtgctgagggtgggcaggcagccggctgatagcccgagacgctggccctgggcccgaggacagggaacaagggctcattgtctgggcttcctcccgccgggcactgcgggactggaccagcctgtccagctcccagagggcagcctcccctggctctgtgccaggccacagccgggttggggggtaggagggggaggccctggtgggcaactcggtgatgcatggtgcatgactgtgctcacacacacacttggctgcctgggtccctctccccaaggccctgaggtgggcaggaggggctcagattcaccatggtgacactgccctcccacaggactatgagctctggaagtcctcggacaagatctgccgacagctcatctaccacctcacccctcactcgaagcagcagcaagggtccagcctgcgccagaggaagacccagmgctggtaagggtagcccagccactgcccctcctcactgctgctccaaggtcccttctcaggttgacacctgcactctcaccaagaggctggtgctgaaatcccacctggtgaggccctyacctggtccgcatgagggccctaccctggaagtcagcctggcccgtggtagcagatgctccccaagccaagctgcaccctctgagtgacccgtttggcatttcccacaggacggtcctgcctcctgccattcatacatccctcaatccctggtctgttacacggcctggacaccccacccctccacccaacagccaaggtgacctcagtaggcatcttcagctgagacttcccaacaggttgcgggggaggcagattctggatcgcgattctcattttagagggaaggaaacaggttcggagaagtggcttgcctaaggccacactctaccctgattttcctgtaccttgttgggaattctttgccactgccaggctgcctaaaactgaggcttccgtggctgcccaatagctccctctgccatgggtccctctcagacactccatcctggagtgactccatccatggagcctcacacacaggctcagtccagagctggccacaggcacccaggcccagaggcctgaactgctgccgggagcttaccctagcaggcctcccctgtctgccctccacccctgtcccaccttgggcctaataggccacgctgagcttggaccccacaaggttgttccctgccatggctggtgggggtcctgagggtgtgctcactgctgtcagtcccccaaaaggcctgtctgcctagtgggctctgttcagataactggggagagacctagagggttggtgggggcgggggtccttctcagtctctgaacttcccttctaactgagaaaacacggggagccctccctcatggccggcccccagcctgcacacccaggacctcccctttcactactgtgggcctgtccctctctatccccggtgccctgtacagcctaatagccgtccctttgtaggagaatttctccctaccctaaaagaatcgacatcagaaggggcacagggaaaaaaacatgtgggctcaagagtcagagcatctcagtttgaggacctggttccccgcttagtggtgtgtggccatggaagagttacttcacctatctgaaaaataagtgagatgtcaataaaacaggtgtgggatgctgggcacacagtgagatttcaaataatagttcatgaagaaagagccttactgtgtgtgcatttaatcctcacaacaaccacgtcccattttcaccaaaggggaaactgagcctctgagcattgcccatggccacccacttagaaagtgacagtttgggcccgggcgcagtggctcacgcctgtaatcccagcactttgggaggctgaggcggtcagatcacctgaggtcaggagttcgagaccagcctgacaaagatggagaaaccccgcctctactaaaaatacaaaattagccaggcgtggtggcacatgcctttaatcccagctacttgggaggctgaagcaggagaatcgcttgaatccgggaggcagaggttgccgtaagccgagattgtgccactgcactccagcctggacaaaaagagcgaaacttwgtctcaaaaaatacgaaagacacagtttgaatctggctttgccagactgtaggcctgggctgttcccgacaggtcactgtctgtggtcagtggggggactgcctggttgcctagtccatccccacctgccactctcccatagcctcaagagcagcctccagaagactctgctggcaggggagactgtggacctctcaggcatcccgctgtcgacacaggacgtgcaacacatcacacgctacctgagcagccatggtgctgtgctggcggtgctggacctgagcttcacggggctgagtgatgagctgctgcacctcctgctgcccagcctgtgggcgctgccccgcctcacccagctcctgctcaacggcaaccgactgacgcgggccactgcccgcaagctcactgatgccatcaaggacaccaccaagttccctgctttggcttgggtggacctgggcaacaacgtggatgtggcttccctgccccagcccctgctggtcggcctgcgccggcggctgagccagcgcacctcactccccaccatctacgagggcctggaccttgagcctgagggcagtgcggccggggccaccacccctgcctccacctgggactccacagctgctgggctgggacccgagccccaggcctgctgtgccaggtgacccaccacccacctggctcattgctactgacttgtgatgctctcaagcacatgatagtgggcgatgaaggtcaaggaggactcacaggcccccagaaatccagtgtaaatgctcagcctgagattaaggggacagaagaatggactcataggtggccaggtggccagccctggctagaggctcagccttccctcagtgggaggggccccagcacccacagtgtggaccccgcaataaagagtgacacccgcctctgcttttctgcatcaccaacctcagggtcactgagcaacagccctgctgctggggtggggagaaagggtggctgtgtctatccaaaagggtgggacaaaggtcacactgaccttcccccaggtgctctttgggcaagtcccccatggagtctaagatgtgggggtcctgggtccatccctgtgggctggagagttagaggaggcctccagggagcgggccctcacatctgggcagggcttgggctccttgagaaggggagctgcgaaggagcgggtcgggagccccaggaggagcaaagctctacatggagccccacagcaagctcacgtctgagcccaggctgccagcctcaccaccacagccctctgggcaggggacaaggctgcacagaccagaggcaggggccacagccgactaagtgagaggacttggtgcctgcctcccacagggtacagtgctgcttgccaccctcaggacccagccccaggcctcttgtacttggcgaggggcagctctgtggggttaggagacagcaagccagagacaaagtgcttgtgtgttccctccaggccctgggggtccccgtgtgggagtccccgtgtgggagagcatgcagcgggtggaggtgcgcatcaccagcagcagggggccttgggggcagagtagtcctagggctgcccttggcagggggaagtgtctcccttcctccccaagcaccatcagggtgggctcccagccagaagcctaatgccacagtcaccctcagccctgtgtggggagttacagttcagcccaaccagaagacaggcagggcaggcgggaaaggaatttagagatgtccggggggatactgaggcccagagtggggaagtcatgtgctaagccaggaggtaaggtctgggggcagtggggccctgctagatgaggaaagactcagcagcagaggggggctccaaggctaaggaggaggcaggggtcctcctgggcctacacaccccagccaccagctctgactttccctcacagccatggcccacagggactgtaagcggcgcatccatcccctgtggtgcatggattccagcacattcccagtctggctggatgcataacagcttctcagggcaaaaggagatggccaaggagggtgaggacaggatggtgttgggtcccaggactgggatggaggcagtgaggaaaaggattttcctcagaccccactgatctcactgctttaggcggacttcttacccaaaggctttggagagattggagatctcacagttcaggcccgctctgctcctgacttgctgtgggacctggccaggcctttccctttttgggatctctgctccctcccctctgttaaataggactttcagctctcagcactccatcctggggtccagctccctcccagctctccttgttttagggactggccctgcccagcagctcagaagccatagaagtgtttccctatgcccctactctggaacagggtgttcaggctccccagagtgaggcaaaatggggtagatggtgggaggggccagcagagaggattatgagaaagtgaaagcttaaaccaacatacatttattctgtgagcaatctattatttaaatcaaaacggtatgagagccggccctgggccaggcaagctgataaacctgtcacataagcaggcctctgagctctccctgaaactcctgttggagaaatgccaagctctccagtcccttgcgccctgctgactccctgcccaccactggccctaagccagcccacaaactctcaattgtcactgagagattcctaccaggatggtgtgcgaggacccgagctggtgttccaggcaatctctgggagaatccaggcggcagcagatagtttcagtctctctgcctcttggacagaagcacacgatgcagtagcggagccagagcctgaaacggatcaagcggagaaggttggcctcattgccatgcaggtgtttagagccttcacgaccaccagcaaggctgtcgagggcagggccaccgagctccacaagtggcagcttgtggctcatgcagcctggtgaggcagagagcactggccaggacagctccagcccaagctctaaacggaggaggaagcaggtgggccatactcaggccggtcctcactcaggcctagtctaggaggcagacaggcctggccttggtcccagcctgtcacttgctggcgatgtggtcctctcagagcctgttccctcatcttgggaatgaggtacaccaagcctcccattatcccactggagtgagagtgaggatgacgtaagttttggaaagtgtctaccgcattgaggggaggagggcaggcactcttcaatgtcagcagggcctccacccagggctgtctgggtggcaatggcaggaactcaaacctttggggctaggccagagatgaagccatttttttattcaacaagcacttccatagcctcccttgggccaggtactgttctgatggccttatactcctttacttctcttctcatttgaaggaggtaggtgctctgttttccaggtgagtcgactgaggcagaaagaggttaaggggacttgttggccaggcggcgtggctcatgcctgtagtcccagcactttgggaggccgaggcgggtggaggtcagaagttcaagaccaggctggccaacatggcaaaaccccatctctactaaaaaaaaaaaaaaaaaattagtcaggcgtggtggtgggtgcctgtaatcccagctacttgggaggctgaggcaggagaattgcttgaacctggtgggcagaggttgcagtgagccgagattgtgccattgcactccagcctgggtgacggagcgagactgtctcaaaaaaacaaaaaataaagaaaggggattacttgtccaagttcaaagagccaggaactggaggagccagagtgtaagcccgggtggcctggtgccagtctgtgacgttaacgcctgcatgctgctccctctcctacagccatcccagggactatcactggggctgctcggccccaggattcacctaaatgagcaagccccttccaaaggggccatttgaagcaggagaaccatcatggtcctcctgtggggaacagacctcaagcctcgttgtccctggagcaaagccagtaaggacctccctggacctcagtttcctgatctgcagctacatggtggaagcagccatgatgatctgggctttgccctcccgcaggattgtaaaagactagcaaagagtgggtttggaagtacttcccagactgagcaaaacccaggcggcccaggctcaggggtgcagcatccacacccagctcttagaatctgccttcagctccctgggcctatagctcctcatgccttagcctgccttgcagggatgctgagaacatcttgcagggatgctgagaacatcaaaaggaaacacgtagaaaagatgatgtgctccacaggcccaacatgaccaagactcgggaacttcttttctgtcctaaaagggaggatatttgagcccaaataaggtgctttaggacatgagcccacaggagagatcagcctctgctgacggtcttcatctcgagaatccagagtcttgggcaactgatcctagctgctgctatcaacccagcatggaggtttttctctgggacctggaaggaaaggaaaatgcacttgttccacttagagctagttgccaatcacccatgaaatctagtattttcttttccaactatgcacaacttttttttttttttttttttttttgagacagagtctcactctgtcacccaggctggagtgcagtggcatgatcttggctcactgcaacctctgccccaccaggttcaaggcattctcctgcctcaggatcccgagtagctgggactacaggagactgctatcatgcctggctaatttttgtatttttagtagagacagggtttcaccatattagccaggccggtcttgaactcctgaccttgtgatctgcccgccttggcttcccaaagtgctgggattacaggcatgagccactgcgctcggcttgttttttaaaaatattttattttttaaaataacccttcattgaggtataattgaaacacaaaaagtagacattccgagcactacacaagattaaaatgtgcaatatgatacattttgcacatgtatacatctatgaagccactatcacaatcaagatagtaaatgtacctgtcaccccgaaagttttgtcatgcctcttggtaatccctccctcccgcctctccatgcccactgacatccaaaagcaaccattgatttgctttgttttttacagtttgcatttgtgagatttggggatatatggaatcatataggatatactttttttttttttttttaggtgaagtctcactttgtcacccatactggagtgcagtctcagctcactgcaacctccccctcccagattcaagcagttatcctgcctcagcctcccaggtatctgggactacaggagcatgccaccatgcccagctaatttttgtatttttagtagagatggggtttcaccatgttggccaggttggtcttgaactcctgatctcaagtgatctgcctgcctcagcctcccaaagtgctgggattacaggcatgagccaccacacccagccggatgtactctcttctatatggcttttcacttagcacaattatttagagactcactcacgtgtaccagtagttcctttttattgccgagtattgcactggacggtgtgccacaatttatccattcatctgttgatggatgtttgagttgtttccagtttttggctattacaaataaagctgctatgaaaattcatgtataagtttttgcatggacatatatttccttttctcttgggtaaatacctaggaatggaatgtggggatcataaggtagatgtatttttaatgtcttaagaaactgtcaaactgttttccaaagtggtggtgcagttttacatccccatcagcagtgtttgggagttcttgttgctttacatattcaacagcacatagcatggtgagttttttaaacattagccattcttctgggtgtgtagcaatatctctctggctttaacttgggcatttccctaatgactaatgatgttgaacatgttttaatgtgcatgtttgccatctgtatcttctcaagtctgttcaaattttttccccatgtcttattattgagctttgcaaattctttattttttgagacagagttttgctcttgttgcccaggctggagtgcaatggcacgatgtcggctcaccgcaacctccgcctcctgggttcaagcgattctcctgcctcagccttcctgagtagctggggttacaggtatgtgccaccacactgggctaattttgtatttttactagaaacggggtttctccatgtttctggtctcgagctcctgacctcaggtgatctggcctcggcctcccaaagtgctgggattacaggtgtgagccacggtgcctggccacaaattctttatatattctggatacacattttttattagacttagctttgccaaaatttcgtggttagtcttttaacagtgtcattggaaagcagttttttattttggtggtctaatatattagtttggtctttcatggatagtacttttggtattatatctgaatttttgcttaacccaaggtttagggttacatttcttctagaagttttatagttttaagtggatgatccatttggaattaatttttttgtatggcatgaggtatagacccaagttttgagggatttttccatacagatatccaattgttctggcaccatttgttgaaaatgctatcctttctccagtgcattacctttgtggctttgaaaaaactcattttgtatacatgtgtggatttgttttcagactctgttcctttgatctatttgct

SEQ ID NO: 98208 - DNA, 19775 bp, Homo sapiens
  misc_feature (1)...(19775): n = A,T,C or G
tgtgtggaatgttcacaggtgggaccaggaggggctaaggccagtgagggcatgtgcagcacttccctgacacccttagagctgtccaggagcgggtcctgagaaccctggttctgtcccctccacagtgtagtgggggaaggaggaagacaggcccacaccgtaaagctcccccagcccctcttgttctgagtggtttcttcaggttgtggttggactggaattgcggttggaggctggaagaaccaggtgtatgttaatcatggctcaggatagaatacgccagtttatttattctaccacagtcatggcagtgaggcttgagagacttgcttgctctgcctacctggggtagggtaaaggtggggccgcccaaggaggccatccacttcctctggctgtgggatggataggaagggaatggagtgggggaaacaggaaagatcggacagatgctgaaagagaacaagacacagacacagaaatgcaagcgattccctcctgtcctcaaccatctcaggtgtgtgctgtgctgctggggtggggaggctcacagcccccgtctctggggaatttgggtcttagggacgtaggaaccgagtcctaatatctctccccactcccacgataacctccaccaccccctccctcctcgcagccgatcctgcagagcacctccccctccagagcccgccctgtggagggcgcgggcgggagcgagctatgcacccgtctctgggatcgtcggggtacagggagggagagggcgctttctagggtccgcctccctttccttctcgctgatacttccgccgccccctactctgacaagcgcggctgtaattaggctgcggggtcccgggctctccgcctcactccggcggataatgagataaagtgtcagagacacggcgagaacaaagagacagagactcgctgcgatgtgtgtggggggggcgggggagcggggctgacgggctgttagagcctccagcagcccagccctcccgagagcccgcgcctccagggcccaggaagggagggcgtgtcctgtcacccgcgcaccccagccctccagtctctgggaccaaaaaacaatcccagagctcaaactcgagcggccgcacaactgggctgcacatctggttctctgtggcacagctggggagccaggacgccggaaggggcgcctggtccttgcgcctttgctcacaggccctcgcctgcttccttgtgccctttgttctgagttccggtgaccccggccaggtcccaaattctccgtcgcgctccttttccagagccgccgctgtccctccggccttgggcctccgccccgctcaccgagatgcaacgttacattattgcctccgctccgcctctccgccactctctgacccttctcctgcttctggtccctgtctctgtgaatttatttctaagcccccttccatctttggttcccgtctctggctcgtggcccatggggccgatctggaatacaggactccttgggttccggatcccatctctcctcgctccccacactttcccaccacgaggactcaggccacgctggcccagcggggtgagggaccgcaggagtcattagccgcagattaggcacggcccgggatcccgctgggactggactccaagcgctaacccgcaccaggatcccaatccgcgcgctggctgcacagagggtcaaaggcagcgggactcagcggatcgagcgtgttgcaggggccgtgggctcgggcgccccctggaggccgagcggcccccaagctcggggaagaggccttgggcaccccctgtcgggcagtgtcgaccctgcactcccggcgttcgggccgctaagttggtgcctggagtgtccgtccacgcccagcccgtcactccgccactcccgcctccaagacagtgggtcctgcagcctccactcttctggtgtgagatgggaccggagggcggagaggggacgcggaagctcctatctctccagccacaatcggcacccagggttcaggcgggttcctcttctggggttgggcatcctcagatgcctgggggccggggaggcgggggcttcatctctgcttctgggctgcagattcgagattgccctaagccctctgacccggcctgtcctagcctctggctgcccttctttctgcctcttgttctttctgccttctgtctgcttcctgtctctgggtatgtccatctctctcttccctattctggctgtgtctgtctgctctccctcttgctgccttccctacctggctttgtccctctgcatcggtttttctgtgtctctttgtgtctcgctccctccctccacatctctccatctcactgtgtctctctttactaatgcctctctttgtctctgtctttatctctgtctctccccaaccccactccccagctctattcctattctctgggttgctgcctctggggactgaagcagcccaacagggcagcccggagacgcctcggggcactgcccggggtcctcatcctggtcacctccacatgcccgtcaactccgcgcagcgttgatcttcccgctgcggctgtgggacgtggaggggcgcccggaaaggaagacacagggcccagcatctgctcgggagccccggggcccctgacccccctctgccattattaagggcgcctggtcccgaggcaccgagatgatcatgattgcatcagccagacagaagcggagccgggagctgcgcggtgagcgaacgagtgagacaaagccgcccgcgccatctgtttatgcaaagcgctctccgccggggaccccggcgtcccggctcctggccgggcttggggcaagggtcataagcccattcccacccggcgcccccaccgcgccttggcttcccctctcctcagcacccagagggccgctgggcgagcggaacggaaagggggcgggggtgttgatgtgattggagcggacgcggctgtttcttcaataatggatggagatgatgcggatggcgaagccgagctggccgggagaggagagaggaatagaaatggggaaaggaaggagtgggggcgggagactcaccccggcgcgcgcacacacacactcgcgcgcgcacgtgcgtcacactgtcattcggatacacgccgccgcgcggctcacacccaggcacacgcctacgcactgtcactgagacacacatacctgcaggcggagacgcgatggcaacacacactccccgctggctcttcctgattttcacacatacacagacctgcaggcggagacgcacggaaacgcccccacgcggaggcacacccgggcaaaatcacccagatgggagctggggacggggaagtggacaaacccgacagatatagacacactcaggggcacagacacacacccgggcacagagtcggacacacctggggctcaggtagacacacctcacatacccagggaacaaacggacacacactaaccacacgccggagatacagacgtccataattgccaggggcacggagagcccacccacacccactcagaggctagcacaccttagcatatgcaggagttgccatctgtgccctgcggggtggaatgtggcagggaggtcgtcagggtctccggagcaggccttgttagcctagcagtatgatgaggtcttggtgacaggaggcgcctggggctgtggactaggaggcccgtgcaccagggcttagctgtctgcaagcttccttgactggcccctagggcgggtagcgccgacgttgggctgcccctgagcagcagaccgggcggaccccactgacccaaatcgggcagtttcgtggagggagagcctaaagggaacactggagctgcaccgagagattctcaggatccccaacactgctgctggtggggtttatagaaagggtcactctgtactctgccttttccccccgtgctgcccagtcttccaacttcaaggggcacgtgtgtgtgtgtgtgtgcgcgcgcgcgcgctgagtagagtgggcagtggaggaggttggggtgccggttgtcttgtaccccagtaccggcccttcctcggatctgttttcaattcagtctgctccttggcccagacttatgacctttgcagcatgcggcagtatcatccatcacccaggcgccgtttagggggatggagggcgctgggagctcacatagggtcgctgtcacgcctgccgccctctctggggacctgctctccggcccgcgggccagggcttaagagtcttggtgagtaatgacgggagggtgtgaccgtggggctcgatcgggacactgggtcacatgtccccacccctggtaccctagcacccctccttctagttcagcacagcctgtttccccgcttttcccgccccccttctctcgggccctttgcttaatttcctattaactgctgataaatccaattaaaccgccgctctaattagggacagctgccggctcagtgaggctagggaggggggcgccccccgagtgttgggggagaacagccgctctccctgcttctcggcatccgcacaccagcattgccgcccaatgagccagtaaattggttttgccttagcattggcgggggtctctcgaggatctcggggggctctgattttgagtccctcagaccttgatgaatagagacgacccgagccctcgcggtccctcccctcatacattcctggtaggtggatttcaaggaaggataaggacagaatgcttgatttgcgtgtggttggtgtgtgtgtttgcctgtgatctgttcctattccagctcaatcgcgattaaagggggggtcttctttaatgactccgcccccaccccctcaggcatccgggaccgtcaagggcaaagggaacagaaaactgaacccggttctgcagagtcttcttgtgtgcttccctacccccatcacacctcagccttctggaaggggggcgcgcccgtcccaggcctcctcttccccagcccagctgagcctctgccctccccccgccagcagcagatggtgcccgggctcccgctgccaaccttgctaggcggtgccaacctcggtcctggcagacaacgggcagacgagaagaggagctcctggctggccaagccgaccctcccccacccggcatcgagctcaagaccccccccacacacgcctgccccactccagcgaccaccccagcctgcctctcactgggtccgctctcaggtccccaaactcctcgtctccttctgctcccttccccacaccttcctgctcctcgccacctgccgccctgaccagggccggcgtatttgcatatttgcatatgcaaataataacatttgcatacggtgctccgcaggggtgtctccgcgagagccggttagctgtctgccctccgttctcactcggtacctgtcggaaagggttagggcaggggccgcgcgggtggggttaggcccccggcctagctagctcggttctcggaggacttgaggaagtgttgccatggagacggcacgcaccccaccccctcccaggcccagggtctcgggcttggtgtctctggttgtctccccttacccaccctccaccccctccccatccctcgctctccaaccgagatcttgcatcgccccctggcggcctagctcggcgccaagccagattccgaaatgcaaggggctgcctgcggctaaatcgccaagagcaaggggggacttaccctactacaagatcctgctcccaaccgctggggcgcgggggcggcgactccagccctgcgctcccctttctttactgactacagaggcctcacctggcgggcgcacttcccacctcccgccaacctcagcccagatgggtctcaggttacccgatggtaacgaggcgggacagctagggaggattctccacccctccgcaggccctctcctcaaccccagttaaataacaacttttctaagttttgtcaaaagtttaataaattcgcaacattcgacagttcgccctccctcgcccccgccccccgccccagtccctggctcctcctagtagatacgcgtttttttccagctcttgcaagcggggcctgaaaggtttcgggtccgggctgctctgggcagcaggtatccgaggccccaggctggggaagggggcgagaaccagtcccttcccggaagccccgtcgcgctcaggcgggccttcctacccctcctctcccagcagtcccgttgctttcgcccccctccccaaactccactgggcccgcccagaatggggtgtgggtgtctcccgcttgcaggcgcccgcacrcctaaatttcytctagaaagtcggtgggaaacagccccaccttgcggccggtgtagaccttgacgtagccgccsgcttcgtctcctttctgcaccacgatctagaagattaaaggatcagaagtaggagaggaatcaaaggaaaaggtaggagaggacagcaggggagccggggtttacaggggctcaccctagtcttattaatggttaagctctccaaggagtgtggtgggctagggagcattcaggcctgggattgggwtggggcaacagcctacctggtccttcttgagagtgatctgccctatctcgcggttccccacgaaggatctcgtcacgcggtgcacacgttctccagcccggacccgaatgatgaagtttggagggaaaaatccgaccttctccccgattttcccctagggaagatagtagggagagtccatctctcaatgtcgggttctggactcaacccacactccaccctagccctagccatttctctcacccgccaccattcttcattggagtcatcaatgactgtgatcttctctcctggcctgggaggggaagggaggggcctcactcacatagcaggtcccctgctgtgccccgggtccagcatcaataggctccaagccctgagtccccccttttcctttcccttgggggaacccagctctttcctcttcactccgcagtaccagccccctgccccaaggcctctcacgggaaatccagatcgtccttctccagggctttgaaccgatagagagccacaaagtaatgagactgctggaagccaggctgcttgtgctgggggtgcaagggaatgatgagtcttagggctcctctaccccacactgaggggcaggattccaaggcagggacattcaccacacactctacactccaactctcttctaggtccctgaactgagagaagtgttttggtcgtgggtgggtgtgcaagttgatggagagtgtgggtcagaagtgatgggaagcctaggagttaaagagtgagcttctgccagggccatgagtagtggtgtcagagctgggytggggagagaactgggttccttgcagggaggaaggattcttaccttgtcatcaggtgtcttcttctcagccttcttatccccttcagggtttcctgggataggaaacaccaacaaattgtctgtctcctggagggcaattcttattctcttacccttttgtggaagggcctcgtctatccaaagckggcctgccctttgctcctccaccctctgttccacagctgagcctctgatcctaytccatctctggatggaggtgggtaacactcaccatcctggggtttgccttcctctggtctggccgactctggctcctcctccatcatggctgctacaggctggagggggcaccagagttagggagacgctgtcttgggaacacatgccctggctgtctataatcaggtcagagaactatagaataatgggatctcagagatctcagagttggaagaggccttggaggaaatatctagttcagccatctgcctaatgcaggaactttttttttttttttgagacgggtctccctctgtcacccaggctggagtgcagtggcgcaatcttggctcagtgccagctccgcctccaggttcacgccattctcctgccacagcctcctgagtagctgggactacaggcgcctgccaccacgcccggctaattttttgtatttttagtagagacggggtttcaccgtgttagccaggatgatctcaatctcctgacctcgtgatccaccagcctcggcctcccaaagtgctgggattacaggcgtgacccactgtgcccggccatgcagggactttccctaaaacatcctatcaggtgggtcacccacattctgcttgaatgtagctaaataacagggaattcactaccagattccaggtccttgactatgctgtcagcctttaaaaatactccagtgtgtaagtaaaaagtgagcagcatggtcaggcgcggtggcttatgcttgtaatcccagcactttgggaggccgaggtgggcggatcacctgaggtcgggagttcgagaccagcctgaccaacatggagaaatctcctctctactaaaaatacaaaattagccaggcatggtggcacannnnnnnnnnnnnnnnnnnnnnnnnnnnnnnnnnnnnnnnnnnnnnnnnnnnnnnnnnnnnnnnnnnnnnnnnnnnnnnnnnnnnnnnnnnnnnnnnnnnnnnttccggtgagccgagatcgtgccattgcactccagcctgggcaacaagagcgaaactctatctcaaaaaaaaaaaaaaaaaaaaaagagcagcacaatttttataattcccttaaaagaatataacccaagagtatgttagcccttctggaagcagccatatcacattgctagtgccttacaagtcattaattcactccatagaaatcccttatctgtgtccaacctccatatcaacaagtttgaggccagatttctagttgttttttgcagttgatttttttgatcagatatgtacatttatcttttcttttcccttccttccttcctttccttccttccttcctttttttttttttcttgacagggtctcactttctcccccaggctggagtgcagtggcttactgcaacctctgcctcccgggttcaagcgattctcctgcctcagcctcccaagtagctgggattacaagcgagcaccaccacacccggattttttatttttatttttgtatttttagtagagacagggtttcaccacgttggccaggcaggtttcgaactcctgacctcaggtaatctgcccacctcggcctcccaaagtgctgggattacaggcgtgagccaccatgcctggccgagttttgtgcaattttaggggaagacaatccattacttctgtcagctttccaaatgggaaaatgacctgctccatgggatctctgggagggacctcgtggggaggtacagtgctcacatttttcttatctgcctgtcccttcttccgttccttgtttgccatgatcaccccagtgcgcagggtttcaaacacaggatcattgcgattggcagcagctaatcgaatgggaggagaaagaagacattattgggaaggcagagaaaggcttggaggaaaggaagggagaggtgggattgagtagatggatacccatgtgtgtgttgggtggcggtgggggygccgcgggsaagattagggaagggtcagctaggcaatacccaggacaccaatctataaaggactttaaaaacatcactggtgatgtaaagtgagggaggaaagtatttattagaactccttccaggcagagcattatatgatgtttgaaacacaactttgcytgcttgggagctgagacatgcgcagaatcactattctccttctaaggagaatgggcccttaactgctggcttttgttctgctaaatggcatgtgtaagctgaggtgctgccaccaataggttcttctttttcacccatgctcttcacagagttcagcctctcctccaaataaatgttgagcaaatttgtcaatgaatatgtttttaagggttgccaaattattattattattattttttttttttttttttttgagacggagtctcgctctgtcacccaggctggagtacagtggcacaatctcggctcactgcaagctccgcctcccgggttcatgccattctcctgcctcagcctcyccgagtagctgggactacaggcgcctgccaccacgcccggctaatttttgtgtgtttttagtagagacggggtttcaccgtggtctcgatctcctgacctcgtgatccacccgcctcggcctcccaaagtgctgggattacaaacgtgagccaccgcgcccggcctgggttgccaaattatgaacctgcccagggtgcctgcagcctttgggtcttgccccgagtctgatatgactctgtagtaaggatgaggacaatctagaatccttgttcttgcttagaaatgattttgcacacaaagagcacagattctgaagctagcaactgaagattccaktcttggctctacctcttgctaactgtatgtagttgcaactaaatcgtatctccctctgctgtaaaatggggatattgcctctgcatccaaatggatataaaaatgtgaggttgagggagaattatgggaaacagaaagtttctgtttcagaatttggctcccaaagctagagatggcatgaaaccatctctaggcttgcccattccctcatgttccataaagggcacttacagagatctttgacacaagcgtactgctggttgctgtagagtggggaactataggcccgatggaaaccaggtggctgtaggatgggatgagaggaagcattagaggtagcaaagtaaggtccagaagcctatctctcccaggagtgctcaccctttctcagaaaaagagatgggctgagaaagaaaaagcagagaaatgaatgggatggaggagagaccagcaaggggtagctggctggtgacatgtcccctctttttttttttttttttttgagacggagtctcgctctgtcacccaggctggagtgcagtggcacaatctcrgctcactgcaagctccgcctccckagtttacgccattctcctgcctcagcctcctgagtagctgggactacaggcacctgtcaccacgcccggctaattttttgtatttagagayggggtttcactgtgttagccaggatggtctcgatctcctgacctcrtgatccgcccacctcagcctcccaaagtgctgggattacaggcgtgagccaccacgcgtggccatgtcccctccttgctctccacagcctactcacgatcttgccgaagcatctctgcatttccacataggactgacagtgttcatggatgttggttttgcagttcttacagcgaagcccaaacttgttgttgacttgggaaagggggagaaaattcagataaggttccagattgccctttccctttgtaccactgctgctactcttaggtttccttttctgtctgggaccctacttgctcaatctctaatagcattgccttacaccaactctagccacagcccatctgctacaaatactcctctcctatgccctctccccaaacctctgccttcaatatcatactctcttcacttcccttcatgactcacgaacaatcatccgggcacagacatcacagaactttggcttcttgaagaagtgatctttgaatttgtggggcttatcgttgaccagcttaggaggttctgggggtggctcctcctcctcctcttcttcctcttcctcttcctcatagatgtagtagatgggcccacccccagctcccactgcctccccattggcctggggctctgggggaagttccatctcctttgtccctgtagaacccttcctgagtaactgctttagccgctgtagctgagggagggagtgaagaaaacccaatgttaaaaggacttgtcaccctctctagagtaggggggcgctagagcaaactagacagttttctagtttcaggcaaggaatgtaccccaggattaggggggtattggtattggggactgcaggtgctggccagcaaaaaatgagtcacacacaaatgagatcaatttaagcactcttcttcagctgtaatggcttcccagccccccacacccagtggtcagaggcccagactcaccccactttgccgagtctctgctgggaaggagggcttaggggactccagcacctccttttctgtcatcctgcaagaggttggaccccactatgaaatctaatccctttcattcttctctccctttctgtcccttgcagtagggtggtcctcaaaggggaggctttcggagaaatgtgatgagagattttgctgttgttactgttgagatggggtctcactctgtcacccaggctggagtgcagtggcgtgatcatggctcactgcagcctcgacctcccagcctgaagcgatccccctacctcagcttcctgagtagctggaacacaaggtgcgcactacctggctacttttttattttttgtagagacatggtcttgctttgttgcctaggctggtcccgaactagctcaagcaatcttcctgtttcaacctcccaaattgttgagacaggcgtgagccactgcactgggccaaatacagatcctttggcaggttttattaacagatttcatggaggtctagaaaaaagcttaacatggccgggtgtggtggtgcatgcctgtaatcccagcactttgggaggctgaggcaggcggatcactagagatcaggagttcaagactagcctggccaacatggtgaaaccccatctctactaaatatataaaaattagccgggtgtggtggcggacgcctgtaatcccatccactcaggaagctgaggaaggataatcgcttgaacccgggaggcggaggttgcagtgagccgggattgtgccactgccctccagcctgggtgacagagcaagacttnnnnnnnnnnnnnnnnnnnnnnnnnnnnnnnnnnnnnnnnnnnnnnnnnnnnnnnnnnnnnnnnnnnnnnnnnnnnnnnnnnnnnnnnnnnnnnnnnnaactgatactcatccttccatcctgaggggcgaccccatagtttacagcccttacacagtgttcaaagctgcgtggtttacgtcattttcctataggtactttgtttctcctggaaatctgtgggcaacagagatgtgatgcataccttcccagatctcctctcttcaagaggtttaatgtgtgtcctcgtgtgcacacaaggaaggatggactggagacatttgtcctcccctacttttttcttgagccctgggggccctgtgcctagttctgtcccagcctgcctcagggctcagctattttaagttttcagggtaatatgagcctttccttcccttactacttcattcccttcaccccacccccacccccaccccccgcttcaatccaaactcatcctagagtagaataataattttacgcctaaaacccaaaagactcacagacaaggagagaaatgaagaagctgagtagattatagatcagggcagctggggtgagcagtcgtggaaatcaagaggatgaagagktaacttacgttcgggattccctaagtcagtccacaggctgtagagggagctgggagcctcgaggccttgatggtggtgctggggaaaaactggtcctcttccttgggggctaagcccccccagtaccccctgtgttcacaccagctacccagtcgctatttgtagacctcctagcctcctgccttggtgtcagggctgaaatgacagggctggaggaaagtggacagctgagaaacacagctgacacagagaaattggacactgagaggtctggggcagggccggaccctaactcctcccaaccccctagagctgctgttccttgattcttcatctaaggcgaacaggtgaataatggctgaattcaggaagggacagtttctgttcatgctcatttaacatttaaggggagtttatttttatttttcatttattttttgagacagggtaaaaaaagactaatttgaactcatagagctctcctatcagccatactagatggcttttttttttttttttttgagacagagtcttgctcttgttgcccaggctggagtgcaatgaagcgatccgggctcactgcaacctcccaggttcaagcgattctcctgcctcagcctcctaagtagctgggattacaggcgcccaccaccacgccaaggtaatttttgtatttttagtacagatggggtttcaccatgttggccaggctggtctcgaacccctgacctcaggtgatccgcctgccttggcctcccaaagtgctaggattacaggtgtgagccaccgtgcatggctagattgctttttatctgtaggtggttggaggagtactttgctatcctgtaagaaagtgaagaatatgtagtattgcttcattccctccagcagctcccagagacatctccccaccctccttcttgtaaaattttgtcctcagactgaagggaattaccagggctattaaaaagggccagttaacactggacagaagcatatagctgccacataaggaattttttaaatcatttctaagtaatgtccccttcctcatgagaactgcaaactcttaaaggtaggatggccaaccctcacacttcctaaacccttttgattccctgattccatctcccacctttgatgcctcagtatataactgatggatcaaagagacagatgccattctcatctcacaggggtgcacccttctactctttgggctgtgacatggatgaaagaggagatactcccatctcaggggagagcaatttagaggtggcaatgcagtgctgctctattccttgtatctgtaagaaataaaggactgtgttggagactgggtcaggcaagctcctgtaggatcgtcgttagggatacagctacttggacccaagagatttccagggcaacgtgctttgtcattctcacccactacttttttctatttaaggggggagtttgaaaagggggtgcaggatggttctgactctgcaggttctttaatggccctgctctgacaggctgcagaacaacagggcttgctttgagatgctctaaaggaaaagctccatcttgcaggcaagatgacttctgctcttcgtcttttttcagccacataggacagggactgctgagcatgtttggataatacagcatcttggcactgcgagttcagttgctgtagctttcattgtaataaaaatctgcttctgtccctgacaggtaaaacccaatcctccagctttaggattaaagaaaggcagccaggcacggtggctcacgcctgtaatcacagcactttggaaggccgaggcgggtggatcacaaggtcaggagttcgagaccagcctggccaacatggtgaaaccccatgtcaactaaaaatacaaaaattagctgggcacgatggggcacagctactcaggaggctgaggcaggagaactgcttgaactcgggagtgggaggttgcagtgagccgagatatcgcgccactgcactccagcctgggcaacagggcgagactccatctcaaaaaaaaaaaaaaaagaaaggcccaagttctccatccctannnnnnnnnnnnnnnnnnnncagcctgggcaacatggtaaaaccctgtctctgccaaaaatagcaaaaaaaaaaaaaaaaaagtttagccaggcatgctagatcgcgcctgtaatcccagctactcgggagactgaggcacaagaatcgcttgaacacgggaggcggctgcagtcagctgagatctgccactgcactccagcctgggtgacagagcaagaccctatctcaaaactcaactacaagggccctaaatgagtacacagtaccacagaattaatagtctggaaggaaacctagaggtcacctactaagtccaagtctcttattttactgatctggacacagatccagagttgagaagtgatatgctcgatgaaccacagtggcagaaccgggagagcccaaagccatggtcccattagagatctagccatctatcagaaccgtgtacagggaagaggatgagacagagggaatggtgttaaaatagtgtgcgtatgctagagaaagccatcccaacccacgacaaacacctccaacagctgtagggctatacctacccagggcctccaaccctttacccataccagggcggcaacagagaaacagtgactgatgtccagtgacagatttttttttttatatttaaaaacaaaaccaacctccccccaaataacccccaaacaaacaaaaaaacagattaaataaaatttacagtgaatatacccagcaaacatctgtatgtgcaattaaatactgtgtctgttactgcggcacgaacctcaaacaaacaatatacaagtgttctgggggggccaggggaatcccaagttttaactctgtggggtctaggaagacaagatggggaagtgagagaatggggcaatcaattttgtttatcttaattctgtccatataaatatattcataaagaccaaaaaaggaaaggaagcttgggatgttaaggtaataggaggacagtgtgggactttcccaattctacctgaccaaaaaatgagaaattaattttatgataggagaagagatttaaaaaaatgatagaagaggatggaagccaggcacagtggctcacgcctgtaatcccagcactctggaaggccaaggcaggtggatcacctgaggtcaggagtttgaggccagcctggccaacatggtgaaactccgtctctactaaaaatacaaaaattagccgggcatggtggcgcgtgtctgtagtgccagctacttgggaggctgaggcaggagaatcacctgaacccaggagctggaggttgcagttagccaagatcgtgctactgcactccagctggggtgacaagagcgaaactccgtctcaaaaaaaaaaaaaaaaaaaaagaagaggatgggaagaagagtgatgcaaggggggtcaaccagggaaaaagagaggacccatggcaggggagcaagaaggagtccaatgccagtgtaggtatctgtgtttccatcttcatcactgtcttaggttccagtttaacatcagtttccttacttcctgcctctgtccatggtctgtcaggatccttcaaccccctccaccctgcccttgctccttctgtgacagtccctttcccctcctccatttattgggagctggctcgctccaggatcctcaggtcatagttctttttggccattcgaagtttgaagcgactcacggagttgttgagacgaagggaggcattttgggcagccagggggctggggaacacagccacaatggtgtacaaggcagcgaggtccgagtggcggccattctcagcagtcccactgttgtcccccccaccccctccaggcagcccctgagcatccttgagccactggatcttggcgccagacatggcgagctgcgtgaagagtttgtccgcctcagtacgggtgatgccctcagggagatctgtcacctccagcacccgccccaggactggaaggggaggagagaggacatggttgtgagaggaataggacaggaaggacttgacagcagcccagcagagaagtgtccagctgactaagtctgtatacaatgtcttcaaaagcctggcctttctctcttagccctttcttcccctccccaccatcccagctctgatcagggcaactaggagaaaaacaaatgaacctttctattctcctagcccagagatgcaggaaagaagggacagggaatcagaatcctgggtttctgagctaagaacctatacctcagttctctcacaaggtgctactgctatgaagaaaatgtggcttttgctaatgttctttaacaataatgtatcaatctgaaatatgttccatagttcccttcccactcagaggctggctcaaatagattcttccttcttatcatctcaggaagtcaagtttcccttcctttccttgtttaggaaattgctccaaatcccaagacagatcttgttcacctagtgggaggcttgtaggacgagagttcctcccccatattctctaccaatcttctcctaaactgggtctaggactaccaaaggtagatgtcgtagattagggacaggacactaattagaaaactctttgttaataagaggcaactcccataattgtgttattcccactttttaccatgatcttcctcagaatctgagatggcttggtagggaggactgagatacttcacttctccagtttctgcttgcttttgagcacaaagggtcccacttccactccccatcctaagctggcttttcccacccatgctggactggtaattaagcgctggaagggtgggcaccttctcttggggattcagcatcccgtgactcaccaacatctgctgtccccaggtcagtggaggcagatttgagtgcttgtctcttgccccggtttccatgtttcagtccactctgtcccttcaacatttgaaagacgactctcatcccatgtaaacaacattgactgccttgcatcagaatgtctgcctgagagattgtggagtagcaccaacccagaggaccccaccccactaggcagtcaggttggccatggagcagcgactgagaaacaaagagcccctccctcttggcatgggggtcgggtgggagacatgagtataggaggtagggcaaggctcctgctttgttcattctgtgttatttcccttgtatacccagctggttgaagctcagacacaggcacccaaataagaagaggggtctgatggccctacagttgctggtggacacccttacctggtgcaccgtgtaagttgactggccatggagcaagggagggcagatggacagattgtactgtaatggctggcccaaaagggagtagcgcccatcacctagggagtaagagcaattggttttctgggagcttaagcttcatagtatgacttttataagacttcaaggggctttggagacagcaacaatgcatactattcctaattttctatgatggaaatgcccatgcgactggtataagagttgtttctcttcctaaatcctttggctctcaactgtgtctcacagataaatgggactactaggtcccatcatccttgaagaaaggctctatccactgtagacaacagtcctatgaaaatgaccagggaagaaacttacagacccttatgaatgtcttttatctctctttttttttttttttgagacagagtttcactcgccacccaggctggagtgcaatggcatgatctcggctcactgcaacctctgcctcctgggaagcgattctcctgcttcagcctcccgagtagctgggattacaagcatgtgccaccacgcctggctaatttttttttgtatttttagtagagatggggtttcaccacgttggccaggcagtcttgaactcctgacctcaggtgatccgcctgccccgggctcccaaagtgctgggattacaagcgttagccactgcgcccggctgtcttttatctcttatatagattctcccaacccctaaacccagggttcaagtttctgactcatgtgagaggcagtataagcacagtagacaagagcatagtcgtggagccagactgcctgggttaaaatagtggctctgttactggaaata

SEQ ID NO: 98209 - DNA, 44044 bp, Homo sapiens
agctgggcgtggtggcaggcgcctgtaatcccagataggaggctgaggcaggagaattgcttgaacccaggtgtcggagagtgcagtgagccgagattgtgccactgcagtccagcctgggtgacagagtgagactccatcttaaaaaaaaaaaaatgctgaggccctagagctacatggagaccgggtccaaatctcctgccaccactcaagctgcgtgtccctggcttcttgctttctgcagctgaccaagccctctaatctgcaactgggataatacagcgcctgcctccaggaggaacagtaaggagtggatgggatgaagccctccaccctggccacaggtggtgtctgtgggtggcagagctgagattcccccaccttggaccccagtgccgacacttgccattgtaccatgccacctccctgccccctgagactgggcctgaggaagccacagcccctcccatgtgccctggcccctctgggctcccatggaggatggtgctgctgggtcacctgctttgggctctgccctcagactcccttcaccccaaggtgtgccatcctctccattccaccaaggcctgtccaggcctcgcttgcttaatccatagtcttcagagccacctgtcattaggcagggcaagtgggagccgcttcatggtgatcttggagacagattttcaccatcaaccactccccatcagctcagctctgagaaggtacaaggtgttttcgttttgtataattactattgtgggccaagtgtggtggttcatgcctgtaatctgagcactttgggaggctgaggcaggggatcacttgaggtcaggagtttgagactagcagggccaacatggcaaaactccatctctactaaaaatacaaaaattagctgtaaatggtggtgggcacctgtagttccagctactttggaagctgagacagaagaattgattgaacctgggagttggaggttgcagtgagccaagattgtgccattgcattccagcttgggtgacagagtgagactctatcttaaaaataaaataaaatttatttatttttatttattttttttttgctttaaaaattctttaatttgatacagtcaagacttcatatataacttctagtttacaggaaatataggtgatatacaggttatacactggagaaatacagggaaatacaacacgaagaaaaaaatcagataaacccagaagaagagttctaaagaaaaattgacctggtctatcaacatgacaatgtcaaaaatgggggaggggagacaggagatggcatctatgctaatttacagagattaagaaacataaaggccgtggtttttttttttttgttttttttttttttttgatcattcttgggtgtttctcgcagagggggatttcgcagggtcataggacaatagtggaaggaaggtcagcagataaacaagtgaacaaaggtctctggttttcctaggcagaggaccctgcggccttccgcagtgtttgtgtccctgggtacttgagattagggagtggtgatgacacgagcatgctgccttcaagcatctgtttaacaaagcacatcttgcaccgcccttaatccatttaaccctgagtggacacagcacatgtttcagagagcacagggttgggggtaaggtcacagatcaacaggatcccaaggcagaagaatttttcttagtacagaacaaaatgaaaagtctcccatgtctacttctttctacacagacacggcaaccatccgatttctcaatcttttccctacctttcccccccttctattccacaaaaccgccattgtcatcatggcccgttctcaatgagctgctgggcacacctcccagacagggtggtggccgggcagaggggctcctcacctcccagtaggggtggccgggcagaggcgcccctcacctccaggacggggcggctggccgggcgggggctgacccccacctccctcccggacggggtggctgccggcggagacgctcctcacttcacagacggggtggctgccgggcggaggggctcctcacttctcagacggggcggctgccgggcggaggggctcctcacttctcagacggggcggccgggcagagacgctcctcacctcccagacggggttgcggccgggcagaggcgctcctcacatcccagacggggcggcagggcagaggcgctccccacatctcagacgatgggcagccgggcagagacgctcctcacttcctagatgggatggcggctgggaagaggcgctcctcacttcctagatgggatggcggccgggcagagacgctcctcactttccagactgggcagccaggcagaggggctcctcacgtcccagacgatgggtggccaggcagagacgctcctcacttcccagacggggtggcggctgagcagaggctgcactcccggcactttgggaggccaaggcaggcagctgggaggtggaggttgtagcgagccgagatcacgccactgcactccagcctgggcaacattgagcactgagtgaaccagactccgtctgcaatcccggcacctcgggaggccgaggctggcagatcactcgcggttaggagctggagaccagcccggccaacacagcaaaaccctgtctccaccaaaaaaatacgaaaaccagtcaggcgtggcggcgcgtgcctgcaatcgcgggcactcggcaggctgaggcaggagaatcaggcagagaggttgcagtgagctgagatggcagcagtacagtccagcttcggctcggcatcagagggagacggtggaaagagagggagagggagaccgtggggagagggagagggagagggcaataaaatttatgtatatataaattattattgttgctgagcaaggtggctcatgcctgtaatcccagcactttgggaggccaaggtgggtggatcacctgaggtcaggagttcgagaccagcctggccaacatggtgaaaccccatctctagtaaaaatacaaaaattagccaggcatgatggcaggtacttgggaggctgaggcaggagaatcacttgaacccggggtcggggggggtcagaggttgcagtgagctgagattgtgccactgcactcagcctgggtgacaagagcgaaactccatctcaaaaaaaaaatattactgttgttggttttttctctcttattattttttaattaaatttaaaaaagttttggtcgggtgcggtggctcacccctgtaatgccagcactttgggaggccaaggcgggtggatcacaaggtcaggagatcgagaccatcctggctgacacggtgaaaccctgtctctactaaaaatacaaaaaattagccgggcgtggtggcgtgaacctgtagtcccagctactcaggaggctgaggcaggaggatagcatgaacccaggaggcggagcttgtagtgagctgagatcgtgccactgcactccagcctgggcgacagagcgagactctctcaaaaaaaaaaaaaaatttttttttgaggcagggtctttgtcacccaggctggagtgcagtggtgcaatctcagctcactgcagcctccatctcctgggctcaagggatcctccctcccaatcccctgagtagctgggactacaggcagacaccaccatgccaagctcatgtttgtttgtttgtttgtttgtttttgagatgcagtcttgctctttcgtccaggctggagtgcagtagtgcgatttcttccaggctggagtgcagtggtgtgattttggctcactgcaagctctgcctcccgggttcaagcgattcccctgcctcagccacctgagtagctgggactacaggcgcccaccgccacacccagctaatttttgtatttttagtagagacggggtttcaccatgttggccaggctgtctccaactcctgaccttaagtgatccgccagcctcggcctcctaaagtgctgggattacaggcgtgaacctcttcggccagcctcccagcttatttttgtattttctgtagacacgaggctttgccctgttgcccaagctggtctccaactcctgagctcaagtgatcctcatgcctcagcctcccaacgtgctgggactacaggcatgagccactgtacccagactattgttttttactaaaggagacttactagaaaactgacaaaatccaggctgggcgtggtggtttacgcctgtaatcccagcactttgggaggccagggtgggtggatcacctgaggtcaagagtttgagaccaacctgaccaacatggtgaaaccctgtctctactaaaaatacaaaaattagccgggtttggtggtgcacgcctgtaatcccagctactcgggaggctgaggtaggagaaccacctgaacctgggaggcagaggttgcagtgagctgagatcgtgccattgcactccagcctgggcaacaagagcgaaactcggtcttggaaaacaaacaaacaaaaaaacctgacaaaatatcaaagataattataacccttaggggtctcagatttctcttcctcaggaaatggcaagggggtgcgggagaggggccatccgctttggctggcttagtttcctttccacaaccctttctggagaaacactaaatgccaccattttttggtccttggcctggaaatttccctatctgcaccccctgcgctgtagcttaggctattcagcagagatctgcaggctccagcgggcgtcggacttacagaggcaaatgtgaccatgtaaattcccaggcccacccgtgacagagagcctctgattcagcaggcctcctttgaggctggggattttaaacccgcgtcccgtgattgggatggggattgagggctatattcagcgcctggccaccagagggcgcagcgggctgagttcagcggtacccctttgagatcttgtgtctcaagacaggttgctgtcatcaaggatttgctggttagacaacaggcaaggggtgagctgggtcctcttgggcaggagcctagtaggaagaccgacaacaggaaagaggctcacatctgatactgggcacatggctgggccttggtcctcgtgctcctggacttcagagctcagaggggccagggcctggcctagcctggaatctggatggacctcttctgccctggggcgcgccgtttacccaatcctgacctcagagagcgtctgtcgttctggtgggaaaaccgagacccagacaggaacaagggctcagtggcaaccgctctgcctcccagcccagggctctgtcttgccggggctggggcacagggtggaccccaggaagttctgctatgagtcagcttcgagtgctcaggggaccggacagaggctgctggccggggaaggatgccggccggcggtacctacttccgcagctgtgggtatccctgcctggtgattcagcttccctctgagggtccccagggggcgccgccctggactgggaggctggggaggatgctggggctacggaggggcgatggaggtgccttaagggaccccgtaatccagctctgctggatgctgaggtcccacgagataattgtggccagagatcaggtgggcgtaagactggtcctaggatgggggctgtgggcccctcctcactaccctgcttcttgaagatagcctgggcggctgtgcgggataccccagtgtctccagcaatgcgcgttcatctccatggagggctcgccttggcgctgggtggggagcgacttggtcccccctggcggcgaagagaggctgaccacgccagctcgtgggggggtctactgggcagatgcgcaggccccgggcggaggagggctgatgggggaaatgccaggccgatgggggaggggctgtgagcgggaggcgttggggcggggcaagaccgccctcccggtccgggggcggggcttggcctggggcggggcttggctggggtgctcagcccaattttccgtgtagggagcgggcggcggcgggggaggcagaggcggaggcggagtcaagagcgcaccgccgcgcccgccgtgccgggcctgagctggagccgggcgtgagtcgcagcaggagccgcagccggagtcacagccgcagccagagccgcagccaaagcctcagagagcaggagttggagcgcaggccctgctggatccgcgcctagctcgccgccaggcaccggccggaggacgggccgtggtgtcagctcactgcccgggcgctgtgggaggcagcgagcccgcgaccccccgggccgggcaccgccaggcgcggagcccagatcgcccccctgccaggcctggtcacggccagagcacgcaggagttcccagggtctggatctgcgcgcaccctaatgacctggggactgaagagaaaaaaggaacgaggatttcatctaaaagcataacgtgggcactaggcgaggaggaaagtggagaccacctggcacggggcagaggtgcctggagcccacgcttgagcatcggagaccctggcatcctagcagccgcgaccttggctctgccctgtctgagctggaaacacagcttagcttctagacatcgctggcacaggcctggcacaagtaagcagtgtyctcacctgtctgaaacgggacacggggtcggaggaaccaggatctagcctggccccaagcggaactctctggtggcccagaggtcgtcactggggagcccgcctcctgccctagcctcactggtgcggatgtgccgctgcccgccggagcaccatgatggcaggatgacctcagccgaagtaggagcagcagctggtggtgctcaggcggctgggccccccgagtggccccctggcagccctcaggccctccggcagcctggccgggcccgagtggccatggcagcactggtgtggctgctggcgggagccagcatgtcaagcctcaacaagtggatcttcacagtgcacggctttgggcggcccctgctgctgtcggccctgcacatgctggtggcagccctggcatgccaccggggggcacggcgccccatgccaggcggcactcgctgccgagtcctactgctcagtctcacctttggcacgtccatggcctgcggcaacgtgggcctaagggctgtgcccctggacctggcacaactggttactaccaccacacctctgttcaccctggccctgtcggcgctgctgctgggccgccgccaccacccgcttcagttggccgccatgggtccgctctgcctgggggccgcctgcagcctggctggagagttccggacaccccctaccggctgtggcttcctgctcgcagccacctgcctccgcggactcaagtcggttcagcaaagtaagtgcctgggtggccaattgagaaggtgggggtccgggtgggtgcatggcctggatggccctgtgaggggtatggctgttgtcccattttacaaatgaggaaactgaggttcatggctgtggargaagcagaactgaggctcagagagggccaacagttcagtgagttccaggccccagactcaggctctggaggcccaactcgtgtttatttgtttatttacttatttagacagggtctggctctgtcacccaggctgcattggtgagatctcagctcaatacagcctccgcatcctgggttcaagtgattcttctgcctcagcctcccaagtaagtgggactacaggtgcacaccaccacgctaagctaatttttgtatttttagtagagacagcattttaccatgttggccaggctgatcttgaactcctgacctcccaaggtgctaggatttcaagcgtgagccaccccacctggtcagctaattttttttttttatagacacagagtcttgctatgttgccaaggtaggtcttgaactcctgtcctcagcgatcttcccccctcagcttcctgaagttctggaattacaaaccagtatttagtgatagccagtgatctgtgtttgactagccttttatctcactgtattgttcccatttgatagatgaagaggcttgccctgggccacgtggccagtgagcagcagaggcaagatctaaacccagatagtcagactccatgcttccaagagatgtggcctgaggctttggacacaaaggaaagccagaaagcatgggccagggagagaaaaggagggtctgggatgagctgggatttggaaggtcaggggtcaggtctaagtctggggagggctgttgtttactgggagctacagtgtgacaggcttggtgctgagtgttgaccttgagttgtcatggcaaccaccaactttatccccattttacagatgatgggactaagacccagagaagttcatgatttgacaggctgggcatggtatctcatgcctgtaatcccagcactttgggaggctgaggtgggaggactcttgagaccaggagttcgagaccaccctggccaacatggtgaaaccctgtatctattaaaaatacaaaaattggggccgggcgcggtgtctcatgcctgtaattccagcactttgggaggctgaggcgggtggatcatgaggtcagaagttcaagaacagactaaccaaggtggtgaaaccccatctctactaaaaatacaaaaaaattaaccgggcgccatggcaggtgtctgtaatcccagctactcgggaggctgaggcaggagaatagcttgaacccgggtggcagaggttgcagtgagccaagatcgccccactgcactccagccaaggcgacagagtgagactccatctcaaaaaaaaaaaaaaaaaaaaaaaattgggccaggcgcagtggctcacagctgtaatcccagcactttgggaggccgaggcaagtggatcacctgaggtcaggagttcgagaccagcctggccaacatggggaaaccctgtctctactgaaaatacaaaaattagctgagcgtgatggtgggcgcctgtaatcccagctactcaggaggctgaggtgagagaatcgcttgaacctgggaggcggaggttgcagtgagctgagatcacgctattgcactccagcctgggtaacaagagtgaaactctgtctcaaaattagccgggccaggtggcatgcacctgtaatcccagctactggggaggctgaggcataagaattccttgaacccgggagaaggaggttgcagtgagctgagattacaccactgcactccagcctgggcgacagaatgagactctgtctcaagaaaaagaaagaagttcagcccagcgcrgtggctcacacctgtaatcccagcactttgggaggctgaggtgtattgggggaaattcagccagatatcgggcgaaattcacccctgatatttcacgtaggttcttttctgtattacctaagtgtcagctggtctgagaaataaagggacagagtacaaaagggagaaattttaaagctgggtgtccgggggagacatcatatgtcggcaggttccgtgatgccccctgagccataaaaccagcaagttttgattagtgattttcaaaaggggagggagtgtaccaataggatgtgggtcacagagaccacgtgcttcacaaggtaatagaatatcacaaggcaaatggaggcagggccagatcacaggaccataggaccggggtgaaattaaaattgctaatgaagtttcgggcacgcattgtcattgataacatcttatcaagagacagggtttgagagcagacaaccagtctgaccaaaatttattaggcgggaatttcctcgtcctaataagcctgggagcgctatgggagactggggcttatttcatccctacagcttcgaccataaaagatggccgccccccagaagcagccattttagaggcctaccctcagggacgcattctctttctcaaggatgtcccttgctgagaaaaagaattcagcaacatttctcccatttgcttttgaaagaagagaaatatggctctgttccacccggctcaccggcagtcagagtttaagattatctctcttgttccctgaacattgctgttatcctgttctttcaaggtgcccagatttcatattgttcaaacacacatgctctacaatttgtgcagttaacgcaatcatcacagggtcctgaggcgacatacagcctcctcagcttacgaagatgatgggattaagagattaaagataggcataggaaatcacaagggtattgrttggagaagtgataagtgtccatgaaatcttcacaatttatgttcagagattgcagtaaagacaggcgtaagaaattacaaaagtattaatttgggaaactaataaatgtccatgaaatcttcacaatccacgttcttctgcaatggcttcagctggtccctccgtttggggtccctgacttcccgcaacagaggtgggaggatcacgaggtcaggagatcaagaccatcctggccaacgtggtgaaaccctgtctactaaaattacaaaaattagctgggcgtggtggcgcctgcctgtaatcccccctactcgggaacctgaggcaggagaatcacttgaacccaggaggcagaggttgcagtgagccgagatcacgccactgcactccagcctagggacagagctagactccatctcaaaaaaaaaaaaaaaaagaagaaagaaagaaagaagttcatgatttgcacagaggtcacggggtccctaatgatgtgaagcatggtctatgtgactccagatgctggctctgatgaaagagggcagcagggctctgggcagtttagggccgaggctccaggcccagacccactagatcattctgcctgagggcgaaggctggcttcctgcctttcctactgaggggcatctgagtcgcagcctctatcctctctctgcctcaacccaaggagacataggggaggccagggtgcccactcagggtggggaggcctgggttccagccatacctttgctcatatttgctgggcaaccttgggcatattgggattttatctgggcctcagtttcctcatctgtcagtggaggagagttggagttgatggagtccaaggggcctcttgctctcccttcgccctgagatcctgtgacccaggcctgggagaaggaagtgggcacaccaagagtgctgggctgggattgatgacagcccacagccagggaagattgaagtcagagttcagccctgccctggcgtattcagagctgacacagaggccctatctctatcctccctggctccaaggcagggtcaaaacccagttctattttttgccctcaggttacatgagagctagaggctgagcacaggcatgagctctgggcatgagtctgcactgggaaacctgacctgtgggcacccctgtgcaggccacagggctgtgaaggtcctaacctcaaggcccatgctgcccctgctgagaaacagtcagtgcttctcacactgggacccaggcagccccagcctgcaggaggggcaatggccggccaggcctcaggcacttgggcatggagtggcatgtgcctggcatcgggctgcatcttgactcctgccagctccctccttccctccctccctagtcttaactcctgacccctgggaggttgagtccttgctctgggctcctgcggtaccctctgctccccctatcatggttccaaatgccatgtatgatcaccacctggttacctgtctgctgcctgccagacagatttggggcaattctatgttcctggaacctagccctggggcctggcagaggatacataatttgtaaattataatttttaaattttattttattatttttttttttgagacaatctctctctgtcgcccaggctggaatgcagcagtgcaatctcggctcattgcaacctctgcctcctggtttcaagcaattcttgtgcctcagcctcctgagtagctgggactacaggctcatgccaccgtcctggctaatttttaattttttttttttttttttttttttagaaacaggctcactatgttgcccaggctggtctcaaacccctggcctcaagtgatcttccctccgggcctcccaaagtgctggaattacaggtgtgagccaacatgccgacagatttactgatggctctgacaggcgagctgatctcatagactggttgggctgcctgattcaggagggagtttagggggctagaggccccactaacagagataggagccctgcagagatggggaggaacagacttgagccagggcctgagataggctttttttgcttgtttgtttgtttgtttatgagagggtcttgctctgtcatccaggctggagtgcagtggctcactgcggcctcaatttcccaggctcgggcaatcctcccacctcagcctcccgagtagctaggactataggcgtgcctccatgcccagctaatttttgtattttttgtagaaatggggtttcatcatgttgcccaggctggtctccaactcctagactcaagtgatttacccacctcggcctaaagtgctgggattacgggcatgagccaccacacccagcctgagataggttttgaacaaaaggtttctactgcaggaggctccaggagaggcaccagggccagattcagacgtgagtgtacgtggctgatgccagctccattcctgagagcagagtttgtgggagcagagggcaagtatccagaaagaaggctgggcatggtggctcacgcctgtaatcccagcactttgggaagccaaggcaggcagctcacttgaggtcaggagttcgagaccagcctggccagcatggtgaatccccgtctctactaaaaatacaaaaaaaattagctgggcatgctggtgcatgcctgtcatcccagctactcgggaggctgaggtaggagaatctcttgaaccagggaggcggaggttgcagtgagccgagatatcacaccattgcactctagcctgggcaacatctcaaaaaaaaaaaaaaaaaaggccaggcacggtggttcacacctgtaatcccagcactttgggaggccaaggtgggtggatcatgaggtcaggagattgagaccatcctggctaacacagtgaaaccccgtctctactaaaaaatacaaaaaaatagccaggtgtggtggtgggcacctgtagtcccagctagtcgggaggctgaggcaggagaatggcgtgaacccgggaggcrgagcttgcagtgagcccagatagcgctactacactccagcctgggcgacagagtgagactccgtctcaaaaaaaaaaaaaaaaaagtatccagaaagaggagagcccaggcagctgttggcagggccagcgacttccctccttcttgggccagttgtaggcccagggagcctgcacaaggagaggggttatgccatcctcctacccacagaaagggtgggaagtggggcgccagcctgctgagcttgctctcagctggactcccccgcccgtccgcatcacagagcaggcggactcaacccctctgagctctcaggctgatgggggagatgcactcagatatagagatcatgatggcagaaaagaagttctagagtcaaagtggtcacacgtgttggggagcggttgcttcttcctggggagcgctgagaaggctatctaggggaagagacatgcaatgatgatgacaataatgtaaccatgagagcaaacatttgttggggcctccctaggtgcccacaccatgcccagctcttcatactgaaggaggaggaaagggtgatctgggaatgggaaacaggccgtgccagggcacagggtgtcagccagcaggagcagggtgtggggatcatgccagctgccggggtgagccggcatcaaggacatcacacagggcatcaggccctgtgttcagcacctcacatgtgagggggctgttgctacccgagccacacgacttaaggagactgaggcgtggagagagggagacagtatcacacagcccgtgaaagagcaaaagggccaagccaatagcaagcagacagggtttagagaagggtcagctgttgtctgcatgtggcagaaacttgggcatgttccaatagaaggagaggtggcaatgaggcaggacaaacaggctgacattttggggtccccaggtagaagccagtcaccgcctctgacagcgaatsgctgccctttccctgggctgcagggaggggaggtggaggattgggtgggatgtacaataggtgtgaggagatgggtgggaagtttaggaccttcctgcctggctgccttgcagagggtgaaatttaccaaaggtgaagttcacctgaaaacccaaccgccttcttgtgatgggacgtttaatgtgcaagccacaggtagctcataacactgttaactttcgagcctgcgagcaggaggcattctgattatctgttcatttctagaaacgcttgagccagagggactgtttgttgcctagagaacaaagctaaaacatyggaatgaaattgagagagaaataaaatttcctattctaagcatagcctatgagtaagcatctctgtggctttttggaaagtgtgtgtcagaaaatgcatagaggctcacagaggcctgggaggggacctgtgtcgactactcatctctctccactaacttggcaaaggccccatgccatcattgccctcatgcaaataatgtcatttcagccaggcgcaatggctcacacctgtaatcccagcactttgggaggccaagctgagcagattgcttgagtctaggagtttgagaccagcctgggtgaaccagatgacgaaaccccatctctacaaaaaatacaaaaattttcaggggtgatggtgcatgcctgtagccccagctacttgggaggctgagaagggaggatcgcttgagctcggaaggcagtaaactgacatcgtaccactacactccagcctgggcaagagaaccagaccctgtctcaaataataataataatgtcatttcgcctgggcaagagaaccagaccctgtctcaaataataataataatgtcatttcgcctgggcacccctttgtgaattggctggtggtggcatgtgtacacgtaggtacacacagatacacagtcacacataggcaaagcagcaagatcccctcctgccttacaaagtgaaaaggtttcctcttagtcctggattcatcttgacaagccacagtattagcaggaaaaaaaaaagatgctgattatcagttataaacagtgagtgagagccaagatcccacaatgaccttttgtccccttgtcactccagtggtcataagtgaatgaggcaatgaatgggtcacacttttgacccaatttattattttcttttataaactcttcttttttaatgcaaaggcccccatgtggctagtaagtggcagagctgggaccctctgctggcctgccctttcatggtggctggaactgcagtgtgggagtgataggggctgaggcgggaaaggtggttggggccagttgatgcagagtcttcgaagctgggtgaagaaccctgggctgggtgcactggctcaacgcctgtaatcccagcactttgggaggccgaggtgggaggatcacctgaggtcaggagttcgagaccagcctggccaacatggcgaaaccccgtctctactaaaaatacaaaaattagccagttgtggtggcgcatgcctgtgatcccagctacttgggagactgaggcaggagaatcacttgaacctgggaggcagaagttgcagcaagccgagatcattccactgcattccagcctgggcaacagagcaagactctgtctccaaaaaaaaaaaaaaaaaaaaaaagaacctaggaccttcagggccagggcagcccctgaagatttatttttattttttagagacagggtcttgctctggtcattgaggtggagtgtagtagcatcatcatagctcactgtagccttcctctgggctcaagtgatcctcctgcctcagcctctcaaagtgctgggattacaggcataagccactgtacctgaccgatttttttttttttttttttaagacagggtctcgctctgttgcccaggctggagtgcagtggtgcaattttggctcactgcaacctccacctcctgagctcaagatcctcctgcctcagcctcctgagtagctgggactaaaggcacgtgccaccactcccagctaatatttgtattgtgtagaggcagggttttatcacgttgcccgggcaggtctcaaactcctgggctcaagcgatccgccctcccaaagtgctgggattacaggcatgagccaccacacccagcctttgtaatgttttttgagccacttagtcttcatgcttattgatcatttagatatcccaagcatatcattgtttcagctcgtgggaggcagtttgaagtggctgataacagacttatttattttagtttagttttttatatttactgagcatttcccatttaagggctttatgtatgccgtcttttaaaatgtttacaacaacccgtgattaggttttattattacccaactctccaggtgaggaaactcaggcttacrgaggttaagtgcctctcatgagcccaggtcacagctactcaggggtggacacaggtcacaaacccaggtggtctgactccaactcttgactgtcatgtttcagatcaggagccactagccctgcccgaggggtccgggtaggcttcttggaggatcggccataggggtcatactggggtggctggagggggttgtgtccttctgggtgctcatggcggttgtcctgttgcaggtgccctgctgcaggaggagaggctggacgcggtgaccctgctttacgccacctcgctgcccagcttctgcctgctggcgggtgcagccctggtgctggaggctggcgttgccccaccgcccactgctggcgactctcgcctctgggcctgcatcctgctcagctgcctcctgtctgttctctataacctggccagcttctccctgctggccctcacctctgccctcaccgtccacgtcctgggcaacctcaccgtggtgggcaacctcatcctgtcccggctgttgtttggcagccgcctcagtgccctcagctacgtgggcatcgcactcactctttcaggaatgttcctttaccacaactgcgagttcgtggcctcctgggctgcccgtcgggggctgtggcggagggaccagcccagcaagggtctttgagacctgggggatctcaggagccacctgggatggccctggcctgaatccagcctccgctgtggccatagaaggaatggagaacagggctgggcatggtggctcacgcctataatcccagcacttccagagtccgaggtgggtggatcacctgaggccaggagttcgagaccagcctggctaacatggcaaaacctcatctctactaaaaatagaaaaattagctgggcatggtggcgcgtgcctatagtcccagctacatgggaggctaaggtgggaggatcacttgagccctggagatcgaggctgcagtaagccaagatcgcatgctactgcactccagcctgggagacagagcgagacgctgtctcaattaaaaaaaaaaaaagtggagaactggcagtgacctctactgggggccatggcagggaggggagccttctggaagggctgccttggagattggartggggactcccagggagacctgcgttccatccctgcctgcctcacccctgccacagactctgcacaccactggatggtgggtccaagcctggcacagtccctgtgcttgtcagagtcattattatgattaatatcaattacgatgccaaaaattgctgggcaaactttgaagacctcaacttgttacaatgacgatgatgatgattcttggcggttacacaatccttcctcctgggggggaggcagctaggaggcccagcaggggggcttctatgctgctgrgctcccctagggagttggggtagtctgtgccaactccaggcagctgctgtggcctcacccctgggccccccaattttgggtcatccatcctcaaatacactatttttgcttgtatgcctgtgtcatttgttggttgtacagaggggatatagggagagtggtaggcttcccacacagaaactrggacatcctcccttacccatcgcagtctgtctggccccccaccccgagcccagtgccattccctcaaatccctccactggctgggctaccattgcccatcttctggacagtggcagtggcctcccccttgctctgcctggcccctctactccatcttacacacagaccccttcacccagagggatctcactaaaacgtgcacattctgatgttcctcactgctcttgggacaaagtcagaatttcctaccccagaccccaactcactcaggacgtggcacctgcagcctcacccagcttgtctcccttcccctgggctctgccttccagcctcaccgacttctttcagttccccgtgataccaggcctgctcactgaaacctttgtacatgctgttccctccgtccagtccccgcttcctacaacaacctcctcccttcccacagcttaaacccctgcctggaggagaaaacccaaacatgcaactctttttaaaaagagaaatccaggccgggcgcggtggctcacacctgtaatcccagtactttgggaggccaaggcgggcggatcacctgatgtcaggggttcgagaccagcctggccaacatgctgaaacmccgtctctattaaaaatacaaaaaaattagccaggcctgctggcgtgcacctgaggcaggagaatcgctggaacccaggaggcagaggttgcagtgagccgagattgtgccactgcactccagcttggccaacaagaccgaaactccatctcaaaaaagaaaagaaaaatccaatcgcttgaggccaggagttggaggctgcagtgcactatgatcatgccactgcactccagcctgggtgacagagcaagaccctatctctttcraaaaaaaaaagggctgatgagggtcttgacaagggactgtgctcaggaggcttgcaggggtataggggagcagggctcccatgtagggaacctaagacaggagtcccaacccccagagctccctgactcgccagctggcgtcagctttgttatttacctctgagcctttccttggctcttgtaacacctaactctccccagccagctacctctcctggagatcacctgttaaagatgataaggacccagttggagtgagaacacctggaacctaatcctgctctgcccacctgactgggagcctcccttccctaggcctcagcttccagatctgcaaaatggaactgatgatccctatggagagggttcgaatgaggagcgctgggcagggccaggagtgaggaaggaggtaatggcaccaactggctctgcttttatcttggggtattcacccaacctttctggaaaccatctgcaaaatgtctcccatttgtgtgaggactaggagctagaccaggctggggctgtggtctatggagactgagattcagggaggaatcattcagattcagtaaccagaattcgtaagggaccacagtgccagcaagtgctagacagggctgagtaaagggccagcccacggcggggtgggagtgggtagggaaggcctaggaggaccggtatggggtttcctggttccagcctccgcccaggctgccttacagaaggggaagtcggcctgggctgagtcacctgtcacccaccctctctatgactcagagatgccgctggcccagcccagtccctgagcagcttgggtacctctggcctccactctcaggctttgccaggcaggatggagggatggatggctgtggtcaaatcctcctcggtgactcaggaccctttcccatccaactggcccccactgccatagcagggacctccctgtaccaccctcatttctaggccttgtgggatgcttggctaatgagtgagcctcacatcagattaaagcctgcccctggtggttgtggggacaggtaattggggttgtgtgtgacctgggagctggtttgtcaccagattcaggaccattagacattgaggtgattcccccaaggccacagccaaagccatgcctatcacccctcccagcagtgggcacagagagcgctggattgggagtcaaaaagcttgggtttggtgggatgtggtggctcacgcctgtaatcccagtactttgggagtccgaggggggcggatcacctgaagtcaggagttcaagaccagcctggccaacatggtgaaaccccgtctctactaaaaatacaaaaattagctgggcatggtggcagccgcctgtaatcccagctacttgggaggctgaggcaggagaatcgcttgaacctgggaggcggaggttgcagtgagccgagatcatgccattgcactgtagcctgggggacaagagcaagacttcrtctcaaaaaaaaaaaaaattagacggacatggtggtggggacctgtaatcccagctactcggaaggctgaggcaggagaatcgcttgagcctaggaggcagagattgctgtgagccaagattacgccactgyactccagcttgtgtgacagaatgagactccatctcaaaaaataaacaaaaataaaaaagaacaggggctctggagtttgacttgtgctcgaatcctggctttggtacatctgagctctgtgaccttgcacaaggtcctccccacctgtgcctctgtgcattgagtgggggcagcagtggaacctaatcccccaccagcttctggagctgtaatggacaaaggcctaggaaggcctcagtcttatcacagatgcttccacttcctcctcaaggcttctcgtgttatctgccccacccctcctcagcctgccagagcacatttgagagtcccccaggcatgctcccgcctgagcatagcagcgtggatgccaagcctccagcccccttgtcctgctttggaggaagcctgggaagctgggtctgtgctgggcatcctgccattgtggacttcgaaacaaagacctgtctcaggcctagctgcctggtgccccttctaccctcccctggtggcccttggattggcattccagggggccagggcaaacaaggattgtgagtccttgtttggcctggccccctggaaggagtagctccttcatgctactctgccctcaaattagctcagggatgtcaaatcctccaccactgcactaaataacttcctggaagtagcacaaaatacttaattgagggccacttaatggaggaccacgagaggttttgagccatgatcttttatttcttttcttttctttttttgagacagagtttcgctctgtcgcccaggctagaatgcagtggtgcaatcttggctcactgcaacctctgcctcccaggttcaagtgattcttctgcctcagcctcctgagtagctgggattacaggcatatgccaccacacgtggctaattttgtgtgtgtgtgtgtgtgtgtgtgtgtgtgtatatatatatatatatatatatatatattttttttttttttttttttttttttttttttggtagagatggggtttcaccatgttacccagactggtcttgaactcctgacctcaagaaatccacctgccttggcctcccaaagtgctaggattacaggcgtgagccactgcgcttggccaaaataaacatttcttgataagtagaccttcaatttagtctggaccctatgtagagaaaaaattggaggggctcaagacaggaggcaggaagactagggaagacctgttgttgtggtctaggtaactccatgacagtggggacagtgctagggcagagtgggtatcggttgtattgatttagagtaacaatttatctcaaaatcttatggcttagagcaacaaacatgtagtatctcacagtttcagtggatcaggaattcgggagtggcttagtgggttggttctggttgagtttctcattaagttgtagtcaagatgttggtctgagcttcagtcatctgaaagcttggctggggctggaggatttgtggccccccagtgggttcactttgcccactgcctagacaaagctgatttatcaagacaggggaactgcaatagagaaagagtaattcacacagagcctggtgtgcaggagaccagagttttactattactgaaatcagtctccccgaccattcagggagcagagttttaaggacaacttggtgggttgggggaagccagtgagacaggagtgctgattggtcagggatgaaatcacaggatgttgaagctgttttctagtgcccagtcagttcctgggtgggggccacaagatcagacgagccagtttatcaatctgggtggtgccagctgatccatcaagggcaggggctgcaaaatatcacaagcactgatcttaggagcagtttagggaaggtcagaatcttgcagcctccagctgcatgactcctaagccataatttctaatcttgtggctaatgttagtcctatataggcaatctagtccctaggcaagaaagaggtctgctttgggaaagggccattatcatcttcattttaatctataaactataaactaagtttctccgaatgttagttcagcctatgcccaggaatgaayaaagacaacttggagattagaagcaagatggagtcaattaagttagatctcttccactgtatcagtcacaattttgcaaaggcggcttcagatttacattcaaaatggggcattcacgtggctgttggcaggaggcctcagttccttgccatgtgggcttctccatagggccccttgagtgtcctcaacacatagtagttggtgtccaccaaagtgagtgattcaagagaacaagaaaccacaaagtccttttaaatctgatctcaaargtcacactctgtcatttctccagtatcttattggttacaagtctatttagtgtgagcccttcccacattgactacacaaaggcaggattaccaggaagatgggattactgaggacatctctgaggctagctaccatatcagtgaatatctattgaatgagtgattgaggacgtgaggacataacctggagccctatgaggaattagcctgggagtattctgttctgggtggggtcttgtcagccacacctctgcatcctccctaaccaagtattgcacagtcctggcccacagcatgcacttagtaaatgcttgctcagtgagggctggtggctgccttctgtgctccccaccactggcaggtcaaggcctgggctccctggcctggtatttgaagccctggatgttctgacgtttccaagcctacccccactgccctgaacccttcggctattggggggccaccctgttctctatgcctgctgaagtttttcagtgtctaggtctcctgctgccctatcccgactgccacaaccctcatgtgcccccttcctccttctttttttttttttttgagacagagtcttgctctgtcacccagactggagtgcagtggtgcgatctcggctcactgcaacctccgcctcctgggttcaagcgattctcctgcctcagcctcctgagtaggtggaactacaggtgcacactaccatgcccggctaatttttttgtattttagtagagactgggtttcaccatgttggccaggctggtctcgaactcctgatctcaagtgacccgccccccctcggcctcccaaagtgcttgggatacagccctgagccaccacgcctggccgcctcccttctctaagcactgccagcatcccagctgtacctgctgcctaggctgggaatttctgtttgtatgtttagactttctttggaggagaacccttgttaggctggagcccaaaatcaatcaagccaaagcacagttccctgtttttatttatttacatatttatttatttattgaggagtaaacagtctttattgggctcacagcaggagtccatgggtcttgaggacaccccagtatttgtcagtttccttctccacgttcttttcggcctgtttctgtagcctcattagctgttttgtttttttgttttttttttttgagacggagtcgcactctgtcgcccaggctggagtgcagtggcgcgatctcggctcactgcaagctccgccccacgggttcacgccattctcctgcctcagcctcccaagtagctgagactacgggcgcccgccaccacgcccggctatttttattttttatttttttagtagagacygggtttcaccatgttagccaggatggtctcaatctcctgacctcctgatctgcccgcctccgcctcccaaagtgctaggattacaggcgtgagccaccgcgcccggccatcccatgagctgtttcttattctggtagtggatcttggccttctccttcctcttctcctccagggtggctgtcactgtctggtacttccagccaactttgtgatccagctgccccaggtaggcaaactttcttgtaggcttcagatgcacaacctggagggcagcaggaaccaccacctgctttttcgtcatagggtggtgggatgccgttaaacaccttgaggcggtcttgggcggcctggcttccttggtctcgcggggcagcatgcctcggggtccgccagaagatgcggctggggacccggaagtggtgggggcccagaagtggtaggtgcctcgggaagggttgctgttcatccacttgtggaggaaggccaggtacttcaacttctttctatagacattgccagaaatactgatgcccccgcagtgtacgaccaccamcttccggcctgcttagccaccatggccctcaggaagcccaggagatagctttgaccattgagcaccgggacctgcccctctgccatcttcggcagccgcctgggaaaggagttccctatttttagatgaaacagggaagggcatggggccccttcacccctgaggtacctctgccagatttccctggaaccctgtttgaaaaccacagatctagttcaatcctcgttgtccatatgaggaaactgaagcccaaagaatagaaagaaccaagacgaccttgtgcagagggagcagtaggattaggacttcaccctcctaattcctggggttctgctattctctgctccctacactgctatgaagaacagagccacggtgtgaagttacaggggctgtgcagggtctggcccagggttgtagggacagtttgccacaagaagccagcagccaggtatggtggctcacacctgtaatcctagcactttgggaggctgagraaggtggatggctagagcccaggagttccagacccatctggacaacatagcaaaaccctgtctctacggaaaaaaaaaaaaaawagccaagtatggtggtgcacgcctgtagtcccagctacttgggaggctgagatgggaggctgcagtgggctgtgattacaccactgcactccactctgggtaacagagtgagatcctaycwaaaaaaaaaaaaaaaaagaaaaagaaaaaaagaagccactagcctggcattgcatagctcagtcaacaaaatatcctttttttttttcttccaggaaaagtaattacaaatgttttgccaagggcacgtctagcatgtctcccagaaatgggcctgccttagtatcccttccatacccaggaactagctagaaggagcctcaaggaatctggtttcagcataaacatgatgatggatttcagtgtcacagctgggagcccatagtcaattctgctttctgtaaatagaggtctgtggggtgccttcttatgcacggatggcattgtgattcccatttaacagagtaagcaaaatttcagaaaaattccagggtctgcctgaagtcaaagccaagaggtggaagagtcaggatgagaatccacacctcttaacattcctcccaagctccttcttaggtgatattgggtcacgatccagaggtggaaagwaatggattcttaggacttttttttttcttattttcattcatttattgaggcaccactgcactgcatcctgggcaaaagggtctcactctgttgctgaggacgcagtgcagtggtgccatcatagttgactgcagcctcaacctccttgggctcaagcgatcctcccacctcagcttcccaagtagctgggactacaggtgtgcaccaccatgctgggctttttttttttaaactttttgtagagaaggagtctcactatgttgcccaggctgatcgcaaattcccaggctcaagtgatcctcctgcctcagccacccaaagggctgggattacaggcatgagccactgcacttggactctaagggcatttggatttaacatcccaggataggaaagcagggctgtgtgcttcaaggtcaagagctacctgcccctgggatttgtaattagatcgccatctcaacagagrtcattccgagaaatcctcagggccaacagcatgtccctgtttatctgacagggcattataaacttcacagaaacttctcaaaccaaatttaattgactttggaaagaaagtgattcctcacttttggagtgagaaagttaaaggttcatgtaatcaaaaagaggcctagaatccctgttctaagccaggctgktaggctatgggaccacttctttctcccctactataggactgcattcaaacctcaacatgaccttcttcctaggttgtctgagtaaaaggctgctctactctgagtccaaaagaacagtgtgaactgtttgggaaaaggacgtggaccctctcaaaagccctcaaccttaacctctcccacttaggatatgaactcctggtctcatcatgtccaattctgaatatttaaaaagagagttaaaaaggaggaatggcttggcccagtggctcatgcctgtaatcacagcactttcggaggctgaggaggaaggatcacttgagcccaggagttcgagaccagcctggtcaacatagtgaaaccccatctctattttgtataaaaatataaagtaattaaaacttaaaaaaggaggaatgaaaattatgtttactcaactatgaaaaaaatgctcaggaggaaggaactagatcacaatactaatatgttgacttggttacaacgatggggatattgtggctggaccatatttgttttcctttttctacgaataagcatgtaagataaatttctgggctgggtgcagtggctcacacctgtaatcccagcactttgggaggccgaggtgggtggatcacctgaggtcaggagtttgagaccagcctggccaacacggtgaaaccctgtctctactaaaaacacacacacacacacacacacaaaaaaattagccgggcgtgggggcgggcacctgtaatcccagctacttgggaggctgaggcaggagaattgcttgaacccaggaggcggaggttgcagtaagccgagatcacaccattgcactttagcctgggtgacagagcaagactctgtctcaaaaaaaaaaaaattctggccgggtgtagtgggtcgcgcctataatcccagcactttgggaagcaaagacaggtagatcacttgagcccaggaatttgagaccagcctgggaaatatggtgagacgctgtctctaaaaaaattttttaaagatttaaaaaataggccaggcgcggtggctcatgcctgtaatccyagtactttgggaggccgagtcaggtggatcacgaggtcaggagatcgagacaatcctggctaacacggtgaaaccccatctctactaaaagtacaaaaaattagccgggtgtggtggcgggcacctgtagtcccagctactcgggaggctgaggcaggagaatgacgtgaactcgggaggcggagcttgcagtgagccaagatcacgccactgcactccagcctgggcaacagtgcaagactctgtctcaaataataataataataataataataataataataataataataataatgattagctggatatggtgttgagtacctctaggttccagttactcaggaggctaaggtaagaggatcattggaggctgggagtttgaggctgcagtgggcggtgatcacaccacagtatctagcctgggcaacagaataagaccatttcaaaataaatttttttttttagttaaaaaaaactgaatctctcggggttctagttctaagtaagatagagtaagcagtctgtctctcccactggctgcaactaaaagccctggaaataatggatctgaggactctgaaaaagaaatattaacaaggctgggtgcggttgctcatgcctataatcccagaactttgggrggctgaggcaggaggatcacttgaggccaggagtttgagaccagcctgggcaacacaatgagactctgtctctagaaaaaaaaaaattttttttttttgggggtagcagcagtaacagtggtggccagaaaagcacctaaaactctgacaaagcggaatcctttcatctgtccaaagcatctgcaatctgaaaagtagaagaggggaatctccgttgccttttttctctcttcatcctgtcacctggcccaagagtacacccgccatggagggtgcgtaacaagcagggagactaaaggacccaatttctagctaaagggtcaggaaaatgaggggtcttgaaagctggagaatgtggacaggagagagcttgtgaaatagatcccataaagttgcacatgaatttgtaggttcacatgcatggacctgaccctaagcagtattccagtgaatgagaactgaactattaggcagaacacccaggtttcagactgctcactggggggcataagcttaggactgttctgatttacatggcaaaggctttgaaactgaactgatcggctgggcgcggtggctcacgcctgtaatcccagcactttgggaggctgaggcgggtggatcacgagatcaggagatcgagaccatcctggctaacatggcgaaaccgcatctctactaggcatggtggcgggtccctgtagtcccagctattcgggaggctgaggcaggagaatggcgtgaacctgggaggcggagtttgcagtgagctgggattgcgccattgcactccagcctaggcgacacagcgagactccatctcaaaaaaaaaaaaaaaaaaaaaaagaagaaactgaactgatactggaactacaatagcccacaggagacagatgaggatcgaaccgaagagggtcaactgcctcctaaaacaaaaacctgacattttccgtgggatttaaacaagacctattcaaaatgcctaggatacaatcaaaattacacacaaagaacaaggaaagtctggaccctgagatgacccagatgttggaattatcagaaaaagactctttttttctctcttttttttgagatggagtttcactcttattgcccaggctcgagttcaatagcatgatcttggctcactgcaacctccgcctcctgggttcaagcgattcttccgcctcagcctcccgggtagctgtgattacaggcgcccgccaccacatccagctaattttttgtatttttagagacggggtttcaacatgttggccaggstggtctcgaactcctgacctcaggtgatccaccagcctcaacctcccaaagtgcagggattacaggctaaataagaattttagaactaagaaaatataagaatcaagatttggaaatgatgtttctgacctattccctggaaaatgtgaatgttactttatatgacaaaggagactgcagatgtaacttatgcagatgtaactgattttatttttatgttagtgggctcattctaatcacatgagtcttttaaagcagagtgattctctctggctggacttagatgtaacagaaggaaaagttagaagtatttaaagtgtgagaagaattcaacctatttctggaggggcacacgtagaaagcaccagaatgtgggcagcttctacagagaaaaggccaacccccagctgacagctaagaaaacagggtcctctaccctgcaactgcaatacactaaattcagccaagaacccaaatgaatgtggaagcagattcttcctcagagcctccagggaaaaacacatttggttttggccgtatgaaacgtgatttggaccttgtgagactctaagcagaggacctagtcaagtccaatcaagcttctgacctatagaaattgtgagaaaatatatggatgttgttttaagccactaagtttgtggtaatttgttacagcaccaagagtaaactaatacattayccaaaatgagcagcagagagaaaaaaattttttttttgaaacacagtctcactttgtcactcaggctggagwgcagaggcacgatcttggctcactgcagccttgacctccctcctgggctcaagtgatctctcacttcagccccaacaaatagctgggactacaggtgcatgccaccacacccacctagagaaaattttttaaaaaatgaatagtctcaggaattcacggacaatgtcaaaagctctaacattcatgttatcaatgacacagaagtacaggacagtatggtacagaaaacaatacttgaagaaatcatagctgagaacttcccagatatctgaaacacaatcaagtggctctgtgaactctgataaggataaccgaaagaaatccatgtccatatacatcataattaaactgatgagaaccaaagacaaggagaaaatcttaaaaagcagctggggaaaaataaagcattacctgttgggaaacaatagttagaatgcctctggatttctgagaaaaaaccatggaggccagaaggcatagaacaattttttttttttttttgagatggagtcttgctctgttgcccaggctggagtgcaatgtcctgatcttggctcactgcaacctctgcctcccgggttcaagtaattctcctgtttcattctctaatctcagtagctgggattacaggcacttgccactacgccctgctttcgtatttttagcagagacaaggcttttgccatgttggccaggctggtctcgaacacttgacctcaagtgatctggccacctcggcctcccaaagtgttgggattacaggcatgagccrccacgcccggcctcaattgtatttctatatactaataatgagcaattggaaaaaaaatctacaatagccacccccccgccaagtgaaatatagtttgagacccattcatggatctcaaatccaaaaatgtgaaatgctcaaaatctaaaactttttgagagctgaaatgactatcaaaggaaatactcatttaagcattctggattttagagttgggatgctcaagtaatatttgcttcaggtaaagcaaatattaacctgaaaataatccaaaatatttctggtcccaagcatttctttttttcttttctttttctttttttttttttttctttttgagatggagtctcactcttgttgcccaggctggagtgcaatggtgcaagctcggctcactgcaacctccgcctcctgggttcaagcaattctcctgcctcagcctcccaagtaactgggattacaggcacccagctgttaaaagaaaaagcatttggcttctactggaatctggagccacagtttggtgtcaaacagagcagctgtgcttttgtttcaaatgctgtttgctgaaaacctctggatcagaagagctggtcttcagccaggtccttggcaccaagaggatgtgaacaatcctgaattccagggcctactgatggagtccactagttagtccctttgacacggcccccttatggatcccagtagtcagccggggtgcaggttttcatagtgattctaaacaaggctgcagtcactgtttagaagtgattgggggaagctggaactgtgctccttgtttcaggacctctagattgcacctagattaaacaagacggaagctctcaaaaggctctaagtctaggcctcctgtgaggtagggtctgaaaggacttaaaccattttttttttttttttttttttacacacagggtaactttttggaagagtactttgtaacaataaagtgctgtgcacagaaaggagaaatgccattatgrggatgtgtgtgccgacctgggaccagcagggtgaaagagtctatcattcatgatgagagctgccatttgcgctaagcacacaccatgtgccaggcactatgccaagaaattgttgaatcttcacaataactctgtgagaaaagggctgtcattggacagatgaggacactgatgctcccaggggtccacatcacatgaagaggaggtgacagggctgggccttggtccgaagctccagccttccaagccaaggcctgtgagaggaaccgctgagacctgatgttaggcctgtttttctcatgtgccctggagaaggggactaacaccatcttttgccaaagtttggtgagggatggccaagagctctttgaaactttgccatgtacaatagcactcacaattttttttaaattttttatacagtggtatcggggtacagtggctcatcaacactttgggaggctgaggcgtgaggattgcttgaggccaggagtttgagaccagtctgggcgacatagtaaaatctcatctctataaaaaaagaaaaaaaatgaggcgggcatggtggcaaacatctgtagtcccagccacgcaggaggctaaggtaagaggatcacttgagcctgagaggttgtggctacagtgagccatgatcacactactgcactctaggatgggtgacagagcaggacagtttcaaaaaaagacaaaaaaaaatttacacagtggaatgctttctttaaaaactatcttatgcataagtacaatctagaaaaccagaactgggccacttatagtgaaggtggaagcagaggtggcctgggaccccccaggattcctggagcactgcctgaaggccatttatctagtagattggcactcactgtaagaagcgcaagaggtaccatgatgcttaaggctctggctctgggtgtgaaagaatgaggtggaattgtagcagattcattcctgggtcaatctgtttttggggagggctgcaggattccaggcctgccatgtgcaatgggtgctgccctctttcttctgggcaccatctgcctcaacctatcccctggccagtgtcactcacagggcagaaaatttatcttcaccatctcacaattagtttaatctkaaaaaaaatggattataaagttaaaagctacagcaactcttttttgtgctcataaaaggcatcatctgtttttttctgtatcaacaaaagtagaatgttcaagtttggatcttggtgtaagatcaacaatagatctgtacctctgactccaatgcaggggctcgtgggatggctcacagtggaatcatcaaacggacttccttctcatagatgtcagggatcattcccactggggaactgaccatgtgcacagtgttcttgccaaacaattggaactcatagtggatgagctgctcccaaaagccgctgttgggtcggatgatgggccggcatgacttggtccacgtgtgggcgtccagcagggacatggcgtggtacttcatgaggtaggcgaggcacagggcagctgagcggctcacaccagcagcacagtgcagcaaagtacggccctgcttcatctccacgctgtggatatggtcagcaatagggtcaaagaagtcacagagacgtgagttaggggagtcagccacaggtacctgcatgtactggatatcctcatacaaggtgttcactacctccactgagacattgatgaccatggtgatctggttgctagacagcatgagcttgttgttggcggccacaccattgctgatatacaggcttttggttatctgcgagaggccgctgactgagggctgccggaactgaactgggaaggcacacgagggtgctgtcatcaaggcggtgggtcagtggtcagcagtcagcgaagcacsaaggctgcgtctttctgctaggctgtgtccatggaaaactgcagagagggagaggatgtttagagggcaggtgcccagagggccaattccaggggatccctgggaaatggatggataggcttatagcattccccaaggcagtcctctgaccatcacagcagaaytacccagcaaactcatttaaagtacagatacccaggtccctctccaaacccacagtcagactctcggggtgaagagcatgaatctgcattttcagcatgcttctcaggtggtctaatgtgcactgccctataggacaaatggcaagtccccaagtctggcacttgaggcctccyttgaggggtcccacagctctagttgggcagatgacttgtgtccctcagctgtgccttggcctgattctccatttaagctcacagagcccttttcttgctgctcttccaaattctctccttccttccagcccctctgagtgggaaccatttgtacagtcttcctcctcagtcttctgactttatgcccaaatcataaggtcctgagccagtggcatggaaccagagcccactgtgctggcagtcactgaggaggctggtataagagtagggagggttcccattttccccctctaagaaccatctctttaaagagacaggatatgcccatgcgaagctgatgtcaaatacaaagtcctaaattgttagacatgctcctgcaccttgcctctgaagaaggcctgggaaagggagtggctgaaagcttcctggaagccagcataatgggcaccacagcaaccccagggacaagcacagagacagcagggccttaggaagacctgccacacctgcatcatgctgcctgcagcagagctgtgaaacacaccccagggagaggcagaccccttcccttcacctgctcgataggctcagtcgccgctaagtaattggggtagrggttcagccgcagatctgcttcccgcgccgcagaccgtgcagtcgtcggtgctcctcaggtgcggcctgggtgcccagagcattcattagactctcggaccctcactttctcagtcttaaacaaagctgcaaaaaccaggacatctttatacattccgctgaaataggggcatttggatttagatcacacctttcaaggccaagtggcagtcttcaccaggcacgagaaatgaggagccaaagttttgtttccctgcttaatatatttcagtggctatccactgtgaggataagatggagccacttagtttggctgtcaaggccatttgtgacctggctcctgcctgtctctccagcctcttattaggcttctccatgctctgaagggcctcaggtgaaccgagccacttacagttccttagggacaacctgtcctctccagccagtggcctttgcccctgctgatctctcagtctctttccttatgaacccatcagatcctgatctggtccattcagcagaggactgcagaagtctgaggagccttaagatatcaacttaaaggtaactgttttaagggaaatctccttagatcacacccctccctcacgtttgaccaactctgctccaggctttcttagccctatgttctctccttcctaacacttactgaagacgtagttttgctccgatctgtctgattatttgattaatgtctgtctccccaagagactgtgagccctttagggatatgatggtgtctgtcttcactcccactctatcaccaactagtgccaagcgctgtgtccccacaagtaggtgcttgataaatatttgttgaatgaagaaatgactcccaacagctatgactctgccttctgagaggytttctggaaagaatgagttctctggcagcgtgtctccagaattccagggaggggctgggtggggatgggggtggttctgaggctactaaagagaaagaccaaaggttgtataggcaaatcctacctgccaatgccccagactcaaatgcatcaggctcattcccggaaggacagagagggctggcttgctacagaggtgatatgaagggcaaagaaaaagcctcctgaacccagatggaagtctaaatgctaaggaatgttctggatcctcgtcatcagaaaatccatagagaagtgaactgatgtccccccaaaccagtgcccagtgggtaacgggaatagaggaatgtgctgttcattatagccactaaaagtctgcagaagtgacaatgctcttgcaggtgagggtagtgatgcgaggagtcattttcatgctagttaagaaatatctatcagggctgggcacggtggcttaagcctataatcccagcactttggaaggccgaggcgggcagatcacctgaggtcaggagttcaagaccagcctgaccaacatggtgaaacccccgtctctactaaaaatacaaaaattagccaggcgtggtggcatgggcctgtagtcccagctactcaggaggctgagacgggagaattgcttgaacccgggaggcggaggctgcagtgagccaagatcgtgccactgcactccagcctgggagacagcgtkagactccatctcaaaaaaaaaaaaaaaaaaaaaaaaagcaatctctatcaggcactgtattaggtgttggagatactgaaatgtacaagacaggcatggccccttttctcagggagctcaaagactagtgggagaaacagatagtaaacaggcaattacaggcagacagagcttgaaaataggataacagtacctaccttaaaaggatgttgtgaaattaaacgagataatccacgtaaagagttttctcagggcttggcatagagtaagccctctcaaaatgataactatttttctcgcttctgatagggaagttaaaatgcagggctcygtgaaagggaagtgtaaaaaagatttcttccaggtcggagcctagggagtcgcaaagaccacctgaagaaatcacaaaagatctaaagaacgtttagcttgagagggaggaggagaaaaaaatagcaactcggtagcagttcagcttcaccactttacagcctatgaagtatttggcttccctcatctggttcgatcttcaaagcaacctaatcagaccggcgtctagagttaatatttccattttacaaaagaggaaagtgagacacagcgcggaaaaggacttgttcagaacgagtcataaagcaaagaagccgacctttatggtccattatgtgtgggaaaaatgaacaaacaccgcggggcgttcgtgaaatactaagttataaacatggaacaaagtccaagagttaacgagagcgaagcatcacttctaggggtgggccgggtaggtttcctaggggagctggcattggaataggcttcttcgccygcttagtgtcaggacccccagggttttacctctctccttcaggcgggtgggcgggttcgctcaggaagtagccgcttggggaagccttaggcaaggttcttcgggagagagacccrtcatgatcccgcagcctcaatccccgctggcctaacgctttggtttccatagcaatgggctcgtcgcagaaaggaatagcctgtgccgggtcttcagagaaatcctggcctcggctccacgcccctgagcagccccaccctggctcaacctgttacccgccctgccggcaagccggggtcactgcagtccccgtggcgaagcagggtcagctcagctcaccgcaccccactccatccagccctgcccatctctacggcaacgggccgggtcgcaccagggctgcagccgagagacagtctcaccgcttccgtagccgcccgggctctgtgcgcatgtgcgacactccctccccggccccgcccccttatgcgtctcccaggcaacgcgccgcgcggggctccaggttccgcccagggactaactccaggtctgcgcgcgtccaacgagcacggctctcaaccggcctcctggcgcccaacgaccatggcttccaaccggcctccgtgcgcccaacgaccatgactcccaaccggcctccagtttccaactgtttctcgaacagggaagccgccatgacacagctgactacgcccttggtcacaggggacctgagatcctccacgatttacgggaccggcgccacctcgggctcgaaccaccctctcgatagggccgccgctaagtaatcggcgtaggggttcagccgcacatctccttcccgcgccgcggaccgagcagtcgttggtgctcttcaggtgcggcctgggtgcccagagccttcgttagactctcggacccgcaagggagcccgaactctttcagactcgctctccctcagccggacctcggccctttttcacaccccaggggagtctggatttctcatagtcctgggcaccagccccttcccagtctagctcttgggactccctgaagccggaactccctcgcctggactcccgggagaacctggaatccccatctccagtccacattttctcagaatctgtcctagcccttcagtctcccaggcatgacatcgtgtggtcccagcgccctaggtggtgagctgtgactctccttagagcctggcgaggccgaggtcctccccagctcgaacccatcccacactccccttctcagcctctgtgttccccagtggtcctggaaaagcccccagttccctctgcctggccccaatcctcacaaacccaattacccacgctcctttccattccataacccccatcactgcatcctccaggctcccatccatggaggacttgaggtggaaagcaatttggttcaaaataaccattatttattacttgaaagggaatatttccagtcgttgccagcctcctccccttctagtattggtaaattttttgcaccactgagtgggtgaagagttttatgcgtctttaaatgttttaaggatttttttaaaaaaacaaaaaactctcaggatttgggggacttttgtgtttgagcatcttgatctctaaaccagctttttccatcacctcatacctaggctatgcatagaggtcagaaaaatgtaaatgagagattgagaagttggattgttcatactagtttgtaaatatgaaaacattcacaacactccagttccaaataggctgaaaatgcattagaaaaactagtccttcaatattttttatccttctacagttgtcttttttgacccaattataaaagtagtgtacacttatagaaaaatgaggacaggcatggtggctcacgcttgtattcccaccacttcactttgaaaggctgaggcagttggatcacctgagctcaggagttcgagaccagcctgggcaacagggtgaaaccccatctctaccaaaaatacaaaaaattagccgggcttggtggctcacctgtggtcccagttactcaggaggctgaggtgggaggatcacttgagcctgggatgtggaggttgcagtgagctgagattgtgccactactctccaacctgggggacagagtgagaccccgtctcgaagaaataaaaagaagacaagacaggccagcagcataagtggctagggacaatcactgttaacattttggtgtattttgatcagaatccattcatatatatatatatatatatatatatatatatatatatatatgttacaacatgcttatacttaaaaaagatacatcacaaaagttcactttttagtaacctgcttttttctcccatctaatataccacccgtctatgtttcatacacaattacatgtattttattttatgacataccaaaatttattcaattgcttccatactgtagattttgtttccgcattttagaaagaaaatatgaacaattttttttttgagacagagtctagctctgtggcccaggcccgagtgcagtggcacagtcttggctcactgcaacctctgcctcctgggttccagtgattctcctgccttagcctcctgattagctgggattacaggtgctcaccactacacccggctaatttttgtatttttagtagagatggggtttcaccatgttggccaggctggtctcgaactcctgacctcaagtgatctgcccaccttggcctcccaaagtgctgggattataggcctcagccactgtgcctgatcctgaagaattatttttaaatgggcaaaaccatttaaaggtatttatttgtaagactacttcatggtgtaaccaaattatcaaaaagtgaaaatgcagtgcttagaagtacatccactcttcagcatttcctcattttgaccagattgttatattttcacctggagtacctagctccattctaccccaccccaccccatgtttcacctcacctttcagagcctcctaaaacccctgtccaccccacacctccctattctaaattttccccaaaccttcttctggaattcccctattaaccagcctaacatctgtccaaactcttcacttttatttctccctgctctgatctatactcccccaagcccccgcctcccagatcccctttaggcacagggtctagagcaagtgctccccaagctaaacacctctcaaattcatccttcgaaccctactctacaacttttactcctcccctctaagacccctctctcccatttcatccttaagaaggatcatcaagatgactgcttttggctgggtgggcatggtggctctcacgcatgtaatcctaccactttgggagcccaaggcaggcatatctcttgaggtcaggagttcgagactagcctggccaacatggtgaaaccccgtctctactaaaaatacaaaaattagccaggtgtggtggcgcatgcctgtaatcctagctgctcgggaggctgaggcaggagaatcgcttgaacccgggaggtggaggttgcagtgagccgagattgtgccactgcattccagcctgggagacagaatgaaactccatctcaaaaaaacaaaagactgctttggaagatggttctgagttcctgataacccttctcttgtggactgcactggggcccttttacaaacacagaattgcttttcttctgggtgtccatgaaacacccctttagcatatctttccacaagaagaaactgtggttactcccttgcttctctgaaaattgtaacagagctgcacttgtcctaagatacccggggaagcctcagccactcccccaggaccctgtcaaatctgctctggccctggcctcagccatctgtaacctgtgtcacctttccctccccgctccagcttaatgattccagtgaagcagcagtgaaaaattttttactcatataaaaagagcagtttatcttgggtgggtttttatgacaagctcatagcacaacgactccatgaggtgcaggtaaagtagccacaagcttttgcattagagggtgttagtggcttgacccatattcatttcattctctctatatcctgggggatcataaaggtgataggaagtccccaaggtgctctaaggcaggccccgttttacagaggaggcaattgacactcagggttactgacttgcccaaggtgtcacacctgttcctaggctaaggaggctagaaagactccatgtctcttggttttgtttttgtttttgtttttcctgaaagcacattatctctctagggaacccatgaatggattcttattttctcccatacaaagtcttgggttctaggctgggcgcggtggctcatgcctgtaatcccagcactttgtgggaggcaggacggtcacttgaggttaggagtttgaaatcagcctagtcaatgtggcgaagccccgtctctactaaaaatacaaaactgatctgggcatggtggtgggtgcctgtaataccagctacatgagaggctgagacatgagcattgcttgaaccgggtggtgaaggttgcagtgagctgtgatagtactccagcctgggcaacagagcaagactccgtctcaaaaaaaaaaacaaaaacaaaaaaacaaacaagcaaaaataaataaataaaacccccaaaaaactaaggtcttgggtcctagagtttgaatcagcattaacagcatcttgtcagttttttcctttggggattatccccattttccagatgagaactgaggctcttctcccactttttgcttatggacaggtaagagtttgactcaggcttactcaaaagcctgagtgctgtcacctactgttcccatagaccctaattgatgaactcattaaacctgtccttagggcctgcttgggacagctactgtgttgggtgctaggaagagacacatgaaaaagatggacaccaataacatactcattttttcaaacagagcaggaagcccagggttgagcttctgccccttcttgactctgttgacttctctccatgttccagggtcaagtctggatgggcccacaggattctaacatcaaaaacagttggagatccttaagagatggtgccagatcctcttgaaggtcacaaagacaaaagcagagcagagacctgggcatttctgcctctgctaaacttccaatggtgggatgtagtggaactagatgggcaggccagctttgtgtgaccttgggtgaatcacacttcctccagactctgctttctcatttgtaaaaataggatctattaagatcctctcagtggcaggtaatataaactgaacttgaactagttcaagcaaaatagagaagttgggtttacataatcaaggatggatagggcacagtcgccaatgttttaggggagagaagccaggggctgtactaccaccaggtatgtcttccattctgtcttcattgtctttatattgtgtctcgtctcgtcccgtcccatcccgtcccatcccgtctcgtctgtttgagacacggtctcactcttgcccaggctggaggccagtagcatgaggctcactgtagcttcaacctcttgggttcaagcagtcctcccacctcagcctcccaggtagctgggattacaggcatatgccaccatgcctggctaattttttgaatttttagtagagatgaggtttcaccacattgcccaggctggtctcaaactcctgggctcaagtgatctgccctcctctgcttcccaaagtgctgggattacaggcatatgccaccgtgcccagccctttgtggctttctgaacaccagtatcattatcaggctggctgaacctggggagcagagccacaggaaaccttggcctgtagaccacaagaagtacttccactgctgctccagttagacaaatcctgaggaaggactccagttggccccagttggttcatgggcccatccctgttttaatcactgtggccaggtggtgtggggtattctgagtggcccacgataggttcggggccaactgggtggggaatgtcgtacaccttaggtggggcaaggaactgtgaactactcttaactggaagctcctgagttggctttatgtatacctgagggctgtgccaactttcagctgtccagaagcttccttttacttttttttatttttttattttttatttatttttttttgagacaaagtctccctgtcacccgggttggagtgcagcagcgtgatctcaac

SEQ ID NO: 98210 - DNA, 27240 bp, Homo sapiens
ccaagacctcagcctcccaggcgcgcaaggccatgattgagaagctggagaaggagggcgcggccgggtgagctgcagaagtgggctgggcagtggggggcggggcttgataggcagtggggggcggggcttgatagttggcccggcagaggcgggaagaccgcgcggctagatctgtggtgcaaaggcccgaaggtcatggaaggcggggcctgggatccactgggtgggcccaccgaggcatgccccttatagtcgtgtgacctggtcctgacaccgcccctacagcagccctggcggaccccgcgcagccgtgcagcgatccaccagcttcggggtccccaacgccaacagcatcaagcagatgctgctggactggtgtcgagccaagactcgcggctacgaggtgagccccgggaggccagggggcctggaggcctccccagaccccagctcaacacctccttcttagcagagctcctattacccagtacacttcctgccactgtgtggcctcacagggaacatggaaaggctcttggggtgaggaaactgaggctcaaagaggacacaaggcaagccctagattccagaatcagtgatgaagtaacagggcctcttgggtggtgggcagggttcaaggccggatcccactcttggagtcccctccttgttgctctgtaggaggccctgagtcaatttctctaaatgagggaaggagtgatgaggcatgaccatagccttagctgggtggcgctgggcctctcagtagctctgtcccttgaaattgcaaatatgggagttgacaggctgacttggaggaggctcatgttccaactattcactcattgtgcaagctacggggcctctttgtgcccagtgccctaggtctggaataacagaatgctgaggggtagacagcaggggggagttgcccccaggttcctgaccagtcctcctacggcttatagcacgtcgacatccagaacttctcctccagctggagtgatgggatggccttctgtgccctggtgcacaacttcttccctgaggccttcgactatgggcagcttagccctcagaaccgacgccagaacttcgaggtggccttctcatctgcggagtaagtgtgggccctggccctgctaatgttgctgcacatctggggctggacatcgggaccaggcccagttgccctgagaacccctggagcgggccagccacattgtcagtcagcggctgagacccccttccccagagagtccccgtccttctccatccccacccccccgctgctgagcgtgccaggtgcccgccggaacgaaggagccgcaggccggcctaccagcccgggccaaagcccaccaggtggccctgtccatatcccctccatcctccctctgcccccttctccctctctctccctttctctgtcctgctctcctcccactatcaccagagcttcctgctcccacgggatcccggctggagattccaaaaggaggctcctggcccgggcaccgtgcccgcccagcctatatagtgctgccagaggcttatataggacctcagcaagccctccactttggaatcgttgccccgtctgctcacctcaccctcagcacccttctccatctgtcttcccttctttccccttctctttctggtttccctcaaatttcttcctcctcctccttctcctcttcctcctccccccacctcctctcacgcctccctcaccccctctccccggggcacagccctcctctccaaccttggtgccaacgccatcgcccccaccccgcgttcccgcttgcccctagagttctctgcacctgtgactggtttggcccccacccttgtctgcattgcacaccattagtgatgggtagtgagcggcacgtccacagtggggaggaggcatgcggggggctggcagactgcagcactggaatcgtaattgaactcatgtctctgtgtgtgtgtgtgtatgtgtgtgtgtctctgtttcctcccctctctcttctctgcctcttccctctcttccccacccggggccctggcctcctgcccccgtcccccaccccttcccggccccctaccctccccaggacccatgcggactgcccgcagctcctggatacagaggacatggtgcggcttcgagagcctgactggaagtgcgtgtacacgtacatccaggaattctaccgctgtctggtccagaaggggctggtaaaaaccaaaaagtcctaacccctgctcggggccccacggtgagaaacgccgcctctcccacctgccccgtttcaccagaatctgctcagcaaggccagagagggtccagggaggcgggtgggggaagtaaggggggcatttagtcaagccagaggagccagacatagccctgtcttctggcagttcagggcccagcaggtgagaccattctaaatgggcagtgatgacccaggtgggcagcactgtgatgggggaagcccaggggagatgcctgacccaggctgcaggtctgggccccccatctgaaaaaagtgcaaactaagctgggatctgaacaagttcaggctaaaggagggagagggagttccaggcagaggaatcagcctaggcttagcagggcaagagagctggagagcacagcacatcaggaagggaagaaacttgagtctggatatgagggaggagggggccacagttagaagtttgaccttctggccgagcacggtggctcatgcctgtaatcccagcactttgggaggccaaggtgggcagatcacgaggtcatgagttcgagaccagcctgaccaacatggtgaaaccccatctctactaaaaatacaaaaattagccaggcgtgtggcgcacacctgtaatcctagcgactcgggaggctgaggtaggagaatcacttgaacccaggaggcgaaggttgcaatgagctgaaatcatgccactgcactccagcctgggtgacagagcgagactccatctcaaaaaaaaaaaaaaaaaaaaaaaagtttgaccttcctcctgaggacaacaggagttataaagggtttccaaacagagaagggatggatatagcattctaggaccttcctcggatgaggcttggatgagagatgggatggactagatgactggaatagcttaagagctagagagacaggcttcccaatagatctggtttggagagggagagggaaggtcaagaagtctgccaggctcctgtgtgggcactggggagttggtggtgccatactccaaagtggggagctcaggagcaggaccagttcaacaggaagatgtttctggctggggactctggatcctaagccagctgtggcatttcctctctggtcacctcacctcagtaccaaagtaaagaattcagatcctaaactaactaccccattacagacaaggagctcagagagagacgtgggctaagactgtcctgggggtgggagggagagggaagatggttaggtcagagctggggccagaaactgagactccaaactccccacttagtggctgttttccttgccccatcactgtgttcccgcccattttgtagagaggattgaaaatagaggcccagaaggagcaaggggattggctgaaggaatgtgagtcagtgacaggtaggggcacactcagatgcccctcagggcctggagccattgtggggggcagtccacatgtgcacacacacactcagagaaggagcacagatgagtggcggatgggcttggtgctatctccagatcatatatggacttaggagctgctgcccagcaagccagcttggagggagaggggcccagcccagccctgatccagttggaaagtgtgactcagccgtgctgttgctcaagttgcctggtgtttggcctgtcactggggcagcctgagccctgagccctgagccccagtgtaaacaatggctttataaggtctccagggaagggagtggggcgggagggagcaccaggttggagagggcggtcgggatccccaggacgatagccacagctggaagaagcttcagagagaggctgcctttgcatcatggtacagctcgggaaacaagcccagtctgggatagggatgaccctaggggcacgtggcacatcagcagcagacccagaaccctctcactcatcctaaattcttgtaaggtctcaaatgagatagagaataactgtcctgttctaaagagggggaaacagtcatagaaaagggccttatctagcacccacaactggttagggatacagtctggactaaaacagaggtgttcggtgttctgcctcccaggtttcttctctgaaggagtccaggtgagctgggggtaggcccagccctaccacagttctgagtttgtccataagggcacgagatgggaggtggtcttgggttctcaggtgtcttgagaataaggagcaattgttgccattatgccttccctgccataggaaactcattcagcaacattgaatgcttgctatgtcccaggtatggcagataggagggatcaaggcagaagaggtcttgctctgggggttgagggacaggggaaaaggagccagagagcagactccagcttcagagctctgggagctgtcagttgcttaataggcacaacccactcactccagagtggggaaaaggctttgccaacacccagaactgggggcctgggtcccatgcggcctagcctgcacttactaagccatggggcttgaaacaaatggctcctctgctctgtgactcagtttccttatctgtgaagggcagctagcattctgaaggatggccagaagggtggtccccccgagcatggcatagatggtccattggtattggctgggatcctcatctgcctcctctgctctacccaaggcaggtgataagggttagagaacccctctgctgcccacacgttccctggcctccatctccagcagcagggttatccccaccccctgtcaaagaataggggtccctgggcctctcaacaggaagtaccagatcaggcagctagcagacaatcatcggtggaccacagggccactagagtgagacctatccatagataaagattggccagtgatgaagcccatctgggtgcaaaggccgagctgagaggcttctaccaactggagtgtgccagtgagggtgagcagaaggtggtctccagggagaacatgggcagggtttggagccagcacctccccagggttggaggaagcagacccaggacctgcctgactgggatggggctctcttctgccatctccgcctccacctgcctagctctgctcccccgccccgagagatgcctccaggcttgggtagatgaagccaggggcttcctgccttcctggaaggcttttccctgtctggagtttatgaaagaccagcaggcaatgcggcaataaaaaagaccttggggtagaggggcgccacgagaggcgggtctggcgctgacatccaaccccgtgccccctccctgcaggatgctggtggactgtgtgcccctggtggaggtggacgacatgatgatcatgggcaagaagcctgaccccaagtgtgtcttcacctatgtgcagtcgctctacaaccacctgcgacgccacgaactgcgcctgcgcggcaagaatgtctagcctgcccgcccgcatggccagccagtggcaagctgccgcccccactctccgggcaccgtctcctgcctgtgcgtccgcccaccgctgccctgtctgttgcgacaccctcccccccacatacacacgcagcgttttgataaattattggttttcaacgatcctgactcctctctgcgtctcctgggggtggggagggggtttgaaccgaaggcagctccgcaaggtctccaactccagcagggatcctcagaggttcttcttccgacctcccaccccacccgcccgcagcaacgaaggagtcgagcctcagttaaggcaggagggaatttagtggagctggggaaggaagaaagtggggttgggagaacctccccaaccccatccctgctggcccggggacgggcatcggctctcagcaagagaagtattcccgggatgctgagcgcttcattctgtctccaggactcaggcaggtaggtcccagctccgccgcgcccccggacctacaggtcagcgtggtccgaagtttcctctgggggcttcgcgggcgcccacacgtactcggggggcacctgcgcgtcgggcgccgccttgcggtagaagccgagctcctgcactagckcattgatctcttcgcgggtcatttcactgagtgggatgcgctgaggcggaggaggggcggggtcagcaggctgggcctcgcctctggcctcgcccccagcccacctcccacggcctcacctctagttcctcstagcggcggcccagcagcacgagctcagggtcggccccagggaggtgtttcatcaccaggttgtgactggaggtggtgttaaggagcggggtggtgggcagagggaggtggtggtttccgcagccttactgatgggaacagcattgcctcctttgctcagagcttactctgtgcccgggaggggccagggtctccgcttatacgtgagaaaattagggttcaaagaagtaaagggccctcctctccattctgtggcagtcatcactagtcaatctctcttgcccacccaacatggagaccacctcagaatcctctgggagccactaccaatcaattcaacttgtcagttgaaaaccatctgccacccctttctgaagttacgtggagattctcccaggtgcccatcccatttcccctcccccagaacagaaggatactagaatggaatgtcctgcgtgacgaaagccttcacctggggaggaaccagagcatcagagaccatgacctcagtctactcgaggtacagacgagacactgaagcccagtgaggtcataaarcaagtcaggtgcaggctagactcycagcctaggctagactctcagcctagggatccttcccccctcccygccccagtcattgggaccatgttgcccactccccaagaggctcagggggaacagagctagggacctcttccttcaaactcacctcctttaggcggttcagctgtcatcccccgcaggtctggagggggataaaatgggataggtcagragtccttcacgtttattccagtcacatccccaaagccatacttccttatccctgagttgggtcgggctgtgagttatcccyggatcagcagttcccaaggtctgaaggaaatgctggaccctygtgggcagaagggggaactgtgtatacaggtggggagactcaggcctagagacaccaggggaaaagagcaaggccagagacccacagtgtgcctgccagccttggggcctgtacatcctactggctgtggactgactcccaatgcccaggggaaatgatcaccctgctcctcttaagcagtagagacctgggcttggcctttgatccctgaaatctcacagtggaggcagagcagaaggaaacacctcagaatggccctgggggcccccattggagacacctaccatctggtccctactctacacaggcagacctcaccctgcctgccacctgcggcccagccccacagaccatgtggttgcttccctgacatgggaggatgggagggctcctccctgccttccctgaggagatgccaccatccagcaggagtctagaccccaggaccacccactccagccctcctccatcctaccctcagcccttttcttagagacagggtctcactatgtcccccaagctggtcttgaactcctgggctcaagcaatcctcctgccttggcctcccaaagtgctgggattacaggcgtgcaccaccggcacccaaccattctacacccttttgtcrgacagagctgacaaaaagctcagaggcgggctgtgatggtcaaagtcacatagcaagacagggactccgaacgggaatttcctggttgggggaggatgggaggctgctgcagagtaaatgttggcaaccaagttcccaactcggttgcccctccgagttggcccccttccccggatcctgcatatgggaggaggcacccagaaagtcttctttccccccaggagaaggaaaagagactttctggagcctccagccctggaaccgggtcgggggggaattccaggaaaacatgaagtgatgggggatgggaagttgggacaggattgggagtcataggccacgagaagagttaggagactgcgtcagtgtgtctgggtgtccgctgtcggaccgggtagggggagctggggaagggttcggagttccaggccccaaagtcggtgtctcaggcttccacggtggatgctggggccatctggggctagggaacaggagggatggtcccggcgccagggggaaagcagggagactcgcggttcgaggtggtcttggggccgggacggacggtgctcccatggggccgcagggttggggaacgatagtgccggggctggaggccggcgtactcacctctacccgggcgcgggttaggccgctcagacggttccagtccggccggtaggcagtggcggctgtggctggggccacaagcgccgcgagaagcagcagcagcgccagcggaggcaacaggaggctcatcgggacccggccgcagatgatgcgcaagctggaggcgaacctccgagtcgctgcgccacgtctgggcctccaggctggccccgcccccgccccggcccccactcccgctagaggcccagtcccgctggagaccacgcccccagcgctcggtctccgccccaggactccccgccgttacctcccgctagctcagggcgaggtcctggctcctccctggcgtttgggccgtcactttcccaggtccgagagtgtcgacgctccttttgtcgaccgaggatgtggacgctcccccaggatgcggccaggcagcgccacctcacgccggcagagggtgccggcgagacgctgagggacactggagtttctgagccgaacctgcgactttaagatagggaaactggtaggacatccaagaaaaaaaaaggaaagaaagaaagaagaataaataagggaaactggctttctgaggactcctcgctttggagcgtgggagatgaggagtgaggttcggtggagggggtgcggcttctgggagccactgagacctaccagcgtgtcttcttaccatccacagctactgctgagcagactttctgacctggggtgaggmaaggaatttgctattcaaaggtgggaagatgcaaggagggttacagctgataggccacaacagggtcttaaatcagctgggttaaatttatggagtcaggatttacttttttttttaatgtggctatccaattcaattaaaaatcttgtctttttcattgctactctgccgcgttacctctgttatatataaataggcaaccacggccgggcgtggtggctcacacctgtaatcccagcactttgggaggccgaggtgggtagatcacttgaggtcagaagttcgaggccagcctggccaacatggtgaaaccccatcgctactaaaaatacaaaaattagctgggcgtggtgtgggcgcctgtaatcctagctacttgggaggctgaggcaggagaatcacttcaacctgggaggcagagtttgcaatgagccgacatcctaccactgcactccagcctgggcgacagagactgtctcaaaaataaataaataaataaataggtaaccatataaatatatgggagtctacttctgaatatcataccctattctagtccttcagtgggtttgtctaactacgctgtcttattaactatagctttatagtcagacttgacatctggttgtgtgttggtcctctagctttgttctttctttctttctttttttttttgagacggagtctcgctctgttgcccaggctggagttcagtggcctgatctcggctcactgcaacctccgcctcccgggttcaagcaattctcctgcctcagcctcccgagtagctgggactacaggcacgcgccaccacgcccagctaatttttttgtatttttagtagagatggggtttcactgtgttagccaggatgttcttgatctcctgatctcatgatccgcccgtctcagcctcccaaagtgctgggataacaggtgtgagccactgcgcctggcccatttttttttgtttttttgtttgtttgtttttttgagacagagtcttgctctgtcagccaggctggagtgcagtggcacgatctcagctcactgcaacctccacctcccaggttcaagcgattcttctgcctcagcctcccaagtagctgggattacaggtgcccaccaccacgcccagctaattttgtatttttagtaaatatgggggtttcatcatcttggccaggctggtctcgaactcctaacctcaagtcatccacccgccttggcctcccaaagtcctgggattacaggtgtgagctgctgggctggctatttttttttttttttttttgagacagagtcttgctctgttgcccaggctggagtgcagtggctcaatcacagcctgaacctcccaggctcaagcaatcctcccacctcagcctcctgagtagctgggactacaggcatgcaccaycacgcccagctgattttttttttttttttttgagacggagtttcactctcattgtccaggctggacactctcatgtccagtggcatgatccggactcactgcaacctctgcctcccaggttcaagcgattctcttgcctcagcctcctaagtagctgggattacaggcgtcggccaccacacccggctaattttttgtctttttagtagagacgaggtttcaccatgttgaccaagctggtcgcaaactcctgggctcaagtgatcctcctgccttggcctcccaaagtactgggattacaggcatgagcgaccatgcctggcctgtggcctacattttcctgtggtgagggccatgtgtgatcccacagcctcagtaagccatcgcagtctagctttgttcttcttgaaggttgtcttgactatacttggcctttcacacttccaggtacaatttagggccagctcgtcaacctccacagaaaaaccttccaaatttctatcaggatttcagattcccactggggaaatcaatgtggggagactctacagctttacattattgtgacttttcttccacgaacatagtaagtccctccatttctataggtcttctttaatttccttcaataatattttgtggtttttagaataaatatcttgcatatctttcattagatttactcctaggtatttaattttttatagcattacaaactctattgtttttacatattcattttcaagttgcttggtagtagcatataggaagacaattgatttttgtatattaaccttgcagccagtgaccttactgaattttcttactctaatagtttaactggatatttttttttattttctacatatgcatattatatcatctggaaataaaagtggttttcttcctttctggtccttataccttggttttgtttcgttgcactgtcttaattttacggtctggggcctctggtacaatgttgactggaactgataattgtctttttccagatatcatctttaaacgatcatgtttgctgtaggtttgttactggtgccttttgtaaaagaaagttttctatttctatttttcttagagcttttatcatgaatggatgttgaactttgtcaaatgttttcctgcatctattgagatgatcatgtggtttttctcctttattttattaaatgtggtaaaatatgtgaactgattttcatatgttaaaccttgcattcctgtartaaaccaatttggttgtagaaaaaaagagataggaaaaccgaaccctagggaatccctgtttgcgctgtttgtttattcagtagattacggggtcttgctgctgaccaggctggtctcaaactcctggtctcaagtgatcctcctgcctcagcctcccaaagtgctagaattacaggtgtgagccactccacctggcctttttatttctttggacaaaaattccaatcaaggtttttacttcccagagcacacattgtggtgatgcaatattgtgtaccctgttggggttggcaggataaaggggttaacacatataaagctcattagaacagtacctaatacaggacgggcatggtggctcatgcctgtaatcccagcactttgggaggccaaggtgggtggatcacctgaggtcaggagttcgagaccagcctgaccaacatggtgaaaccccccacctctactaaaaatacaaaacttagccaggcatgattctcatgtctgtaatcccagctactcgggaggctgaagcaggaaaattgcttgaacccggaggcggaggttgcagtgaaccragatggcgccactgcactccagcctggggaacaagagcaaaattctgtctcaaaaaaaaaaaaaaaaatttagctgggcacatagtggcgggcacctgtagtcccagttactccagaggctgaggcaggagaatcgcttcaacccgggaggtggaggttgcagtgagccgagatcgcaccactgcactccggcctgggcgacacagtgagactgtctcaaaaaaaaaaaaaaaaaaaaaagactgaggcgggcagatcacgaagtcaagagatcaagaccatcctggccaacatggtgaaaccccgtctctactaaaaatacaaaaaaattacccaggtgtggtggtgcatgcctgtaatcctagctactcgggaggctgacgcaggagaatcacttgaacctgggaggcggaggttgcagtgasccgagatcgcgccactgcactccagccaggcgacagaatgagactctgactcaaaaaaaaaaaaaaaaaaaagtacctactaggacagtgttagctttcattatcagttccttccttacctcataaagaccccgtgaactccattttgcaggttaggaaacaggctcagaaaggtgaaatgagtgaactgtggatttgggacttgaacccaacatgtctctgcactcatcttgagagtccggagtttcttccttccagtgggttggtggtctcactgacttcaagaatgaagccgcggaccttcactgtgagtgttacagctcttaaggatggtgtgtccagagtttgttccttcaaatgtgtctggagtttcttccttccagtgggttagtggtctcactgacttcaagaatgaagccacggactttcacrgtgagtgatacaactctcttttttctatttttcttttctttctttctttcttttttttttttttgagacggagtctcgctctgtcgcccccaggttgaagtgcagtggcacaatctcaggtcactgcaagctctgcctcctgggttcacgccattctcttgcctcagcctcccgagtaactgggactacagatgcccaccaccatgcccaactaattttttgtatttttagtagagatggggtttcaccgtgttagccagggtggtcttgatctcctgacctcgtaatccgcccaccttggcctcccaaggtgctgggattacaggctgttgcagctcttaaaggtggtgaggacccaaagagtgagcagcagcaagatttattgggaagagcgaaaggacaaagcttccacagcaccgaagggcacccaagcaggttgccrgctgctggctggggatgaagggtggcagtggcggccagctttyagtcccttatttgtccccgcccacatcctgctgattggtccattttacagagtgctgattggtccattttacagagtgctgattggtgcatttacaatcctctakctagacacagagcactgattggtgcatttttacagagtgctgattggtgcatttacaattcttcagctagacacagagcgctgattggtgcatttataatcctctggctrgacagaaaatttctccaagtccccactccacccaggaagtccagctggcttcacctctcaatctcatrcataagcagatagctctttctgccatgtgctgccataatggtgtgcatgaatgtcccggctgatgctctcragagcatcaacaatgccaaaagagaggcaaacaccaggttcttataatgtcgtcgtctggtttctaactgtggtgatgaagcatagttacactggtgaagttgaagtcattgatgatcacagagctaggaaaactgctgtgaacctcacaggcaggttaaacaagtgtggagtaatcagcccctgatttgatgtgcaactcaaaaatctagaaaaatggcagaataatctgctcccatcctgccagttgggtttcattgtactcacaacctcagctggcatcatggatcacaaagaagcaagacgaaaacacacaggaggtaaaatcctggaattctttttctaaggaggtaatatgcatttgcagataaaatgcctacaattaaaaaaaaaaaaaaaaggagaacggatcaccagatcaccagattaggatgccagttctcttcttcatgctttcttccacagacacagcaagttcgtcactgtcctcttttcccattgaatctagggactccttctcaataccgagccaaggctgcattatgactttcatggatcctagggttttctttcttttttctttttttaatttttatttttattttgagacggagtcttgctctgtcgcccaggctggagtgcagtggcacaatcttggctcactgcaatctccacctcctaggttcaatcgattctcgtgtctcagcctcctgtgtagctgggattacaggagcgtgccatcatgcccggataattttttttatttttagtagagacaggatttcaccatgttaggctggtctcaacctcaagtgatccgcccgcctccgcctcccaaaatgctggggttacaggcatgagccactgtgcctggcctcttttttctttttttttttagagacagggtctttctgtgttgtcccagctagtgttcaactcctggcctcaaacaatgctcctgccttagcctcctgagtagctgggatatggacacatgcctccattaaatatacataatatacataaatattatatatatttgattttcaattgctttggtaaaaagataactataatctaggctggattcattattattagtatatgtttccttttttttttaaccttaacttcccagtgtatccttctaattttaaagaatattaaaaacattttcgaccaggcgcggtggctcacgcctgtaatcccagcactttgggagaccgaggcgggcggatgacaaggtcaggagattgagaccatcctggctaacacagtgaaacccccccgtctctactaaaaatacgaaaaattagccaggcgtggtggcgggcacctgtagtcccagctactcgggaggctgaggcaggagaatggsgtgaacccgggaggcggagcttgcagtgagccgagatcacgccactgcactccatccagcatgggtgacagagcgagactccgtctcaaaaaaaaaaaaaaacactttcatggaccccctaaaagtatagtgggccctaaacactgagcctactgtgccttctagagaagttaagtctgcactgagtcttttgtttgcaccctgctaacttcccctttactaacttgattgtaaagatataaaaataataggcttggccgggcatggtggctcataccaataatcccagcactttgggaggctgaggcagggagatcacttgagtcagaagttcgaggccacctggccaacatggtgaaacctcgtctctactaaaaatacaaaaattagccaggcatggtggtgcatgcctataatcccagctacttgggaggctgaagcaggagaatcacttgaacccgggaggcagaggctgcagtgagccaagattgtgccactgcactccagcctgggtgatagagcaagactccgtctcaaaaaaaaaaaaaaaaaaaaatatwtatatataatatgagtatgtagtcaatatgattagtcttgtccagactattcacacagtaagctatctctaacactctgttcactgctggggaagtatgaattcaccctggctttctgaagggcaaaatcaaaactctaaaaactttttttgacccagtaattccatttttcagaattagccccaaagtaatcatcagagagaggattgttaggtcaagcttgtttattagaataccatttatcgtggtgaagaactggggatataacctaagcatgtcacagcaggggatgagttaaattaatgagtgtacctccataggatggaaaaccatgcaattgttaaaaatgatgcagcaggctgggcrtgggtggctcacgcctgtaatcccggcactttgggaggccgaggtgggcggatcacctgaggtcaggagtttgagagcagcctggccaatatggtgaagccccatctctactaaaaatataaaaattagctgggcatggtgatggctgcctgtaatctcagctacttgggaggctaaggcaagagaattgcctgaacccaggaggcagaggttgcagtgagctgagatcgcaccactgcactccagcctgggcgagtgagactctatctcaaaaaaaaaaaaaaagatgcagcatagatggaatgacatggagaatgttcgtggttatggtattaaatagcaagaaaaaagcaacaaaaacagtaatctggtaatatcaattgggagttgtgatgctgtgggctgcaagtcatagaaaccccaatttaaactggcttaaacaataaagggagctggttgtggtggcttgtgtctataaacccagctactcaggaggctgaggcaggaggataacttgaggccaagagttccaaactatcctggacaacatagtgagaacccatctctaaaaaaagatatttaaaatctagccaggcatggcagtgcctgtagtcccagctaccccagaggctgaggtgggaggactgcttgagcccaggagttcaagactacagtgagctatgatcatgccactgcactctaacctgggagacagagtgagaccccatctcctataaaaaataaaaaataatacagtaagccaagatcgtaccactgcactctagcctgggcaatgtgagtaagaccctgtgtcaaaaaataataaaaataaaggggctgggcccagtggctcatgcctgtaatcccagcactttgggaggccgagataggcagatcacttgaggtcaggagatggagaccagcctggccatcatggtgaaaccccctctctactaaaaacacaaaaactagctgggcatgatggtgcacacctgtaatcccaactacttaggaggctgaggaagagaattgcttgagcccgggaggtggaagtttcagtgagccaagattgcgccactgcactccagcctgggtgccagagcgacactcagtctctaaataaataaataaataaagggactctgttggctcaaataattttaaaagtccaggacaggcacagtggctgacgcctgtaatcccagcaatttgggaggctgaggcgggcagatcacctaaggtcaggagtttgaaaccagcctggccaacatggcgaaaccccgtctctactaaaaatacaaaaattagccaaacgcagcggtgggcacctgtaactccagctactcgggaggctgaggcaggagaatcgcttgaacctgggtggcggaggttgcagtgagccaagatcgtgccactgtactccagcctgggcgacagattgagactccatttcaaaaagaagaaaaaaaaagtccaatggcaggtggggcttcaggtgaagtttgatccagttaatgaagtcaccaaagcctggtgtctctccattctgctttccataatgtcagtttatcagtaggccaattttctacatggtgtaaagatggctgccagcagtaactagagccattggcctcttcatttacatctaatggaaggaagatcatcttttttggcagcctcctcaggagagaaaataagcttcctttcccaaaagccctgagcaaaaatttccttgtatcttgctagttcattcgtgatctaatcatgtgcctggggaaatgggaattgcttactggcttaaccaactgggacccattcctgaagctgagggtggggtccaccatattccagttcctgttaagaaggagatgggctgcaaccttaacaggatcctaaccctaaccctaaccctactgtgttgctggacattgtggcagcaacacagtaaccaaccaattctataaaacatgtataggcccagtcttggtggctcacgcctgtaatcccagcacttgggaggccaaggcatgtggatcacttgagtccaggagttcaagaccagcctggtcaacaaggcaaaaccctgtctctactaaaaatacaaaattagctgggcatggtggtgcatgtctgtaatcccagctactcgggaggctgaggcaggagaattgcttggaccagaggtggaggtttcagtgagctgagatcatgccactgcactccagcctggacgacagagtgagactccatctcaaaaaatagatatagctatataaaatatataacacgtatatgtaaatatacatgtatataaatatatatgcatattatatacaacatgtatataaatatatatgcatattatatacaacatgtatatataaatatatatgcctagacccccgcccccaccaaaaaatatctataaggaaacaaaccaataagtcagaacgattatttcttggtggatgaaattataggtaaatgttttccttctgtgttttgtgtaatgggcatggattacctaaacacaaacagtaaactttatttacgaaaataatgggacataccccactatttccttctactccaacccctaccccagcaagggcctcagagtaactgaagccagaggccccacggagtcgttcttgctgctgacagagccaaaccccagtaccccatgggccctggttgtttgctggacagatgccaccaaaccactctcattgcattagcctggatgctgtggcccctaaaggccacagcttgggctgctgagggttgaccaaccagccagtggaaccagtggtggagactgtgaccataacagtaccaggaaggaacactgtggcatcagcagcatgagaagcccaagatctcccaagacagatctctgcccataatccatgcctcttatgtggcagcatgtaatttaggccagcagtcttcctcargtggggccaaggttggggattagtctgtgatggggtcaggctcagacagggtctaggtcascccttagttgagtagtctgtagcctagggctagatacagggctcagtccatgattgggcttagtcttyagtctgtgaccaggagccaggctcagtctgtgaccagggtcatgtctctgtcaatgactaagttcagggctcagtctgtgaccagattcagggcacagtcttccgtttagggctcagtgtgtgaccagaattgcatgatccagggtcagaattcagtctgtggtcagagttcagtcaatgattaggctcaggactcagtctttgaccaagattagggctcagtcttctgccagagtcagggttaaaaggttagtctgactcttctgccagagtcagtctaaaaggttagtctgggctggggctagaattcagtctgtgactaaggctcagtcttagaraaggataagggcttgatctgggcccagaactaaggtctcaagttgggatcagcctaattcaggcttagatcagtatgtgactagagtcagggttcattctaaggtgatgtcagagctcagtcaagagctggagtagaggcttagtcaataccaagagtcgggttcaagttggaggatcaggaccatgaccagggcttaatctggctctatgctctgttctgagctccaataaagaagcttctggaggcataggagcccagagcaagtcagtctgcaagaaatgagagcccccaggcaagcttagcagggtctggtggctgcaggaagtttcccctggactgctgaggccgggtgtcctagagcctctaacctacatggctctgctgcttgagatcccctcgcaccagaataaaaatagccactcacttcagmgcagctgacagcgggtgctgggctgcctaggaggagggggagccgaagagaaggaggagagaggcctgagctcagccccagctgtgtgaccttgggaaagtcactcctcctcctccagcccatttcctgagtggcagaatggggagtgaggatgacatctgcctcagagggtgagaatgaagtgctggggacataacmtgtgaagcttgttaccaacaagaaaccctggagtgaagccttgggagaagaaatgctcttttgtgccctgtatacttcctcctcagggaagccctcccagataaccccttctttcacattcccacaatatcctgtatcaccctctacacctttgcagatggtagccatagcatgacctccctcatggcgggcctgggtcagggtgaccagggagagaaaggaaggaggacagaccctcggtaccgttgccatcctcaggtgcccctggaaagtgaaccgaggaagaggaggaggaaaaagacaggaaagacttctctcccttccctgctcatgtttactccgaaccaaagggcaggagggtacatgtccaaatttctcatcctttcacagccagaaccttccttccccatccatgctttgtacctgctgttctctctgctttccagccagggcgtttctcttcttcgatttggcagcacggactctccttcaaagaaggggttcaacagtcagctcctctgtcgggaagaattatccactgcctctccaggagctccatgctctgtcctctctctactggctgtgtaatccctgggcctcggtttcttcctctgtccaatgggggcctcattaccaacctcacagggttactatggagagtaactgggatactccatctatcactggcatcctgccttcctatccctgacccacacagcctgaaggacagcactgagtttccaggagtgggctggatgagccctggaccctgcctcagtacgcccacccccctcccccaccaagagtgagggcaaggagggagccagaaagggcctccagagacagccgtctccaggggggcggttctccctgacagctgcccccagcctgccgccctgagccccagagcctgttatcaacctccttagtcatcacaccaggagctcaaatatagctccaactcactcccttttcagctggggtccgccccctacccccttctcctgacaagaccaggcttgggtctcagagccccttccttgtcctcccaggagagtaaccaccctcagcctgtttcagcatccaccacatgggcaggctgaagtcaatggtggtgatgatgatgatgataaatacagagcagccacctttatggagagcttgctgtgccaggctctatgctaaacatttcatatatattatcctgttgaatcttcaccagcaaacttaggaggtgtctgctgttttaatctcccttacacaaattgggaatcagagtgacctcctcaagtaagtcagtggcagggccagaaacaaagtcccctgcagggtctgagctcagggagcgggtggtgggaaatcctgggttgccctcctgaggcagaggagccctctgcagacacatttgcatgacatttgcctggcttccaaagggcactgatgcccctgtcccagccctagatggctgagccttaggactggtcccagaggcctggatctgcccatcattccctctaggattgcatgaaaagctgggtagtcttgggggctcccattttctttttcttttttcttttctttctttctttttttttttttttttgagacagggcctctctctgtcacccaggctggagtgcagtggtacgatcttggctcattgcaacctccacctccacctcccaggttcaaacaattctcctgtctcagcctcccaagtcgctgagactacaggcatgtaccaccacacccggctcatttttatatttttagtggagatggggtttcgccatgttgaccaggctggtctcgaactcctgacctcaggtgatctgcccacctcagcctcccaaagtgctgggattacccgcactttgccagtactcccccagcccgggggctcccattttcttatttgtaaaacaggagacagaggataagacaggatgagttcgaatcttcctttttctggtaacctgagcatcaccaccaggtctactctcacatcctccctgactgtcacctccaactccaacactacctctttcattgacacaacaccatcatcagtattggtatcatcatcacctctacctttgccatcaccatcacctccaccaccttcaccacaaccactgctagccccctacttccatcatcacagttacatacatcatcacatccatcaccacagtcgccttccccgtcaccactgtcaccatctccactatcgctgtccaaagacctttctaccccaacactctaatatggcctgagtctctgcccctgcaaattccagcagagatgctggcctgagaatacagactagacctactgacagtcaagcagaggtaggaagtgccttcaggagaggaaagtgaggcatctgccttcatgtaggagactgcacaggcccatgcagatgctccatgttggttaacagggagctctgcacacacaactctgaacactttctgcctaaagtgggtgggatcactcctctctaagccatgagaaacagatcccacagccatcccagcccaatctgaccctcatcacccattcactcttctaattcatttattcattcaacaaacactcccgtaggcctgttggggaccatgtcctgggctgggtcctggctgtagcaattctcaggcctgtttgtaactctcttgtcagtctgttaccccactgctgggcccttctccacccaagttcccttcccccagatagctcgaagggcttgtgctcatcctaggtcactaagttttctcactgaaacacaggagaccttctcagttcaccaggtgaccttgagcaagttcccctcccaaaccacacccagtgaatactggagagaagaaagctgacagaagccgggctgggttaggcctggctgtggggacatctgagggcagctaggtgtctgcagaagaggaggggctggtgctgaggcctgagatgggaaaagactgcagtggctggagcctgagtgtctggttctgggttgggaagaatagagcctgggactggcagtaggagtggagagggtggcaccaagacctgaaaatggggcaagggtgggggccggggcaagctctgagctggcagggagccaggaaggtcacaggatcagggcaagaactcagttgtctctgaggccctggagagggtgcagacctctgaaccacctgtcctaccttaaggcaggtgtgttaatgcccctccctggagcaaagggctgaccaggcctacggcagaaaggtgaaggtagacagacagcctccttcctgctgccagttgggacctgggccaggcagatgggtacactctcccctccccactccatggctgttccagcctcagcagcctgtttgaaggattcccagggggtagccaccttgcttcggcctcttccaggctgggaagtgggagcctgtgcctttaaattctcagcaggttgaaatggctgatgacatcactggttcccgggagcggtagagctggagccggagccaagggagtccaggctgccgggggctgcagacatggagggccagagcagcaggggcagcaggaggccagggacccgggctggcctgggttccctgcccatgccccagggtgttgcccaaactggggcaccctccaaggtaagacccctgagacccagtgccccccgctttcctgatccctggttccacacaccccccccacatacactgcaggctccctggtgctcctgactgaggggctggtactttcctctgctcagcgagcaggggctaggtgaagagagcaccctgggggctgaggggcagtgacaggatgcccggagacagatgaagttagccatctccaggagcccttgggagagtcctggactgggtatcagaggacccagctgtgctccacctttgctgtgtgaccttggccaagttgcttttcctctctgagccaatgcaaaatgagggggcttgtcgctgaagactaaaactgtgacatctgggatggctaagttgttagtactggaggcggtgtgatagttggggggaagccggcacacagtgtgacacttggagccaaggagggtgcctaaaatgccacctcaaagaactgagtttgagaagggaggtggagatggagttttaggtactctgaactgagaaggatacgggacagaaacagaagtgcgtctccagaggcagggcctccctgcgccctgttaccctacctagggccatcctggggcaagtatagacattcttctgccctccttggtgaaggacactttatcctgtcttctggagacaggggacatcagagagaatagatggggaaggaggataggtctctacaggactccgtgactccccacccctcccacctgccggacataaatgggatacctgcttgcctgtcctttcaggtaggggagaaagtggaggatgtaagagggcacaacctgggcacagagagatgtgacaccaggatcaacttagaatcctggacttgctctgaatgctagattcacacttggtgaggatggactattcaacggggctagatggaattctagcaaatgttgggctcataaatgcagacaatgggagatgaagattccccagaatataatgtggccaggaaccctagaccccatcccttcattttacagacagagaaactgaggcgctgggcagagaggtacttgcctaaggtcacacagagctgggctttgaatctacacagccagtctcagctcccagctcttgctcctgagtggagctctgggaatgggtaagagaacagagagggctgtaaccaagggatttggatgtttagggggcggtggggaactgagggtttctgggcattatgaaggaagggagaggtatttaacaagctgcacctgtaggtctgtatcttgacaatagaaaaagaaaagaaacaggctgtccccagtgtgcccagacctgggatgtcaggtcagtagccgtggctgggggagcttcagggactgcagtgggagggttgcccagggaagctgccccgaatgggcagggtgtgggtgccagccaggaaggcaaggcaagtcctcaggtttaggttcacactctgcctcatttgagtcagggtctgagtttccccatctgtgaaagaggtttcagacttaaaggaggggttagggttttgtgtcctatctcctccaagacagaagttgacctgcagcagaatagattgaagtgagatagtaggaagaacttccttggaaagatgtgcctttcttagctagatgaactctgccagggtctatatggaagttggggcccaatgccctggttagggtcactctgaatctttgacttgtcctccacaaggtggactcaagttttcagctcccagcaaagaagaacgcagccctaggaccctcggaaccaaggttggctctggcacctgtagggccacgggcagctatgtcagcttcctcggaaggaccgaggctggctctggcatctccccgaccaatcctggctccactgtgtacccctgaagggcagaaaacagctactgcccaccgcagctccagcctggccccaacatctgtgggccagctggtgatgtctgcctcagctggaccaaagcctcccccagcgaccacaggctcagttctggctccgacgtccctggggctggtgatgcctgcctcagcagggccaagatctcccccagtcaccctggggcccaatctggccccaacctccagagaccagaagcaggagccacctgcctccgtgggacccaagccaacactggcagcctctggcctgagcctggccctggcttctgaggagcagcccccagaactcccctccaccccttccccggtgcccagtccagttctgtctccaactcaggaacaggccctggctccagcatccacggcatcaggcgcagcctctgtgggacagacatcagctagaaagagggatgccccagcccctagacctctccctgcttctgaggggcatctccagcctccagctcagacatctggtcctacaggctccccaccctgcatccaaacctccccagaccctcggctctccccctccttccgagcccggcctgaggccctccacagcagccctgaggatcctgttttgccacggccaccccagaccttgcccttggatgtgggccagggtccttcagagcctggcactcactcccctggacttctgtcccccaccttccggcctggggccccctcaggccagactgtgcccccacctctgcccaagccaccccgatcacccagccgttccccaagccactccccgaatcgctctccctgtgttcccccagcccctgacatggccctcccaaggcttggcacccagagtacagggcctggcaggtgcctgagccccaaccttcaggcccaagaagccccagccccagtcaccacctcctcttctacatccaccctgtcatcctccccttggtcagctcagcctacctggaagagcgaccccggcttccggtgagggggccctctcccaagaaaggtggctggggcttagctctgaggttagccattct

SEQ ID NO: 98211 - DNA, 22437 bp, Homo sapiens
aggccagcagcaggcaagcgcctgcgctgcatctccgtgccacacctcttcttctcccctcttctctagaacatacccctggtcaggcagggatgggggctttggctcatggtggttaggggcacggcttccctgaagtgatgaacttacccgaactaaggtgtccatcacctgctccctggccaccttggccagtgtcagccgctgggcattgaaggcgcagatgcgaaaggcctgggccccattggccaggatgaggaagaggagtgcagttgggtagtgcatggctgtgtgtggctgccggggacaccccaggaatccaggctgccccagggtgcgctctcactgggctcagttctggctctggaggcgctgaaatatgggacagaggaagtggcactagctgctgcccagcaccagcctcccagtgacctcccgagatcataccactgcactccagcctgggtgacagagtgagactctgtctccaaaaaaaaaaattgtttttgagacagagtcttgctctgtgaagatcaagccaagatcgcaccactgcactccagcctgggcgacaataagactccgtctcaaaaaaaagtgaaatcctacagtatttgtctttttgtgactggctcatttcactgagcaaaatgtcctcaagggtcattcatgttggagcatatgtcagaattttttttttttttttgagacggagtctcactctgtcgcccaggctgagtgcagtggcgcaaacgcggctcactgcaactccgcctcctgggttcacgccattctcctgcctcagcctcccgagtagctgggactacaggtgcctgccacacgcccggctaattttttgtatttttagtagagatggggtttcaccatgttagccagaatggtcttgatctcctgacctcgtgatctgcccgcctcggcctcccaaaatgctgggattacaggcgtgagccaccgcacccggctgtagaatttctttccttttcatggctgaatcatattccattgtctgggcatctgggtagaccacattttgttcattcattcattcatccatccatctggttttttttttttttttttgagacggagtttcgctcttgctgcccgggctggagtgcaatggtgcgatctcggcttactgcaacctctgcctcccaggttcaagcgattctcctgcctcagcctcccaaatagctgggactacaggcacgctccaccacgcccagctaattttgtatttttagtagagatggggtttcttcatgttggtcaggctggtctcgaactcctgacctcaggtgaactgcccaccttggcctcccaaagtgctgggattacaggtgtgagccaccgtgtccttttttttttttttttttttttttaaatagagacaaggtctcactatgttgcccaggctggtcttgaactcctgggctcaagcaattctcctgcctcagcctgctaaagtgctgggattgcaggaatgagccctggtgccccagcctcatgcatctcttgacctcgtgatctgcccgcctcggcctctcaaagtgctgggattacaggcgtgagccagagcgcccagcccctgctttcagttcttttgggtatatacccagaagtggaattgctggatcatatggtagttctagttttaattttctgaggaagtgtcatattggtctccatggtgactgcaccattttacgttctcgccaacagtgcacaagcggtcaagcttattcttttattgtttatttatttgggacaaagtcttgctctgtcgcccagactggagtgcaatggtgccatcacagctcactgcagcctcctgaattctatgtttcccaggctggtctcaaactgctggactcaagtgatcttcctacctcagcctcccaaagtgctgggatttttttttttttttttttttttttttttttttttttgagacagagtctcactctgtcgcccagactggagagcagtggcgtgatctcggcttactgcaacctcagcctcctgggttcaagcaactccctgcctcagcctcccgagtagctgggattacaggcacccaccaccacgcccagctaatttttatattttttagtagagacagggtttcaccatcttggccaggatggtctcgaactcctgacttcaggtgatcagccggccttggcctcccaaagtgctgggattacaggtgtgagccactgcgcccagccagtgctgggatattataggcctgacccactgcgcctggcctagtctacctttttttttttttttttttttttttttgagatggagtcttgctctgtcaccaggctggagtgcagtggcgtgatcttggctcactgcaacctctgccttccgggttcaagtgattctcctgcctcagcctcctgagtagttggggctacaggcgtgagccaccgcgcccggcccccccccttttttttttttttttttttgatagtctcattctgttgctcaggctggagggcagtaatgtgatctcagctcactgcaacctccaccttccaggctcaagtgatgctctcacctcagccttccgagtagatgggactacaaggtgcatgctgccacaccaagctaattttttttttctttttttgagatggagtctcactctgtctcccaggctggagtgcagtggcttgatctcagttcactgcaacctccgtctcccaggctcaagagattatcctgcctcagcctcccaagtagctaggattacaggcacgtgccaccacacccggctaatttttgtacttttagtagagacagggtttcaccatgttggccaggctggtctcaaactcctgacctcaagtaatcctcccacctcagcctcccaaagtgctggaattacaggtgtgagccaccgcgcccggctaccaagctaatttttaaaatttgtttggagagatggggtttcaccatgttgttccaagaccccagtgcttttcgcctccattagcaactacaggaacatcttcgttcatctctgtctccccacttgtgagatgttctctttaagataaactcccggcagtgaagggtgtgtgcattttaaaaggtctcagatatggccaaatcatccccattgcaacctgtgatggggactctttcccatgcccctgccaccactggggagcccttcttgttcatctcaccagctggagcccccctctctcagtttatctttgtctcacactcacctgaccttgcagggctcggctccttgctccacgccctgtccatgtggcttttgcatcctgaggcatgagttcctctgctctgtctgcctgcttttctctatcaacctgtcaccttcccttcgggctcacttcctacctctctgaggctctgtccgtctctgtctcactttccctctcgtctctggtttcccttctctgtctctctgttgcggtgtctctctcctggctgggtttgatgtctgtttctccctgaccacctgctctgtcactcatgctagtttgggttccctaccctggtgcctattctgggatatacatgggtatgtgggcagccctgggctggcacatgcagccttggaggctctggcgtcagggacccccatgagggctaccagtaagaaccagagagagcgacggttcctggcttcagccccaaaccctggctgtcaatatcagccttggtgggagccctaggcttccctctccctctcaaaccctccccaggcagaaggcaacttcctcccttcttccgtctccccagggggctcccatacctgctcagaccagcttgtcaccaagtctgcctcatccttaagtggatcgcgataccccagaagagcagctcctgcctgaatagggctaggaggggaaaaaaaagaggaagaggctgtgttcctgagccacccggccaggaagggcctggctgggccggacgccccacccttgccaacaggcaggcccgccccgtctccgcctcgccgccaacaaggaggaccagcaccaggcctgggaactgctgacctgcccgcccaccttcccacccagaccccgccttcccgggccagcgggacatgacagacctgtgagtcactcaagcctggggcaaggaggggctggtgcctgagtgagaccccgagcttcgctcgccaggcccgtcgctcagctcccggtctgggtccccagtcagcagttgctggggaaggcgcaggagctggaagtcatgcctgatgccacgagaccgggcaccccaagggcgtgagtcttctgtccctgttgttgggttctgagtcccagtgtggctgcacacttctgagttaggggtgtttgatgcaagcgctctggagacccaaagagagggacagtccacacatgatctggccacagtcgtgaagtcaagggaggactgaggatctgccccagagaggaggagacccagggagctggcagtccaacgtcctgggggtcctgcagtaatgctgttgggacaaatgaggtgctcggacagggtctgtgagcaggaggtggggctgaatccactcagcttctcatgggatggctgtagctaatggattcgacgtggtaatagaaggctggacaaattttaaaaaatcaataaattatgggctgggcgtggtggctcatgcctgtaatcccagcactttgggaggctgaggcgggtggatacgaggtcaggcgttcaagaccagcctggccaacataatgaaacccgtttctactaaaaatacaaaaaattagcccggcgtggtggtgggcgcctgtaatcccagctactcaggaggctgaggcaggagaattgcttgagcctggaaggcggagcttgcagtgagccgagatcacaccactgcactcgcactccagcccgggcgacagtgcgagactccatctcaaaaaaaaaaatcaataaattatggtttaaaaataaaaaacaggccaggtaggatgactcacactttgggaggagaggcagacagatcacctgaggccgggagttcgagaccagcttgaccaacatgaagaaacccagcctctactaaaaatacaaaaattagccaggtgtggtggcttgcgcctgtaatcccagctactcaggaggctgagacagaagaatcgcttgaacctgggaggcagaggttgcaatgagctgagatctcgtcactgcactccagcctgggcaacagagcaagactctgtctcaaaaataaaaataaataaaaataaaaataaaaaactgccgggtgcggtggcccatgcctgtaatcctagcactttgggaggctgaggtgggtggactgcctgagctcaggagttcgagaccaacctgggcaacatggtgaaaccccatctctactaaaatacaaaaaaaaaaaaaaattagccgggcgtggcgacctgcgcctgtagtcccagctactcaggaggctgaggcaggagaatagcttgaacccgggaggcggaggttgcagtgagccgagattgtgccactgcactccagctggcgacagagcgagactcctaaaaaaataataataaataaataaatataaaataaaaataaaaaactggctgcttaatgcatagggggctttctttccgggtcatgaatatgtttcagaactagaggtagtagctgacattgtgactgtatcagatggtataaaatactgtttcttgtattacatatgatacacaatatgtttgtatatattgctgtatatattgtatattttgccatacagtagattatacattgctacatacacatagtatcatgtagtactgtaactatgtcaaattgtatatgtggctgggcggggtggctcacggctgtcatcccaacactttgggaggccgaggcgggtggatcagagtgtgatggcgggcgcctgtggtcccagctactcgggaggctgaggcaggagaatcgcttgagtctgggagatcgaggctgcagtgagccatgatcccatcactgcactccagcctgggtctggctggaccctgtgtcaaacaaaaaacagaaacactagagagacaaaaggcgagcgcaggaggctgccaggaagcgggagccccacggggtgacggccacttcccgccgccccggggctggcctcgctgccgtcaagcggcccgtgcgcgctttcgacagtcggtcgggctgggcaccggcgcaggttcgctttccggcggttgcaccgggccggggtgccagcgcccgcyttcccgtttcctcccgttccgcagcgcgcccacggcctgtgacttcggagaccgctccccagtgacgagagagcggggccgggcgctgctccggcctgacctgcgaagggacctcggtccagtmccctgttgcgccgcgcccccgtccgtccgtgcgcgggccagtcaggggccagtgtgtcgaggcggtmgaggtcgcagcctagaggcgttccacaggtcggcccggggcgctgggagcccggccggcggtcgggtggggtggcctctgcacgtgaaagtggccgttccccgcggtgccgccgctcacctggaccctggccagcagcgtcgtcatgggcttggtgggcacctacagctgcttctggaccagtgagtgggcccaggccgaggcaggcccgcccgggtacccatgcccggccggaggtgggacttagggtgggggacgccgcggccccgacctagcgggcgagcccggagcgcctgacctctccttccccgccagagtacatgaaccacctgaccgtgcacaacagggaggtgctgtasgagctcatcgagaagcgaggcccggccacgcccctcatcaccgtgtccaatcaccagtcctgcatggacgaccctcatctctggggtacccgggccagtgtgctgggcagggggaggaaaggcgaggattcgggacgggcccagcctcgtcagaacaaaccccttctcgctgccttttcatggagccctggcactccggtttccgggcgttctgccccagggctgagacttggatttgtggctcctgcagcatccctgagggagcatgatttggagagggccttgggcatggagcaggaccaaggaacggccacagggcatatcttacagctcctttaacgtcaggcctccagaaccctctgttctctaaaccatccagggccccacagtcttgggaaaaatttgggggttggacataggatatcctgtgaggaagttctgggccagggactggaagcccagtgtcctggcttcaggtttgcccctggctgggcgtgtaccgttcagccctatttgggagcctggttgccacacctagaggttcctgctctgctgacttcacaggaagttgcttggctctggtaaccagatggccgggtggaggggtgcctggggcttccactcctgaacagagagcttaactgtcctagagttcatggggagccacctagccacactggagcccttcagagctcaccctggctgctgggtggagaaaggcctatagatgtcacaggtggatcctgggaggccaggaaggaggacttggagccatccactagcctagactgggctggttgcagtgacagtacagggagaagtatagaagaatgggcattgtccaagtatgttggggaggtaggcagtccaggtgcagtgattagtaagatgtggagggtgggggagagggaggagccagggagaactgaatgatctggcctaagggtctgaaagatgccactttgggctgtagggaaatggtagtgctgctgtccctcattccctgagatggggtgaaggaagggcactccctggggatatgggaagttggggcatgaagcctttcctgtcctctagggatcctgaaactccgccacatctggaacctgaagttgatghgttggtgaggaggaatgggcccctcgaagtgggccgggccggccccacctgcctctgcccagatttgccctcctcctgctctgcccaggaggtggcgtccagcagtccaggcagggcatggggtggggccccgcaggccctcccctgtgcctcccttctgcatgctgatgctgggggcagggtggtggagcggggtgcagggggcaggactaattgcatctgtccctgcttaggacccctgcagctgcagacatctgcttcaccaaggagctacactcccacttcttcagcttgggcaagygtgtgcctgtgtgccgaggtgagctgctcctccagcgagtgcagggaggcacttctggggcaggaaagctggtggccagtgtctctgttttggagggacctatgggggtaggcatcccgggagccaacatgaggcccagctccatcacatgccascagagggrrcagaggctgtgrgaggagggatgggtccttggaaagtcctcaactctctgcaactgcccagggatcctgtggacctggagccttggcattagaattcaaggaggcattatccataaccccttctctcagggatgtcactaagagactcattgagaacagtgcgttgtcattggtccatggtggcagtagcatgtacctgcaggccagagggttttgcttctaggagaacaaacaggcttgtggggtgagaaccccaggggataggggccattttgatccctattctccagacagggaggatcacagagattaagctgctggcccaaggtcatggggtaggaggtggcaaagccaggatttgaatccagattgctccttcctctgcaggagcagaatttttccaagcagagaatgaggggaaaggtgttctagacacaggcaggcacatgccaggtgctggaaaaagaagagagaaaggtaagccaggcatagcggttcacacttgtcatcccagcactttgtgaggtcgaggtgagaggatcactcaagcccaggagtttgagaccagcctgggcaacatagtaagaccctgtctctttaaaaataaaaatattttaaacaaaagaaaggtagaaaatatgagttgtatgtagaatatgaaggttctagaataatcctattaagaattttggattctggctgggcgcggtggctcacgcctgtaatcccagcactttgggaggctgaggccagcggatcacgaggtcaggagatcgagaccatcctggctaacacggtgaaaccccgtctctactaaaaatacaaaaaattagctgggcatggtagtgggcgcctgtagtcccagctactcgggaggctgaggcagragaatggcgtgaacccggaaggtggagcttgcagtgagccaagatcacgccactgcactccagcctgggtgacagagtgagactccgtctcaaaaaaaaaaaaaaaagtgccggccacggtggctcatgcctgtaatcccagcactctgggaggccgaggcrggcggatcacgaggtcaggaattcgagaccagcctaaccaacatggtgaaaccccgtctctactaaaaatacaaaaattagccgggcgtggtggtgtgtgcctgtaatctcagctacttgggagactgagacgggagcattgcttgaacccgggaggtggaggttgtggtgagctgagatcctgccattgcactccagcctgggcaataagagcgaaactccgtctggaaaaaaaaaaaaaaaaaaagaattttgaattagctggctgcattggtgcatgcctacagtcccagctcctcaggaggctgaggtgggaggatcacttgagccctcgattttctttttccttgagacaatgtctgtttctgttgtccaggctggagtgccgtggcgtgatgatggctcactgcagcttctgtttcctgggttcaagggatcctgtcacctcagcctcctgagcagctgggactaaggagtgtgcccagctaattcttttttttttttggtagagttggggtcttactacattgccagggctggtcttgaactcctagactcaagcgatcctcccgcctcagcctctcaaagtgctgggatcacaggcatgagccattgtgcccaacccagcccaggaatttgaggccagcctgagcaatatagtgagaccccaggtatagatagataggtagatagataggtaggtaggtaggtagatagatagataggtaggtgggtaggtaggtgggtagataggtaggtaggtacgtaggtagatagatagatagatacatacatacatagatagataagatagatagattgattagatagattagatagccaggtggggtggctcacgcctgtaatcccagtgctttgggaggctgaggtgggtggatcacctgaggtcaggagtttgagaccagcctggctaatgtggcgaaaccctgtctactaaaaatacaaaaattagctggatgtggtggcgcacgctgtaatctcagctactcgggaggctggggtgggagaatcgcttgaacccaggaggtggaggttgcagtgagctgagatcatgccactgcactccagcctgggccacagagggagacctggtctcaaaaaaaaaaaaaaaaaaaaaaaagatttttgtatttgactgtgctctctcatccaggtggtgacatgcttgtatctgtggttaagaggtagcatctgccaggcgcggtggctcatgcctgtaatcccagtactttgcgaggccgaggcgggtggttcacctgaggtcaggagtttgagaccagcctgaccaacatggcgaaaccccgtctctactaaaaatataaaaattagccgaggctgggcgcgggggctcacgcctgtaatcccagcactttgggaggccgaggcgggtggatcacraggtcaggagatcgagaccatcctggctaacaggatgaaaccccgtctctactaaaaacacaaaattagctgggcatggtggcaggtgcctgtagtcccagctactcgggaggctgaggcaggagaatggcacaaacccgggaggcggagcttgaggcaggagaatggcgtgaacccgggaggcagagcttgctatgagcagagatcgcgccactgcactccagcctgggtgacagagcgagactccgtctcaaaaaaaaaaaaaagagagagataccattccagttgcaatgtggctgcagcagggctaggtggacatgaggagcccagttcagggctgtcacagtagctccagcagcagatgattgtggctgggcctcccaagtgtcacgttggagaaccggagaaggggacttctttgggatgtactctggacttgttgatagattaagtgtaggtggggtgaggaagagaactcaaagatgacaccaggtgttggagctgagccacggggagaagggtgcaaagggaaagcagtgcgggggctgggaggggagagggtcagtcctgttttgcttgtgctgcatctgaggagcccctcacctgtggaaggagagcagtcccagaggcagtggggtgtgcagttctggaacttagaagaatgatcagggggctgggtgcagtggctcacgcctgtaatcccagcactttgggaggccgaggcgggcggatcaagaggtcaggagattgagaccatcctggctaacatggtgaaaccccgtctctactaaaaatataaaaaattagcagcgcatggtggcaggcacctgtagtcccagctattcaggaggctgaggcaggagagtggcgtgaacccgggagacggagcttgcagtgagctgagattgcgccactgcactccagcctgggcgacagagcgagactccgtctcaaaaaaaaaaaaaacaaaaaattatcaggaataaagatactgggaattcaaccacaaaaaccacaaagtcacgaatgcagagtgagagtcttcagagagagggcagaggcccaggatggcacagagggagagagaagccaccaagatggcagggagccatggccagagagaaaagcaaaccaggcgcctgtggcaccatggaagcagcaggtgatgctggagaagcgtttccatgcagtgacagctgccagagccagattattatggcctgagggctggtggtgctgcagttgggggggaatggagaccgcagcgggggaatggagaccgcaggggcggcaactcctcccagaggttcagtttggaggaaaaagagacagaaggaagggtaaccaaaggatattagaggtcaaggaggggtttattatttctagctggtcaaagtagaatgtggtaaaacccaataaagtaacagcaaataacaaagaggggcttttaatggaaagctgcagtgcctgcccctcacctccctagccccactcctcagaagcagccccctggagyggtttctctttctgctgcttttggaggctacttctgtctctgtaaaggaacttctgtctctgtaaaggaacaagcagaggccacagtgtcttggcaaatgaccgtggcattgtttatcccaacctgctctgagagatggggactctgctgattcacccctcgtccctgcctctttagttccttcagcaaagaactaataatatgtcattaaggcaaaggcagtatttggcacacttggcttctgtgttccaaaaaattccctttttctccaagcgtagattttaatatggtatttaagtatcaaagtgatttgacacaagtgacacaagtgagcagtagtagcatttgcaaaagctacaaatgatgaagtcttgctccaaaagcatattattattattttttaaattccagtttcaagctcaatggataggttgcgtcagtgggttttagtagagaaggggccagtacctatgaagactcccctgtactattacacatgctgcgtcccaagtagggaaactccagtgggtcatcaccccctccctctagcccaagtgggctgctgggtcagggcactgtttgggttgggttgagattcctggatccctaactagcaccttccaaagaatcggccttgcagagaacaaagttcattgccaaaggtattcccaatgtctgtctctcgctctgtgatagggcttctttactccccactttataagatgaggatatctgctataccccattccttcaacctctccacctctttcctcttttgtctgccatgtgattacttttccatcaccaaggttgatgagatccttactgtgtacttactgtctccaagcatccccaggcttccagccagcacgcagcagccaacattggcttcagaaggaaggaggtttgcatttccttctcttgggtccagtgccatggtctcagggttatctccaatgtggaaagttgctagaccaggagcagtttgactccactgtttttcagtctagcaagtttgagtttttcccaagctcttgatgtgtgttcaaatgaatgttctccctttcccaagagacctccctataagggagggtctagtttcccggggtgccctgagaagaaggggtcagcaggggggaggaatggtggaggctgaggcctcaggcaggtgccctgtgaggagtggctgtgacaagcggctgagatcccagcaaagggttgttgcccagaatctggggcctaagcgaggttggaaatcacaaatgcacttggtttctctagcagctggcacatagtaggatcagcccaggagtggcaccttcaaagagaaaggaacgcatgaggctccgagagcggtcggctggcagccagggcctggctggggagggagggcaggtggtgcgctgacctggggatctttgagagtgtgcaggagtatgtggctgaagcggcccagctggtgagccactgaagatgggggtcataggtagatggaggaattgccaggtcagaatctcggtaggagatgacttgagctgatgctgcctggcacataggggtttagaagatattaggaaggaagccccacagcgtgcccaagtgccatgcaggccctggagacggtcattggagggcgtctgtggatggcgcagtgggggatgggaagtccctaatctgctggggctttcccagcaagcagggactgagggggatagtccccaacacatgggccccagggagaagggcctgtttcattgaggtttggagagtgttgagggtaagctaacctgtcaccccaygcccccgagaatggttactgatagggagaggccttttccttgcaggagatggcgtctaccagaaggggatggacttcattttggagaagctcaaccatggggactgggtgcatatcwtcccagaaggtcagcagggctgactgggtcgagcccccccagtatgagcgggatgggctcccaagcctcgcctctgtgctctctcaccagggaaagtgaacatgagttcykaattcctgcgtttcaagtggggtaagggctgctggtctctggccacagccatcctcccggcccagagatggccctgtgggcccctggctcccgccccctcgggctggcttgtatgggggtagatgggcgtgtttgtagcgccaggaaggggacaggtgctgagactagrcctgcctctcgcaggggcttgcccaagggagctgaattgaactggaggatgtcgggggtggcagtggccagaggctggcacagaagcttggctcagggcccagcttatgctaacatttctacctcccccctgggcaggaatcrrgcgcctgattgctgagtgtcatctcaaccccatcatcckgccccygtggcatgtcggtgagcctggggacggggacagagagatggcatctggggtggggggcctgggactccctctggtcccaggctgccytgctccaccccacgtctggccttctgtccactgtgctgcaggaatgaatgacgtccttcctaacagtccgccctacttcccccgctttggayaggtgggtggggactgctgaccttcggctgtctgcctgtctgctgtctgctccgtgtctcccactcagcactatggaggccagctgcaggaggagctgagcatgaggctacagcaggggacagagtggaacatagacagggacttcctggcaccgagacattaaaatgagagcagaggaagtcaggctggggcagaggtgggctgtggggtcaggacaggacaggtcatctacagcacaggacccaggaccaggaccttgttttagaggaagagtggcccctggggagtgtgtggcacagcagggccggggcttagcttctggctcccgggttgcttgggctggggctgtgggcactcctactgctcctcatcactcttggcggccaccccacagaaaatcactgtgctgatcrggaagcccttcagtgccctgcctgtactcgagcggctccgggcggagaacaagtcggctgtgagtttcctcctgggtcccccgtagctgtccccggaccccctgctgctggcttccagcagggtgcctccaccctctccatcccgtcaccctcccagggcaccctcccagggcaccttggccaagcttcccgaggggtgcaggccatccctggtcctttccctcaggtggagatgcggaaagccctgacggacttcattcaagaggaattccagcatctgaagactcaggcagagcagctccacaaccacctccagcctggragataggccttgcttgctgccttctggattcttggcccgcacagagctggggctgagggatggactgatgcttttagctcaaacgtggcttttagacagatttgttcatagaccctctcaagtgccctctccgagctggtaggcattccagctcctccgtgcttcctcagttacacaaaggacctcagctgcttctcccacttggccaagcagggaggaagaagcttaggcagggctctctttccttcttgccttcagatgttctctcccaggggctggcttcaggagggagcatagaaggcaggtgagcaaccagttggctaggggagcagggggcccaccagagctgtggagaggggaccctaagactcctcggcctggctcctacccaccgcccttgccgaaccaggagctgctcactacctcctcagggatggccgttggccacgtcttccttctgcctgagcttccccccsaccacaggccctttcctcaggcaaggtctggcctcaggtgggccgcaggcgggaaaagcagcccttggccagaagtcaagcccagccacgtggagcctagagtgagggcctgaggtctggctgcttgcccccatgctggcgccaacaacttctccatcctttytgcctctcaacatcacttgaatcctagggcctgggttttcatgtttttgaaacagaaccataaagcatatgtgttggcttgttgtaaaatgtctctggcctctctgtaggggtgaaaatgggaagtgactgctggacagaaaggctgaacccttagtgccctggggacatggagcacacttgagcagatgggcatcaacctcttctgcaccagtcacttaaggcttcagttattgtctgtaatccctgtaacaacattgcagaaatagggattaatctcattttgccaaggaggtggagtgaggctaatgaacttgcttcaaaacccaaagctagccaggtagattggggccacacttcagagagacccaagtgtggagaatcaattggatcctacctgggctgcatcataggtgggagaggagctctgaagagcccggcaagtagccagccatgagcagtgcacgctgtgatcaggaggtaggattggggttgcccagatggagctgggggtcctgggtgggagcaaaggcaaatccagggtggtggcgtagacacagtattaaaaatactataacagaaacgtggaaagaaagaaaatatagaaccaccaaagatgagccagcaacaagagaagattcagacaaccaggtctttcagcagtgttggtgcctaattatttcaaaataaaaggtttttaaaaaaatgaccaaaaagggaaaaaaattacctgggaaaaaacaaacacttgtaattaaatatagatagaagcagctgggcaccatggctcacgcctgtaatcccaacactttaggaagccaaggtgggcggatcatttgaagtcaggagttcgagaccaacctggccaacatggtgaaaccccatctctactaaaatacaaaaattaggccagtcgcagtggctcacacctgtaatcccaacactttaggaggccgaggcaggcagatcacctgaggtcaggagtttgagaccagcctgaccaacatggagaaaccccgtctctactgaaaatacaaaattagcagggcatggtagcgcatgcctgtaatcccagctacttgggaaggctgaggcagaagaatcgcttgaacctgggaggcggaggttgcggtgagccgagatcgagccattgcactccagcctgggaaacagcagcgaaactccgtctcaaaaaaagaaaaaaaaaaggctgggcctggtggctcacacctgtaatccaagcactttgggaggccgaggcaggcagatcacgaggtcaggagatcgagaccatcctggctaacatggtgaaaccccgtctctactaaaaatacaaaaaaattagccaggcgtggtggcgggtgcctgtagtcccagctactctggaggctgaggcaggagaatggcgtgaacccgggaggcggagcttgcagtgagccaagatcacaccactgcactccagcctggtcgacagagtgagactccgtctcaaaaacaaacaaaaaacccccaaaaaattagctggcgtgatggcgcacgcctgtaatcccagctactcaggaggctgaggcaggagaatcacttgaacccaagaggcagaggttgcaatgagctgagatcgtgccactggactccagcctgggcgatagagggagacttcatctcaaaaaacaaacaaacaaataaacaaacaaaaaaacacaccaggcacagtggctcatgcctgtaatccagcactttgggaggccgaggcaggcagatcacaaggtcaggagatcgagaccatcctggctaacatggtgaaaccccatctctactaaaaatacaaaaaaaaaaaaaaaaaaaattagccaggcgtggtggcaggtgcctgtagtcccagctggaggctgaggcaggataatggcgtaaacccaggaggtggagcttacagtgagccgagatcgtgccactgcactccagcctgggcaacagagcgagactccgtctcaaaaaaaaaaaaaaattaaaaataaaagaaagaaaaaggaatattttgatacatgctatcaaatggatactctcaaaggattttcaagaaacattatgttaactgcaataagccggaaacaaaaggctgcatattatatgattccacttatatgatgtacttaccggcttcagatccagagtcaaaaagtagaaggttggtttccagggcctgggaggatgggggaatgagaaattgtataatggggacagagctttagtttgggaagatgaaaagagttctgaagatggatggtggtgatgactgtacaacagtgtgaacgtacttaatgccactgaactgtacagttaaaagtggttaaggccgggcgtggtggctcacacctgtaatcccagcactttgggaggccgaggtgagcggatcacctgaggccaggagtttgagaccagcctggacaacatggtgaaacccccatctctacaaaaaaaaaaaaaaaaattagctgggcatgttggtgggtgcctgtaatcccagctactcaggaggctgaggcgggagaatcactgaaacccgggaagcagaggcttcagtgagccaagattgtgccattgcactccagcctggacaacaagagcgaaattccgtctcaaaaaaaaaaaaaaaaaaggcatttcacagaagaggaaacacaaaaggcagagtgtgcatggtatgggtttcctgtggctgcagtaacaaagtgccagagactgggaagtttaaagcaacagaaatttattctctcccagttctgaaggccagaagtccgaaatcaaggtggcaccagggtgggttccttctggggctgtgagggaaagccagctccaggcctgtcttctggcttcttccggtggttcccagcaatgctccgtgttccttggcttgcagaggtgtcattccaatctctgccttcagctgcgtgcagtgctctcctccctgtgtctgtctctttttctcctcctttaaaaacaccatgcattgattgaactaggggtcacccttatgcagtataacctcaccttaacttgattctgtctgcaatgacttttatggggacactactcaacccagtgcatatactctatgacctagcaattccccacctagttatatacctattgaaatgaacatctatgtttaacaaaagacacatacatcggctgggcgcagtggctcacgcccataatccaagcactcaggccgaggcgggcagatcttgaggtcaggagatagagaccatcctggctaacacagtgaaaccccgtctctactaaaaatacaaaaaattagctgggcatgggggtgggcacctgtagtcccagctactcagggggctgaggcaggagactggcgtgaacccggaaggcggagcttgcagtgagctgagatcacgccactgcactccagcctaggtgacagagcgagactccgtctcaaaaaaaaaaaaaaaaagaagaaaaagaaagacgtatacataattgttcacagcagcattagccataacagcccaaatgggaaaccaaccaaatgtcaacagttgaaggacacaatcaatggtgacgtattcatccaggggaatactatgcagcaacattgttacatgcagccacttgaattaatctgccaatgttgagcaaagaatctagacacaaaataatacttcccttcagagtggaggagaaggctgagtgcggtgactcacacctgtaatctcagcactttgggaggccaaggtgggtgggtcacctgaggttaggagttcaagaccagcctgaccaacatggtgaaatcccgtctctactaaatacaaaaaattagccgggcgtggtggcacatgcctgtaatcccagctactcgggaggctgaggcaggagaattgcttgaatccgaaggttgcagtgacccgagatggcgctattgcactccagcctgggcaacaagagccaaactctgtctccaaaaaaaaaaaaaaaaaaaagagtggaggagggaaaaatattatactgaataatttcctttatttaaagcctcaaaacagccaaaacaacacatcccatcatttttaggaatgcatgcttaactggtcaaactataaagaccaaagtgattagcaaaagaatcaagttcatggtcacattgggaagtgatagtaagggtatgagaggggctttcagggcaatgatattcaaattcttgacctgggtgatgccatggaactgtctgctttgataagcattacactgtacatctttattttgtgggtttttttttttttttttttttttgagacagagtttcgctctgtcacccaggctggatggagtacaatggcatgatctctggtcactgcaacctctgcctcctgggttcaagcgattctcctgcctcagcctcccgagtagctgggattacaggcgcatgccaccatgcccggctaattatcttgtatttttaatagagacggggtttcaccatgttggccaggctggtctcgaactcctgccctcaggtgatccgcccgccttggcctcccaaagtgctgggattacaggcgtgagcaatgcgcctggcctacttcttttcttttttgggttacgtttcaccatagaagtgctttttttttttttttttgagacagagtcttgctctgtcgcccaggctggagtgcagtggcacgatctcggctcactgcaagccccatctcccgggttcacgccattctcctgcctcagcctcccgagtagctgggactacaggcgcccgccaccacgcctggctaatttttcatatttttagtagagatggggtttcaccgtgttagccaggatggtcttgatctcctgacctcgtgatccgcccgcctcggcctcccaaagtgctgggattacaggcatgagccaaagtgcccggccctttttttttttcttttttttgagatggagtttcgctcttgttgctcaggctggagtgcaatggcacgatctcggctcactgcaacctccgcctcccaggttcaagcaattgtcctgtctcagcctcctgagtagctgggactacaggtgcccgccaccacgcccagctaatttttgtatttttagtagagacggggttttgccatgtttgctaggctggtctcaaactcttgacctcaggttatctgcccgcctcagcctcccagtgttgggattacaggcgtgagccaccacgcccagccaggatttcaatgaacaaaatgcttttaccctaaagatgaagtccccagacagaaggtgctcattggtgctgtcaacatttggtgattggttcagtttagatatcacctcctggtgggagcagcttcatcggtgcccctctccttacatccctcccagtcccatgtctcaacctttggaatattcatgaccctgtatcatgacctgctgtcctgcatgtcctctagaccaaactgtcaacttccggggcagagtccaggtgcctggcccatagcaggtgcttcaggaagcctccagggccatcactccagggacccctagcaatgcagggaagaataaaagcagccacaggtgggtttcttccctaagcatggaagcagctcagcaacagagtcctggcggaggcaagattgccttccgcattccagaggaagtatttgccttgaaactatgtaacaaaagtaacagaaacataatagacatgctttcctttttaagtttgctggattctcctgggatacagtgaagctccagtgaaaacctctctcctcagctagttaaggcctggaaatggccacttgggggtttccctaagcacccgaaactcagtgagcccccaagtgacctcgtctcccagtccccaactcagagagacccaaaagctacaatcttctttgactgtattgtcagacccacttcctctctccagctcaactgccactatcctagtcctagtctgaatcacatgtgacaatcatgactacaatctttttttttttttttttttgagatggactctcactctgtcgcccaggatggagtgcagtggcgcgatctcggcccactgc

SEQ ID NO: 98212 - DNA, 38287 bp, Homo sapiens
  misc_feature (1)...(38287): n = A,T,C or G
ttgcactaagtattttctctaaccacaatgggatgaggttagaaatcaataatagatggaaaactggaaaattcacaaatttgtgaaaattaagcaacacactcttacacaaccaaaagccaatggcgaaataaataaagggcatccaaattggagaagaggaagtcaaactagtgctgtaacactgatgatacgatcatacagctagaaaaccctaggccaggcgcggttggctcacatctgtaattccagcactttgggaggccgagatgggcagatcacctgaggttaggagttcaagaccagcctggccatggtctggtgaaactttgtctctaccaaaaatacaaaaatttgccgggtgcggtggcacacacctgtagtcccagctactcgggtaaggcaggagaatcgcttgaacccgggaggtggaggttgcagcgagccgagatcatgccactgcactccagcctgggtgacagaaactccatcaaaaacaagcaaacaaacaaacacaaacaaacaaaatcctaaagactcatccaaaagactcttagatctgatgaacaaattcagtagtctcaggttacaaaataaatgcacacaaatcagtagcactacaccaacaacgaccaagcttgagaatcaagaactcaatcccttttacaacagctgtaaacagcaaaaacaacaaataaaacccaccctaggaatatacttaaccaaggaggtgaaagacagctacaagaaaaactacaaaacactactgaaagacatcacagatgacacaaacaaagatatctcatgctcatggataggaagaatcaatattgtgaaaatggccatactgcccaaagcaatctacagattcaatgcaattcccatcaaaatacaccatcgggctgggcacggtggctcacgcctgtaatcccagcactttgggaggccaaggcaggcgatcaccaggtcaagagaccgagatcagcctggccaacatggtgaaaccccgtctctactaaaaatacaaaaattagctggcagtggtggcgtgtgcctgtagtcccagctactcgggaggctaaggcacgagaatcgcttgaacccggacagcagaggttgcagtgagccaacattgcgccactgccctccagcctgggcgacagagcaagactccgtctcaagacaaaaaaaaaaaaaaaaaaatactaaaagtagtagattaccatctatctaccattcaatccagaaattccactactggctatctacccaaaggaaaaaaagtcattatatgaaaaaggtacatgcacacacatgtttataggcagcacaattcacaattgcaaagataaggaaccaacctaagtgtccatcaaccaatgagtggataaagaaggtggtgtatatacaacatggaatactgctcagccataaaaaacaatgtattttgcagcaacttgggtggagctggaggtcattattttaagcgaagtaactcaggaatagaaaaccaaatactgtatgttttcacttgtaagtggagctaagttttggagtgatataacggactttggggaggagaatgaagggggaaggtaggaaggaggtgagggataaaagactacatattggggacaatgtacactgcttgggtgatgggtacactaaaatctcagaattcaccaatatagaatttattcacataagcaaaaacaacttatacccctaacactattaaaattaaaaaaagaaaatgagaggctgggtgcggtggctcatgcctgtaatcccagcactttgggaagccgaggtgggcggatcacctgaggtcgggagtttgagaccagcctgaccaacatggagaaacaccgtctctactaaaaacacaaaattagctgggcgtggaggtgcatgcgtgtaatcccagctacttgggaggccgaggcaggagaattgcttgaacctgggaggcagaggttgtggtaagcctagattgtgccactgcactccagcctgggcaacaaaagcaaaactccgtctcaaaaaaaaaaaaaaaaaaaaaagaaagaaaaagaaaatgaaaaatcccttagagacaaatgaaaacagaagtacaaaataccaaaacctatgtgatgtagcaaaagcagtgccaagtgggacatttctagctgtaaacacattttttaaaacccctcacatctggccgggtgcggtggctcacacttgtaatcccagcactttgggagccgaagcgggcagatcacttgaggccaggggtctgaaaccaacctggccaacaaggagaaaccccatctctagcctgggcgacacagcaagactctgtctcaaaaaataataataaataaataacccttcaaatcaacaacctaactttacaacgtaaggactaaacccaaagctagcaggagaaaggaaataaaaaagatcaaagcacaaataaaacagagactaagaaaatagaaaaaatttaatgaaaccaatttttttttctttttgagacagggtctcagtttgtcacccaggctggagtgtagggcacaaacatggctcactgcagcctcaagcaatccttccgcctcagccttccgagtagctgagactacaggtgctcgccatgtctagctaattgttgtatttttggcagagacggggtttccccatgttgcccaggcttgtcctgaactcttgagctcaagtgatccagctgcctcggcctcctaaagtgctgaggttacaggcgtgagccacctcccctagccaaagctggttctttataaaaggtcaacaaaactagctattaatagatgggcagggcatggtggtgtgcacctgtagttccagctactcaagaggctgagaggaaggagagtcgcttgagcccacgagagttcgaggctgcagtgaactatgattgcaccactgcactccagcctgggtgaaagagcaagaccctgcttaaaaaaaaaaagtacaatcaagttaaagtggagtcattaataccgcttctacagaaataaaaagagtgacagtgtactatgaataactgcatgccaacaaatggactaacctacaagaaatggataaattcctagaaacagaaagcctcacaaaacttaatcaggacaagaaaatctgaatagacctacaactaactagtaaggagactaaagcagtaataaaaaaaacgcccaataaataaaagcctcattcgtaattactgccaaacatttaaagaaaaattaacaacagtcttcttcaaactcctcaaaaaaaaatttttttttctctacaaggtctcgcttcctctgttccccaggccgtagtggcacaatcttagttcactgcaaactctgtcccccgcgtagctgggactacaggcacgtgccaccacgcccagctaatttttgtaacattctgcacaggggattgccatcttgcccaggctgatctcgaactttctaggctcacacgatccgcctgctttggcctctcaaagtcctgggattacaggttggagccaccacgcccgacctctccaaaaaatttaaggtggaacactttgaaactcatcctatgaagccagcattacacttttgataccaaaagcaaatactacaacaaaactatagaccaggccaggcgcggtggctcacgcctgtaatcccagcactttgggaggccgaggcgggcggatcacgaggtcaggagatcgagaccatcctggctaacacggggaaaccccgtctccactaaaaaacagaaaaaattagccaggcgtggtggcgggcgcctgcagtcccagctactccggaggctgaggcaggagaatggcgtgaacccaggaggcggagcttgtagtgagccaaaatcgtgccactgcactccagcctgggcgacagtgatacttcgtctcaaaacaaaaaaagaaaaaaaaaacaaaaaaaacctgtagaccaatatcccttatactgatgcaaaaaccatcaaccgcatactagcaaattcaacagctcatttttgttccaattcgtactcaattcccggtttcttttactttatttttttagagacagggtctcactgtttgccaagctgaatgcgaactcctgggctcaagcgatcctccctcctcaggccccacgtactgagactgcaggcgtgagccaccgccctcagctgggtttaacttttttttctttgaggcacggtctcgctcttgcccaggctggagtgcggtggcgcaatctcagttcactgtaacctgagcctctcagcctcccgcgtagctgggactacaggcacgtgccaccacgcccagctaatttttgtaacattttgtacagaggttcgccatcttgcccaggctgatctcgaactagtttctaggctcacacgatccgtctgcctcggcctcccaaagtgcttgggattacaggtggcagccactacacccagccactccaaaaaatttaagatggaacactttgaaacatcctatgaagccagcattacactttgataccaaaaccaaatactacaatacaactagagaccaatatccctcaaactgatgcaaaaaccatcaactgcataccagcaaacccaacagcacaagcaagcctcccgaatagctgggagtgcaggtgtgcgcccccatgcccgactcattttttatttttattttttggtaagagacggggtttcgccatgttgcccaggctggaattttaattgctttttatcctcacatcctgggttagagtcgctcattcaccctcggggatccagtacaactgcttaccagggaagccctgctccccgctaaaatgaaaaccacagctagcccaatctgatcccagtgacattctcccgccacctcagtccagtctggatcctttgtctcccaactggagatcttggcgacctccagaactttggccgtgggtaaattgaggggcgggctccagaacccgcggctgaccaaccaaccgaccgacccttgggttggcgggaatagtgcctcgctgccatctagggtgctcgaccgggccccaacagcccaagacagggcattacgacacagcccattgtgcctctgaaggctctcccttcaccacacggcctcatggccaccaggcctgaagccaccgggcccgtggccctgcatgacccagacttcaatgaggagaacttacccggagctcgtggagcatgtggccctgatggaatggattcgcaagcggctggccatatcttgcaacacctgcaaggtgcccctgtcaggtctggcctcctccgggaactcagccctcgcctcagcatccgccattagtccaacccctttggagtctgaagacccactcctacgtctccggcgtctgaagagcgaatggcgcctgcgagctgcccagtgcgtttatgtgatgtcggtgcagctccctccgcatgcctcgtgccactccctccacctgccgctccctccgccggccgctccctccgcaagcaagtcaagggatctggaatgtttgtgacttgcatgtgcacagttattgaaaatagtcccattctcatcttctctcctgcaatctcaaaagggctccctccgcgcgggtgcagggtcttctttctctgcacaaaaagttccggcactagctgtgtggtgccgcacgtgtcagggggtggtgccgcacgtgtcagggggtggtgccgcacgtgtcagggggtggtgccgcacgtgtcagggggtggtgccgcacgtgtcagggggtggtgctgcacgtgggacgtgcagctgcaaccgtaaaggtgggggagggagggagctgctgtggcgcaattttttgtttcgtgataaatggtcacccctcccccacaacagcccaggctatggcgggcagggtgggggtggggcagtgctcagggttctgagacggttggcgcctgcgccagcctcctttccttttttaaaacattctatgaggcaagccccgtgtgattgttgaggaggagttagcccattgccagcctgtgacgtgactgactcgaatgaaccctggtaactagggaatgtgctcgccctgtgtctgaaatgccccatgtccggtggtgccagcactagcccccatgtcggtctcagagaaccttctccccacctctgaggtgacctaccgacccagaactcgcatggctcccaacggcgccagctccacagcgccgtgcccaagtccagacattccggatcccaagtgctgtctcttggttcaaaaatgccgaatttctacgtgagctcaagtcaggccgcctggtcgcgccacaggctgaatgcccttgggttcccatgttctgctgggttaaagggaatgtgtgtttacattttttttttttttgagacggagtctcgccctgtcgcccaagctggagtgcagtggctcgaacttagctcgttgcaacctctgcctcctggcttcaagcgattctcctgcctcagcctcctgaatagctgggattacaggcatccgccaccacacctggctaattttttgtatttttagtagagacgggttttcaccatgttggccaggttggtctcgaactcctgacctcaggtgatctgcccacctcggcctcccaaagtgttgggattacaggtgtgagccaccatgccaggcggtggtgggcacctgtaatcccagctaatgggaatctgaggcaggagaatcacttgaatccgggaagcgaggttgcagtgagctgagatggcgccactgtactccagcctgggcgacagagcaagactccgtctaaaaaaaaaaaaaaagtggctgggcacagtggcacacgctcctgtaatcccagcactttgggaggccaaggtgggtggatcacctgaggtcaggagttcctgaccagcctaacatggagacaccccgtttctactaaatacaaaaaaattagctgggtgtagtggcacatacctgtactcccagctacttgggaggctgagacaggagaatcgcttgtacctgggaggtcgaggttgcggtgagccaagatcgagccattgcactccagcctgggcaacaagagcaaaactctgtctcaagaaaaaaaatttaacaggccacctaattgcgattaaaaaaaaaccaaaaccctgaatctgtttagattcccacttgcagggtatgtgacatcaccttctgccacattctcgccagccctggacattgttaggctttttaatttttggcgttctggtggatgagaaaatagtatttaattgttgcttttcgcttactattcccggatcaccttgcaattacatgttttattatacgtttactgtcttttgtttttcgtcgtctgagatgtccgtggctaccctttaatgtctttatattgggttatttgctcttagtttactgatttgcagttctttatatattgtgttgattagccctttatctatcagatatgtttcaagcctttttttnnnnnnnnnnnnnnnnnnnnnnnnnnnnnnnnnnnnnnnnnnnnnnnnnnnnnnnnnnnnnnnnnnnnnnnnnnnnnnnnnnnnnnnnnnnnnnnnnnnnnnnnnnnnnnnnnnnnnnnnnnnnnnnnnnnnnnnnnnnnnnnnnnnnnnnnnnnnnnnnnnnnnnnnnnnnnnnnnnnnnnnnnnnnnnnnnnnnnnnnnnnnnnnnnnnnnnnnnnnnnnnnnnnnnnnnnnnnnnnnnnnnnnnnnnnnnnnnnnnnnnnnnnnnnnnnnnnnnnnnnnnnnnnnnnnnnnnnnnnnnnnnnnnnnnnnnnnnnnnnnnnnnnnnnnnnnnnnnnnnnnnnnnnnnnnnnnnnnnnnnnnnnnnnnnnnnnnnnnnnnnnnnnnnnnnnnnnnnnnnnnnnnnnnnnnnnnnnnnnnnnnnnnnnnnnnnnnnnnnnnnnnnnnnnnnnnnnnnnnnnnnnnnnnnnnnnnnnnnnnnnnnnnnnnnnnnnnnnnnnnnnnnnnnnnnnnnnnnnnnnnnnnnnnnnnnnnnnnnnnnnnnnnnnnnnnnnnnnnnnnnnnnnnnnnnnnnnnnnnnnnnnnnnnnnnnnnnnnnnnnnnnnnnnnnnnnnnnnnnnnnnnnnnnnnnnnnnnnnnnnnnnnnnnnnnnnnnnnnnnnnnnnnnnnnnnnnnnnnnnnnnnnnnnnnnnnnnnnnnnnnnnnnnnnnnnnnnnnnnnnnnnnnnnnnnnnnnnnnnnnnnnnnnnnnnnnnnnnnnnnnnnnnnnnnnnnnnnnnnnnnnnnnnnnnnnnnnnnnnnnnnnnnnnnnnnnnnnnnnnnnnnnnnnnnnnnnnnnnnnnnnnnnnnnnnnnnnnnnnnnnnnnnnnnnnnnnnnnnnnnnnnnnnnnnnnnnnnnnnnnnnnnnnnnnnnnnnnnnnnnnnnnnnnnnnnnnnnnnnnnnnnnnnnnnnnnnnnnnnnnnnnnnnnnnnnnnnnnnnnnnnnnnnnnnnnnnnnnnnnnnnnnnnnnnnnnnnnnnnnnnnnnnnnnnnnnnnnnnnnnnnnnnnnnnnnnnnnnnnnnnnnnnnnnnnnnnnnnnnnnnnnnnnnnnnnnnnnnnnnnnnnnnnnnnnnnnnnnnnnnnnnnnnnnnnnnnnnnnnnnnnnnnnnnnnnnnnnnnnnnnnnnnnnnnnnnnnnnnnnnnnnnnnnnnntcgaggttgcggtgagccaagatcgagccattgcactccagcctgggcaacaagagcaaaactctgtctcaagaaaaaaaatttaacaggccacctaattgcgattaaaaaaaaaccaaaaccctgaatctgtttagattcccacttgcagggtatgtgacatcaccttctgccacattctcgccagccctggacattgttaggctttttaatttttggcgttctggtggatgagaaaatagtatttaattgttgcttttcgcttactattcccggatcaccttgcaattacatgttttattatacgtttactgtcttttgtttttcgtcgtctgagatgtccgtggctaccctttaatgtctttatattgggttatttgctcttagtttactgatttgcagttctttatatattgtgttgattagccctttatctatcagatatgtttcaagcctttttttttcttgtttgcttttatttatttattttttgagatggggtctcagtctgccaccctggctggagggcagtggtgcgatcayggcagcctcgacatccccgggatcaagcgatcctcccgtctcagcgtcctgggtagctgggactacaggtgtgcaccaccactccaggataattgttgtattaattttttttttaatagagacggggtttcgccatgttgcccaggctggtcttgacctcctgagctcaagagatccacccaccttggcttccaaagtgctgggattacaggcatgagccagcacacccagcccttgttttwttttctccccctttctttctttcttttttgtttttgttttgattaatcaagtcccatttttttctcctcttggttatttggatgttatgtacatatgtagcttcttttctagtgattacttttttttttttttttgagacaatctcactcttgtcagtcaggctggagtgcagtggcgcagtctcggctcactgcaacctccgtctccccggctcaagcaattctcctgcctcagcctccccagtagctgggattacaggtgtgtgccaccatgcccggctaatttttgtatttttagtagggacagtgtttcgcagtgttgaccatgatggtctcaaactcctgacctcaagtgatccacccgccttggcttcccaaagtgctgggattacagctgtgagccaccacgcccggcccggccccccccccccgctcttttttttttgagacaaggtctcactctgtcacccaggttggagggcagtagcacagtcacaggtcactgcagcctctacttgctgggcacaagtaatcctcctgcctcagcatcctgagtagctgggaccacaggtgcacaccactgccctggcaagacttgctttttaaacagttgttgaattcttacatttgtcagtggtgtactgaactccttcatgtctaaaaatgtctttagtctaaccccacagttgacagttggggtgtagaattttaggctgggaaatcatttttccctcagaatttcgaaagcagcacttcattgtcttttttttttttttttttttttttttttgggacagagtcttgctctgtcgcccaggctggagtacaggggagtgatcctcggctcactgcaacctcttgggttcaagcgattctcttgcctcagcctcccgagtagctgggattacaggcgcccaccacaatgctggctaatttttgtatttttagtagagacagagtttcctcatgttggccagcctggtctcaaactcttgacttcaagtgatccgcctgcctgggcttcccagagtgctgagattacaggtgtgagccaccgtgcccggccagcacttcattgtcttctagttccccatgctgttgctgaagtctgaagccattctgacttctgattctttgaatgtgacctatttttttctctctgacagttattctctcagtgtatcgaagatatcagtcaactatcttctggattgcattgatgctattgagaaggcagcctgcagtctaaaagtcatggttttaaaggtaatcagctttttttcctctggctgcttttaacatcttgtgtcggccgcgggcggtggctcatgcttgtaatcccagcactttgggaggccgaggtgggcggatcatttgaggtcaggagttccagaccagcctggccaacatggtgaaacactgtctctactaaaaatacaaaaattagctgggcatggtggcgggcgcctgtagtaccagctacttgggaggctgacgcaggagaatcgcttgaacccgggaggcagaggttgcagtgagccgagatcacgccactgtactccagcctgggcgacaagagcgaaacactgtttcaaaaaaaaaaaaaaaaaaaaaaatctcgtgtctaggtgtggacctatttctgtcttccctgcttaggatttattgggcttcttgaatttgtgaatttgtgtctttcttcagttctggaaagttcttagggagttatctcttaaaatgttgctgctgtggccggtcgtagtggctcatgcctgtaatcccagcactttgggaggccgaggtgggtgggtcacctgatgttgagagttcgagaacagtcttgccaacatgatgaaaccccatctctactaaaaatacaaaagaattagctagctgtgatggcacgcgcctgtagtcccagctactcgggaggctgaggcacgagaagtgcttgaacccgggcagcagaggtcggccgtgagccgagattgtgccacggcactccgcctaggcaacagagtgtgactccatttcaatttaaaaaaaaaagaagaaaaatatgtatatattgctgctgcttcattctgtctgtcttctctctctggtgtgacaattggatttttgttagacctactcatgctaccttccatgtcttctatttttcaagttttctatttttttgtgcctctgtgctgcattctggatacttttttttctttctttcttttctctttctctctctctctctctctctctctctctctttctttcttgggatggagttttgctcttgttgcccaggttggagtgcagtggcgtgatctcggctcactgcaacctctgcctcctgggttcaagccattctcctgcctcagcctcccaagtagctgggattacaggtgcccaccaccatgcccagttaattttttgtattttttagtagagacagggtttcaccatgttggtcaggttagcctcaaactcctgacgtcaggtgatccacccgccttggcctcccaaaatgctgggattacaggcgtgtgagccaccgcgcccggcctggatactttctttagctcctctgtacaatttaccaacagtctctccagccatatcaaatctgccattaaatccatcaattgaacatattattatttattatttatttwttttttgagacggagtctcactctaccacccaggctggagtgcagtggcacgatctcagctcactgcaacttctgcaccccgggttcaagcggttctcctgcctcagcctcccgagtagctgggactacaggcgtgtgccaccacgcctggctaattttgtatttctagtagagatggggyttctctgtgttggtcaggctggtcttgaactcccgacctcaggtgatccgcccgcctcggcctcccaaagtgctggaagtacaggtgtgaaccactgtgccaggcatttttttttttttttttgtattttgtatagacggggtttcaccatgttggccagactggtcttgacctcctgacctccgcccgcctcggcctcccaaagtgctgggattacaggcatgagccaccacacctggcctatattgaacatttaaatagtttgaaaactgtgaaatctggcatatgtatataaaggtgcagaaaacattgatgtatgttttaagaagtaacgataaggtgaacacacatttaaccactactcaggccaggcaccccagcctccacagtcaccccagtcataatccccttctcccgctctagtgggaaccaccatcctggggtttctgttgccaacatccatgctgctctttagctttcctgcctgtgtagtcatccctacacaatattgtttagttttgcctgctcttggaatttatgtaaatggaaccatatatagtatggattttctgtctggtttcttttgttcaacattatgcttgtgaaatgcattcatgtttttcaaggctgtagttcattctcattgctgtacagtagtatgttgttgcatatattacagtttacttacactttctgggcaggtggtttgttgctagttgttggatattgagaacatcagtgtacttgcctcctgggaatatcgcctatgaatgcagttgctggatcatttggtaggtatatcttcaactttgtgatactgtcaagtggttttctaaggtggctgtagtacaaatttgcttcccgccagtaatgattgagagttcctgttgcgctatatccttgccaactcttattgttgttagtctgtctgagtttgaccaatctactgggtacatagtggtatcactttgcattttaaaaattgaggtataggccagatgcagtggctcacaccggtaatcccagcactctttgggaggccgaggcgggaggatcacttgaggtcaggagttggaaaccagcctggtcaacatggtgaaaccctgtctctactaataatacacgaattagctgggtgtggtgatgcacacctgtaatcccagctactcgggaggctgagccatgagaattgcttaaacccgggaggcgaaggttgtagtgagccgagattgcaccactgcactccagcctgggtgacagagtgagactccgtctcaaaaaacaaaaaagtagaaacggaacagaggctgcacctgagctgccccccacctccctctcctagctccttgctctggtgggctgggttccagctatgctgctcttgccatctttattttagaggtaagaaaactgagcctcagagcagtttattaacttgctcaaggtctcagagtggtagagccaggatttgaactgggctcttcgtcaaaggcaatgttaatcccctcaccatgtgagagrctcattcttttgtgttacagtagaattttctgccgtagactgtcagctgtatgagatcaaggaatgtatctggcttctgtaccaygtggtaggcactcagagaaagtatgtgttgaatgaatgattggatgaatgaatgaacctgttaggaggcaaatctctctgcctaacccttcctgtctccctgggagtagcaatacagcaagctgtaagagttgacggaaataagcttattccatactttacaagaacagttctttataaatgagacccacaattggtaatttttggaagagaaaataggagtgcagtgcaaaaacaggcagatgtagaagggagtctggccacctgtgggtcttagtgaggcacacatgtagagcaaggagtcagacgctgaaaaggaggggagaggggccctgaagatgagcatcacctcctcagtctgtgtcgggcccatcttgaatgcacaaatcttgcgtgtgtaagtatccatgcatatgtggaagtgttttatggagtcataacgtgtccaattctcccacactttgcggctcacagagcaccgtattgtgatttcttgtttcccaacgtaggcggaacacaccaggagccccagcgcaaccctcccctccaatgtgccttcatgccggtccctgtcatccagcgaagacggccccagtggcccttccagcctcgcagatggaggcctagcccacaacttacaggatagtgtcaggcaccgcatcctctacctctcagagcagctgagagtggagaaggccagtcgggatggcaacactgtgagctacctcaagctggtatccaaagcagaccggcaccaggtgccgcacrtccagcaggcctttgagaaggtgaaccagcgcgcctctgccaccatcgcccagatcgagcacaggctccaccagtgtcaccagcagctccaggagctggaggaaggctgcaggcccgagggcttactgctgatggcagaaagcgacccagccaactgcgagccacccagtgagaagsccctgctttcagagccccccgagccaggtggggaagacgggccggtcaacctgcctcatgccagcaggcccttcatcttggagagtcgcttccagagcttacagcaggggacgtgcttagagacagaggatgtggcccagcaacaaaacctgctgttgcagaaggtaaaggcagagctggaagaagccaagaggttccacatcagcctccaggagtcctatcacagcctaaaggagaggtctctgactgacctgcagctgttgctggagtcccttcaggaggagaagtgtaggtgaggccttggctctggggactggaagcagaggaggaaccgctcccaggagccacctatgggagggtgaaagggagccaggacaggagcctggagagccagggtgaggggccagttggaagagcaggtccatgcttcttttagcgactgggccctgcagtggggcgagccagccctctccctgcagtcccacacctgccttgacccttgctagcgaaaatgctccagcttggcagcccctgccgggtggttgcagcggcatagcggctggccctgaccctgtggtggcaggggacaacatgggggtggcaagagtccggtagacacctggcactagttagggaggtggygtcctttggtcccagtcggctgggaaggtgggagtcaggaccggagtcgcctcgccagctctggtctcttcacatgtgctcctagctgagctggggcacaggccgggtctcagatacttatttcaaaaatgactgccttctggtgaatgctttctccgcaccgtgcagtagctcgattttctttttcttttttttcttttgagatggagtctcactctgtcgccagactggagtgcagtggcacgatctcggcccactgcaacctccacctcccgggttcaagcgattctcctgcctcagcctcccgagtagctgggaatacaggcgtgcaccagcacatccggctattttttgtatttttagtacaggcggggtttcaccatgttgaccaggatggtctcaatctattgacctcgtgatccgcctgcctcagcctcccagagtgccgggattactggtgtgagccacctcaccctgccctagctcgattttctttccctctaagataaggctagggcctaccaattggaggaaaaaaaaaaaaaaaaaaaaaaaggcaaacccaatctctcaacggattctctccattcctattgggaccgttctctgggtttccatgggccctcagggggtgccacattctgtccccctcgctgcagtctgtggctaattaacgccagtccctccagcgtcctggctagggaggcagcgattcccttaggtgagccaagattctcagcatttgcatgaaaagaagaactccgcagtccttttagtgcctgatgcaggggaagmggcgtgtgggaatcatcctctttagtttccccagggaaatcttgccagcgtttacatggcctaagaatctgttaaaggacaatcaaagaatattacagggcaaccactgtcaatgagatgactagtcagagtcacaggcgtctcttgcagattattttcataggacatggcaaccaaatctaaaatcttgggagcatcaaagacccttttgtgaaaatcacacttacccggtcagctttctattaagcaacagcagaacttggtggcagttacaaacttccccgtatgtttccaagccacaggggccaatgagaatgctgtgctcaggtaaactcttaacccctstcaaatccgagtctttcgccccctcttgatacagcggtgactaccggggagcagggcaatacctctgtctctccccctctcagacttttgctgcaaattctagaagcctgcacttctgacccsgtaccccccattggactgtgacatgggatgtctggttgtttgctgcagcagcgagcctacccttactaatgttcatcgtgagcagaaaagcaggtctacagggcccaagcaggtctacaggaggagaaagggctgctgatgatttttcactgttgtcacgggctcgtaactgagctggggcaccaggttaagcagccttgttctttggccctcagacgcctactttatggttggggaagcagagtctcacagaggcacaagcaggctacgtggctgctaagtgcggacctgagagcatttcaccacaccctggctgtgtggctaagttagatgcaggggacacaggagttcatggcattttaaaaacatatacttccgtaaaatcttcttcaaaacttttacatgatctggacacagaagtgtttcaaccagccaggctccctgtgactgttgcgtcccctctggtgcatcacaaactgagaatccatactgcaagtcctgtgctgtttatcacagttaaatccgtttgctttcaggagggcygttgtggtttttatcattatggtttctttttaatttggtctcggcatgtctctactgagagtggccatagccgagatacccagtttctaggagatccctgacccgtgggaaagttaggttcggatgtgtgtgtcaggggagccacagtgaggaggcagacgaaaatgcatgaaacagcagaaatgggctgggcgtgggggctcacgcctgtaatcctagcactttgggaggttgaggtgggcagactgcttgagctcaggagtttgagaccagcctgggcaacatagtgagacccggtatctacaaaaacatcaaaaaattagctgggcgtgatggcgcgtgcctgtagtcacagctactcaggaggctgagcgggagcggggatcccttgagcccgggaggttgaggctgcagtgagtcatgattgcaccactgcactccattctgggtgacagagcaagaccctgtgtcaaaaaaaaaaaaaaaaaaaaaaagaaatgtatgactcagatcgaagagatgttaggtgtgctgatgggaggcagaggggaagtctggaggcagcagggagctgattgagctcatcagctgtgcaacagcgaagcccagaacggaagggcggggaagcttccggggctgtgcctgtattaaggtcacagggtgtgaagtgatcccacaggctttcctgcgggggttgtggattggctggtttaaagaaaacatgcacgaggaggaaactgatttacatgactctggtgttgagcattaggtcttatcgtggtcagcagccgtgggatgtgttgggttttgggtcagtgaggcgaggaccacgtgggctatrtcgcaaacaatcacatgacagggagggaggggtgttatctagggcaaaggtgacagggtacaactgctaaagttggatgctgaggcagcaactgtattaaacgcatttatgacaagggcttacttaaaaaaattgatgtagaattcacataatttcacgtaatgtgaaattaaccatttggaagcatgtaattcagtgcattaagtacatctgcagtgtggttcaaccatcacctctgtccggttgtctaacattctcatcaccccagaaggagacctccagactcactacacggtcactcctagcctcggctccaggcgttccctaatctgctttctgtctccgtgggtttgcctcttctggacttttcatataaatgggaccatacgatatgtgggcttttgtgtctagctcctttcactgttttcaaggttcactaatgttgtagcacgtatcagtacttcattctcttgacggctgactaatattccagtgcatgggtagaccacattttgtttatctgtccatcagyggatggagatttgagttgtttccaccttttggctattgtgagaagccctgcgctgaacactcagatacatgccagttgtttgaacaccagttttcaattctttggggtctataatcaggagtagaattgctggaccccgtggtgactccaggtgtagcgtttagaggagtcttcccacagcagccgcgcagctccatcttcccaccagcaatgcagaaggcttccagttgcctcacatccttgccaacatttgttgttatcctttttttttttttccaacagatgtaactgtgaagtggtatctcattatgagggctggctttcttttttatttttcctgagtctttggataggcaaaagttctttctttctttctttctttctttcttctttttctttttctctctttctttccatctctctctctctctttctttctttttctttctctctttctctttcttcctttctctctgtctctctctctctctctctatctctctttctttctttctttttcttcagggtctctgttgcccaggctgcatgcagtcatagttcactacagccttgaactccygggctcaagcgatcttcctgcctcagcctcccgagtagctgggagtacaaagcatgtgccaccatgcctggctaactttttaaaaattattattatttgtagagatgggatcttgctatgttgcccaggctggtcttgaacacctggccacggcctccccaagtactggggttacagatgtgagccactgtgcctggacagttcttactttttaatgcattttttaattgattgtggtaaaaamaaaaaacccacaatatattctttttgattctgcgamgtgcagggtctctatcacagcaacaattagactcaggaggcttggggctggccctggggtctcctccttcatgaggtctgggtttgtrggtccttgcagaggacgttcctgggtcctggaaggactgtgactgcttccgctggagttgcttgaggcccctggtaactctcctctctgtgtgctgaggagaagcacgggcgtcgcgaacttgatgattctggatggaagggtctttgccaagcttccctttctttcttgtggaaataggaggagcttcagatctccgagaagatgcacagtgagcggcckacctcctcagcacaagccagtctcctgggggaccagaaggccccggtccctcagtttcttcgtgggtcaggaggaaagaaggcttgagaaactcagaaaaygttcattggtagaagagatggcacccmaggaaggcatggggagccttcaagtaaaagtctcgactggccaggtctcatctgggcaccttgcatgcagagttgcaggaggccccctctagcctcctaatgagccagggggctctgggagggtcttgggggtccttccccatctcttacaggatgcgcagctgacttctgcttgatggtgaaaggcagtcaggtttcagtcttggccccgtagacagggcatggacaagtcctggagttgggggtatggtgccagcaaaaccatctttactctctggggtccatagccagtcccagcctgcccagccccaccctcctccttcacctttgtagcccgagtggtcaatgcctggggtagatgggttgctgggacatctttgttctttgttggatgagtaaaatggtcctgggagaaaacccgactgtgaggagcacattgcttcttttttttgtcttttttatgagatggagtctcactctgtcccccaggctggagtgcagtggcacgatctcggcccactgcaacctccacctcccsggttcaagcgattctcctgcctcagcctcccgagtagctgggattacaggcacacgccagcatgcctggctactttttgtatttttcagtagagatggggtttcgccatgttgaccaggggtctcgaactcctgacctgaagcgatccacccgcctcggcctcccaaagtgctggagttacaggtgtgagccaccacacctggctggaggacattgcttcttgccccatttctagttccctagacctgccttggcatcaactcattgaaggctccacttggtgacaaggaaccggcttatttggaaacagggtcgttgcggacgtgatgagttagatctggatgaggtcattctgcagaggggtgggccctaatgcagtgtgacctgtgtcctgacagaaaggggagacggagacacggacacacccagagggagagcgccgtgtggagacagaggctgaggccgacctgccgtggcagaagccaaggaagcccgcaggtgggcagcagagcagaagctgggacagaggccccgagtggaggcgccttctcggtcctcggcaggagcccgcccagcctgggccttcctctcggactgctggacccccagccaggagagaggccatctctgctgggaaagccactcaaagtttgtaacgctttgtgatggcagccasaggaaactcccacactcagcttgtcctttaggctctgctctgatgtcctctcctcaaagggacttcccaggctaccacgttcaaatggcctcttcttttattcttttggaagcggggttttttgaagtaaagtttttgtttttttgttttttttagatggagttttgctcttgttgcccagaccggagtgcaatggcgcaatctcggctcactgcaacctccgcctcctgagttcaagcgattctcctgcgtcagcctcccgagtagctgggattacaggcaggcaccaccacgcctggctaattttgtaattttagtagagatggggtttctccatgttggtcaggctggtctcgaactcctgtcctcaggcgatccacctgcctcggcctcccaaagtgctgggattacaggagtgagccaccgcgcctggcctttttgaggtaaattttatgcagtgaaattgcatttaagtttaggcatacagtttaacgagttttgacaaaggtttacacctgggcagctaaaatcccaataaagagctttgccaccaccccagaaagtaccctcataccctcttccagtgaatgcccgtctcccataattggccactgttccggtttctgtcactctagcttcatctccttttgaacttcacgtaagtggaatcgcacggcacgcagtgctttgtgtctggcggctttcgctccgtggaattgttttgagatccacccaagctgtgtgaagtgagtagctcatggcttcgtattgcttggcagccttccattgcatggagacgccgcaggttgcttatgccctggtccgctgccagttggggcgactgaataaagctgctatgaacgttctcgcacaagtctttctgtgaacatatgctttcatatatggaatkgctagataacagggaagtgttatgtgtcttagtcccactttctgttgctgtaacagagtaccgcaggctgggtggtttataaagaaaggaagttcaatgtcaaggcgctggcagctggtgaggacctttgtacggcatcatcctatggcggaaggcagaagggcaagagggcgtgagagagcgagcgggggccaaactttcatgataacaatattaatattaatcgcctcttaccagtcccaccccttaacaccatcacatggccattaaatttcaacacgagttttgggggggacatgtaccccatagcagtatgcttaactttttaagaaagaggaaggccgggcgcggtggctcacccctgtaatcccagcactttgggaggctgaggcaggcggatcacctgaggtcgggagttcgagaccagcctgaacaacatggagtaaaccctgtctctactaaaaatacaaaattagcccggcgtggtggcacatgcctgtaatcccagctactcgggaggctgacgcaggagaatcgcttgaactcaggaggcggaggttgcggtgagccgagatcgtgccattgcactccagcctgggcaacgagtgaaactccatctcaaaaaaaaaaaaaagaggaactgttttccgacatggctataccattttacagtcccgctaggagtgtataagagttccagttgccaacgtttggcaagatcagtcttttaaatgtcagcctcttaagttcagccacaacttggtgaaattagactccaaaatttcatcaccctagcccatgttctctcgaccttggcactgtcgacattttggaccgaatgattctctgttgtgcggggctgtcctgtacattctaggatgatgagcagcatccctggtctccacttacttgatgccagtggtgccgtgaattaattgatgctgccgtgacaaattgcccccaacttcatggcttaaaataatagaaagttattctctcgcagtcctggaggctagaaggccgaaatccgtttcactgggctgaaatcaggcgaggaggacacacactcattggaggctctaggggacaaactgatctttgcctcttccagtttctggtggctgccaaattccttaattttgtggccacatcattcctgtcctgaaggccagcatcttcaaacctgtgttctgtcttcacatgacattctcgtctgtgtgtgtctaatgtccttctgcctctctctcatacatgtgattgcatttagggccaccaggataatctaggataatctttgcatctcaatacccttaaactcaccacttctggaaagcccccttttttggtcatagaaggtaacattcacagtttccaaggattatgacacagatatcttttgcggaggggctttttgtttttttcttttttagacagagtctctctctgtcacccaggctggagtgcagtggcacgatcttggctcactgcaacctccgcctcctgggttcaagcaattctcctgcctcagcctcccaagtagctgggactacaagcgcgtgccaccacacccagctaatttttttgtatttttcatagagacggggtttcaccctgttgctcagggtgttcttgaactcctgagcccaggtaatctgcccaccacagcctcacaaagtgctggggttacagatgtgagccaccgtgcccagcctaggggggcaattttagcctaccgtgccccacctatttgtaacaaccagaaatgtctgtccagagattgccaaatgtcccttgtttggggaggggggggccggcaaattgcccctggttgagaaccagtatcctagcccatgagactagtgggtgtgtgaccctgcctctgacgattaatgatgctgaaccccttttcatgtgcttatcagccaataagtctttggcttgttttcaacttggattgtctttttattgttgagttgtcagagctctttatatactccggaccagtctttgtcactcccctactttttcctttctcgcagcactcaccgcctaaactgctctcccttgtgtaggtattcatttgtgttgtattgttctcgtcaaaatatcagcacattcaggtcggccactgtgtctgagtgactgcccaaagacatgttggcacatgatggctgttctgtgagtacctgtttcatggatcagtctggatgctgcttttcctcccttcctgaagggacccagctcgccctctgggctgcctccctcstccatgtatgtcagaactctatctgctgtgtcttgggaacatcagggcagggccaggagggctgattctggatttaggcctggcccagcctcctctctgcaaggtatttactgaatgaccttggacgaggtgcttcaagtttgcaatcctcagtttccacatctgtaacatggaggtaaaaatgatcccactattgttggaactgttktgagaattaattaatacttgtgtgtaagccccaagtagatgctgatggaactgaatttacaattcctttctgcttcctatgtgcaaactaagtccttgaaagatcgtaaagaaaaatggggccagatgtggtggcttatggctgtaatcccagtgctttgggaggtcgaggcaggaggattgcttcagcccaggagtctgagaccagcttgggtaacaaagtgagaccatatctctgcaaaaaattttaaaagtattaaccggacttggtggcacatgcctgtagtccctgctacatgggaggctgagacaggaggatcgcttgagcccgagagttttatgttgcagtgaactatgattgtgccactgtgctccagcctgggtgatagaggacagagtgagaacttgtctcaaaaaaaaaacagaaagagagagagagagagaggagagagagagagaggagagagagagagagagagagggagagagagagagagagagagagagaaagaaagagaaagaaagaaagaaagaaagaaagttgttaatggcttttttttttttttgaggtggtgtcttgctctgctgcccaggctggagggagtgcagtggcttgatctcagctcactgcaacctctgcgtcccggattcaagtgattctcctgtctcagcctcctgagtagctgagattacaggcatgcaccaccacgcccagctaatttttgcatattttagtagagacggggtttcatcatgttggccaggctggtctccaactcctaatctcaaatgatccacctgccttggcctcccaaagtgctgtgattacaggcgtgagccaccactcccggccartgactcttgataaattcatcaatggagcaccctaggttgatgagctcagggatttggccaagatctcgacctgaccctgccttcctcttctttccctgagtcaatgcctcctgggtttgtcattcctgctgccctctcctctccacagcattacagtgctccactaccccttactctggttgtctgtcactttctagcagcttctctaggaccgtctccacatacctgatggtcttgtccatctctcattcataaattgctggtagaggttcagagataagaagctactcaagtcagaaagcagattggtggttaccagggactggggtgatggggaatggggagtgactgctaaatagtattttttcgaggcrgtgatgaaaatgttttggaacaattttttttttttttttgagacggagtctcgttctgtcacccaggctggagtgcagtggcgtgatctcggctcactgcaagctccgcctcccgggttcacgccattctcctgcctcagcctcccgagtagctgggactacaggcgcgcaccaccacgcccggctaatttttgtatttttagtagagacggggtttcaccgtgttggccaggatggtctcgatctcctgacctcgtgatccgcccgcctcggcctcccaaagtgctgggattacaggcatgactgcagccggccaatgtcttggaactattaatagccatggtggttgcacaacaccacatgtgctaaatgccrctgaattgttcaccttaaaataattcattttatgttacatgaaatttacctcaataaaaattgaataaaaaagaagctactcaggtgccgagtaggcaaaactttcactcttgctttgtatttctggctgtatccacaagtgggcagtcgtgaaattttcttatagcctcctgtcatattgaaaacgcccggaagtgaatatgccaggtctccatgtttttctttccctyctggacacgaggtccttgggggcatccagaccctagctcctctgtcccaagactgttctggtatgtttcgctttcagacgaggcttggagataacaggctatggttcctagaggcttcagtgttgctctgtgacctctcagccccagggatccagtctcgggctgactttcctcaaggtatctgcttagggctttgttgcaggctggggtcgtgttaacttgaaggcacaagaacttccattttttccccgacttctcctccatgtcacagcatcctgcatcttgggatctctgaggaggtctgacctaaggtctgatctgctctctgaactggttcctctcatccctattgcgttgaagcaaagcacagacattatatcagttcatctgtaaatatttcagtgtgaacctgaaatatggatcattttgttaacatagcctaaataccataccaaaaatgttttaaaacaagtccacaatgttaaatatgcagtcactgtcaccttattgcctcacacatgccatcattcctttttatttctgaaggaattcttttttttttttttttttgtgagacagagcctcaccctgtcacccaggttggagtgcaatggtgagatctcggctcgctgcaacctctgcctcccaggttcaagcgattcccctgcctcagcctcctcagtagctgggattacaggcatgtgccaccacgcccggctagtttttgtatttttagtagagacggggtttcaccatgttggccaggcyggtcttgaactcctgacctcgtgatcygcctgcctcggcctcccaaagtgctgggattacaggcgtgagccaccacacccggccctgaaggatattttttgctggacatagaattctaagttggcacttaatttttggaaataataagcattttgaacaaatcattcccttctgacttccatggtttctgttgaaaaggcagctgccagtcttcttgttgctcctcggatcacagttttgttttcctcaggctccttttaagatcttttgtttttctttgttgtttagtggttttgctatgatgatgtttggcgtgattttctttctctcttcttttttgtgccgctgactctccccttggtgtgattttctttgcattcatcctgcttgggcttcgcattgctacttgggkttatggcttgatgtcttttgtcagttttggacgttttcagccattatattttcaaatagtgactctgccctagtctctcatttttccccttctaaggccccagttacatgtatgttcaacctttccactgtatccctacatcctctgggttcctgtgtgagccgtcctggcgaatttcctcctgctttcgcttctgttttgttggctcttcccccagctccccagggccccttgctttggcacatttgctcagagtgagctcatccatcctggccacatgcaccgattgcacctgggctattgacccctcctacagctgtttctccgtctcagacttttcctccaagttgtgggccatgattaggctctagctcaatttgccaaaagcaaattctcagaaatgaccaagaatatactctttctggctgggcccaatgrctcacacctgtaatcccagcactttgggaggccgaggcaggcgggtcacctgaggtcaggagttggagaccagcctggccaacatggtgaaaccctgtctctactaaaaatacaaaaaattagcccggcatgatggcgcatacctgtagtcccagctactcaggaggccgaggcaggaaaatcacttgaacccgggaggcggaggttgcagcaagccaagatcgtgccactgcactccagcctgggcaaayagaaggagatccgtctcaaaaaaaaaaaacaacaacactattttgaaaaaaacaataaagtttagaacactttgtgttggagagggtggtcttaacaccttcggtctgtcttgagggtgtctgggttgactggtcatcgttttgtgttcataagagcattctccagagttgtccatttgcttttgtgactgtaggaggtggagagaggggggtccttgaccaaggaagagaagggagcgyggctgccagagggccaggagatgggggccagagagaaggggagactgagagaatatccttatgaaaatattgtttactgacatctgaakagactcttcaagaatgcactgaagaatatcttcatgtatctttaccaatacattgatgaagattgacttcatattcctgaggacagttaaaatcttgaatgttctcacagctagatcattcatgtaaatggaaagacagtaatgaggaatctattttcggggtgaccatcctgccgacccactccccctctctgtgagcagtggcctagtccatgttgtccaccgactctcttcttaacagggacctggggcagagacaaatggaatattccttgaaatgctgcgaggaaccagcttttgacaaattggctttcaacaaatgagctgtcagcttattcagtgcccgggggatttctccgtgtgggtgttggtcaagtccttggagtgggaccgaatagaagtcgtcactgttttccccgtctctgtcagcaccaccgtttagacctcctgcacctgaggcctgccgccaccctcctgggcctcctggggcggcagccctgccagtctatgggttccatcacgctctggtgccttctctcttctacgtaagcggtggtgccagagccccctcactggccccctggcctctgtccttctggcccgttctttgtggtgccaaaaggggaacttcatagaagtttttaaattatgaagtatttcaagcaaagggaaaatgtaaggataacataattaacagccccagctttctgaaatcttaacatttgccatattcacttcaaatcttatttttttaggaaataaaactttaaaatattctgttgaagccctcattacccctttccagcaccatctcccttccttgctattctggccttgctatactggcctcaccattctcatttgggtgcttatcttttccatgcatggttttatacttttactacttatataattatatacacaacaggtagtgattgttttcttttagagatagggtctcactctgctgcccaggctggagtgcagtggcgtgatggcagctcactgcagcctcgaactcccggactcaagaggtcctcctgcctcagcctccagagtagctgagactacaggcgcgtgccaccacacccagataattaaaaattttttttgtagagacagggtctcactgtgttgcccaggctggtgttgaattcctcctggcctcaaacaatccccttgccttggcctcccaaagcgctgggattgcaactgtgaaccactgcgcctggcctgcttgtggttttttaacagctctattgagatataatttacatattataaaatgcaccattttaactacatttcaatggtttttagtaaatttactgagttgcgcaactattgccatgattcacttttctctttttgtttaaataacggctctattgagatataattcacatcccataaaattcaccaatttaaagtgtacaattcactggtttttcgtatagtcacagagttgttcaaccatcaccactatctaattccacaatattctcttttttttttttttgagacggagtctcgctctgtcgcccaggctggagtgcagtggtgtgaactctgctcaccgcaagctccgcctcccgggttcacgccattctcctgcctcagcctcccgagtagctgggactacaggcgtccgccaccacgcccggctaattttttttgtatttttagtacagacggggtttcaccgtgtcagccaggatggtctcgatctcctgacctcatgatccgcccgccttggcctcccaaagtgctgggattacaggcgtgagccaccgtgcccggtcctacaatattttcaccagccccaaagcaaccctgtactcattagcagccactgcccatcccccacccccagcccctggcacccactaatctgctttctgtctctatggatttgcctattctggacatttcgtaactaatggaattgtactggaatctgtggtcttttgtggcttttcaatccttatagtcaccatgtttctatagagtaactgcaggctaaactgcaggctagacttcgtgctcaacactggtcctgggggatttgcggaactgaagagcacacacagatagttcacactgtcatttctrcaacttctagtctgtggctatttttgtaaagctgttacaaaagagtaactacatataaaatatatatgaatattggtgtgcgtgtggctggtgtgtgtttggggtgttcccaggcagacctggagtgggaggcaggctttccctagagcctggggagcggggaggaaggcagaagctgaacccgaatctagtctaggtcaggaccgctcgctgttggcatgagctctggatgaggtactgaaggaatctcactttctcttttgctcccaaggcaagcattgatggaagaacaggtgaatggtcgcctgcagggacagctgaatgagatttacaacctcaaacacaatctggcctgcagcgaagagagaatggcctatctatcctatgagagagccaaggaaatatgggtgagaacctcctgggggagccttgcaagaagactggagggatgagcgaatctattctgatacccccaaaccaaagcaagacacgggtcctcgagctgccccctcctgagggttcgatggccacacacatttgtttcagagctagcagcatctgatctttacactcacgctccgcttcccaccatctggcttagctgcttttgccactctggtgctgcagtgctcacccgtgagcctctgactcgggagatctggggtggagctgcttctgctgcggctgcaggtgtagggagcgccctctcagaacccctccttagacctggcttccctctcctcacttttccattcccatagcgcccacccccgtccctgggtagctgtgtcttgaccaggtcctcagcttcgggagacagtggatgggggagtgcagccgggtcagatgaagctttccctgttgctggagagcctgcgccctcccctctgccctgaatgtgctctaggctctctgcttccctcctcgaatacccactccacagtgctttctgctcacccctaagaactcaataaacgaccacaactctgtgctgacttctggtgcgtgcattttcgtctcctgcaggagatcacggagaccttcaagagccgaatatccaagctggagatgctacagcaagtcacccaactggaggcagcggagcacctccaaagccgtcccccgcagatgttgttcaagttcctgagtccgcgcctctcactggcaaccgtcctcttggtctttgtctccaccttgtgtgcctgcccctcgtcactgatcagctcacgcctgtgcacctgcaccatgctgatgctgatcgggcttggggtcctggcctggcagaggtggcgcgccatccctgccacagactggcaggaatgggtcccctccaggtgtagactgtactccaaggactctgggcctccagcagatggaccttaaggggccaggagggccacctgccttagcttgctagctccctccctcctcctgggtgctgagggcatccagcaagcccctccacagctcttgcttgccgattatgtaaccaccagcctggtgaaatggatatagacgcccacctgcctcacacttctgttttgccaggatcctttcacgccatcggtagacatgaggctcgggaaaacttaaagtctatgaagcgctctctcctctttatcccccttgcaccctctcgagacccagtgcctgcacacgcagaggctcaggtggtcccacactgcagtgaaagcctctgtgactttgttggttttggcaaagataaattacatttattttacagggatggagaaggagggggaaaggagaggtggccaaagccccggtgggcgggatgggtaggaggcagacctcatgcaggcgataccgaggacacagatgagacctccgttttggaggcgctggagagttcagagccatcgtcaaccttcttcccgaaaagctgcaagatgcagtttcgaaactggaaggacagaaagcgttattgagcagagcagggaagggtggagcactgtgctgaatgtacgtgcccgagccttcccttcacccattccgaatcccatgggggatggaggaaggcttggattatttctccctcacacgcggggatgtcatctgacttagcagttgatggtgactacactgggttgaagtgggtcccccaaaagatgtgttcaggttaagatgaggtcacactggagcagggtgggccctaatcgaatgactggtgtcctgataagaaaaggaacgcttggacacggacacgcagacagagggaagaaggccacgtgaagatgaaggcagagactggggtgacacaccttggagtcaaggaacgccaaagactgccggcagccctgcagctgcttctccctcccggcctccatagggaacctttccatttgccaacaccctgatttcagactcaagatttccagaaccctgagagaatccatttctgtggtttgaagccactgagtttgtggtagtttgtgacggcagccccatgacactcatccacagtgacagctaaggggcagtggtgacctgtccccagactgtctggtgagcggctcggaggaatattaatgaaaaggcatgtggttgtcatgttttttccagtccatggatctggggcaaggtgaggcctaggtaatgacaatctagcccctacctcatctctccagccaagcgtcttccggtaccaggaggggtctgtctttgctgcttcaccccaaagagatctgggccatatgaatgtctcaaatcatgtcctgtgtcatccctgaagtaaccacaatgctttgaggacccagaccaaaggcattttctaaatatttcaggcctactcttgactagctctaactccctctatcatcaaaactctcaaaaataaaaaatataatggttgaaattaataacataagaaacgggacaaacagcagaatcagctcggctgaagagctgggagatagggctgaggaatccattcagcagctgctgcttgagcacccactgtgtgccagactctgtcctgagcaaaatttgctgtcttcatggaactgcgttccagaaaattctctcagaatgtggcaggacaggataattatgtggaaagggtaaaagcaaagttcgaggcctggtgaggtccagaagtgcagacatctgtctccccctgtccagggggagttctggaaaggagaatggaaataatccagtaaagacagtacttggcaagatagtttaggattccagaaacctaaaaaagatcctcatgaaagtcaggaaacaggggtcagggatagaactacactctgggcatcagtgtgctacagcgagttcccggaaatccactgcaggcctggtcctacttactgtttaaaagttaccagagagaatgaacccttaatgaactctgcagacttggcttgtgtgagtcaaagctgagccaaaggggctggagccattgagtggctctaagatggagaagcaaggaagagcccagtggaagggatggactgggcctggtgaaatgggaggcctctgcacacctttctggccaccatcaagtcacatcacagctgcgctttaatgaagcctgtaacctgcaggaggtggggggatttaggtgtgtgagcagcttgctgctgaggcccaatatgccagctaaggaggctgcctctgggcaggaccacagcacgtcccccctgaactaacccacgaactcgtgaaagctcttgaactcttggtcagtgtagccaaggagggccggcttttgttcttataggaagacaaattccagaggttacggtttgaaaatggagagatgaaggttgagaagggtcgagtctgaacagaagaggggcacacctagggtggatgtacctagggctcaccaactcctagagcgtctgaacgccaggagagcccctgaagctcggcagccatagttctagggccaccggaagggaagagcgcacggcacacagacgctttgggaaatgccaccctcaggccgagactataaaggattccagagggcacacctaagccttctgctaagggccagccggagctctggctggggctgggtcacacgctgagcctttcccggtcatttccctggagggtcccccagatgctccgcgggcttcttatcagagacatgattccaggtggggccatcactgcacccttctagggcacacggtattttgagtgggatctgctgatggtgttgcttacctgccggttcataaagacatagataacggggttgtagatagtggcacttttggcaaagaaggccggcagggcagccatcaaagggtggaaggggtagccagggttggcagcagcaaagcatgcgaagaaggcgtatggtccccagcagaagcagaatgccaggaccatcaccaccaccatgcgcgtcacttccttctctgccttctgggtggattcagactctttctgctgctttgccacctaagggagacagggatagtgagtcgggggttggagggcagcaagaggcaggtgacccaggcatagggagttgtggggaggaggagaggagcccagcagccatcttccagccctgagtggagcacagccggccccaggcagacatggctgcctcaggctggccctgggggagttctagaattggaggtggcatgcagctaggtgtggcctaagatgaccccagagctggatctaacaagctcctttgcttcacctgatcccttaacagactgtcctgtcctgcgctcaggcctgagcatggaggcctgatttgattgatgactgggcgtggagaatgaaggagttaacaaggtggagatggcgggggaggcaaaagcagtggctggcggggtgcgcgatgggagtgtcagagcaatgcatacacttccctcaggcttcctaggccaggttggccactctgtggactaaatcctgccctggactcacggtgaggcagctgagggcagctttggtggggtggctccttcatgcctgctgggaggaaggagacgaatggcctccaggcagaggcactgtgggggaggccagaggccagccaccacctgccagggatgagggactggcggcaggcagatgagtggggatgagagagggagtgtgagggctggaatgcagggatggctgagacagcagagctggggccacattgtggagctggggctctaccatcccagactaatacagccgaagccatggttgggtacctgtgggagccttcaccccaaggtgacggggtgagggggcctttcacaggctcacagactcctctagagagagcttggcaggcatgcccatccaattgtgggcacaggcagcttcatataggaaagccagcaccctgaaagggctcccactgctaacagaaaagaaccagcctggctctcctcccttgctctgacttcctgaagggctcccagtggtagcctagtctaggggtggggggtgacggctgtggacaggatcagcttcccagggcagagggccagacatggaggtggagagtgggtcaggggggcaaatggcactctcgggtccactccttggtcggccccacagcctatgaaaaggacaagggtactccggtggcagcctcataaaaacacgccttgatttgcaggtgtcatttgctgatgtggctgctccactctactctgtgggaaaggcagcctttccaccccggggagaactgtccagggtcggggcaaggcacacctctgttcccttagtggactcctccagggagggagtggcagtgctttcccgtctcacagagctgaggacaacggggctggggctgaacctgcagccactggtacagtcccaaaggaatcacctgattctcatcgctggatcttaatattttcttataggggtaaaatcctcttctctaaggatttttggaaaaatagtttaggagtctcagtggactcatttgagggcagagcagcttaggggcaggaggcgggtgaggccaggaggaatcggggggcttaccgctcggatggccagccacacttggaggtagcagagcatgatgatgctgagtggggtgatgcagcaggtgaccatgaggacaatcatgtaagactgcaccccggggtacgagctgccgctgaacacgtctgggccgcatgaagtcttcaggccgtggggccagtacctggagagaagggccggcagccagtcctgatgcagggtggggtgacccaggacccccggcccaggcacggtgctaactcgggtggggtttgtttttttaaattgaggtgaaattcatgttgcatgagattacccaatttgaagtgatcaattctgtggcagtcaccacctctgcttccagaacattttcatcaacccaaaacaaaaccgttgggtaggattttggttaatccttgtccatttttagatgtcatgcctttcttctttttgaattgtggtaaaatacacatcacataaaatgtaccattataggccaggcacaatggctcacgcctatagtcccagcacatttggaggcagaggtaggaggattgctcgagcccaggagttcaagactagcctggaacacatagtgagatcttgtctctacaaaaaataaaaaaaattagctgggtgaagtggtgcacctgtaggcccagctcctcaggaggctgaggtaggaggatcacttgagcccaggaggtggaggctgcagtgagccataattacaccactgcactgtgccagcctgagtgacagagtgagaccctgtctcaaaaaaagaaaaaagtaccattgtgacctttggtacattcacaatgctgtgcaaccatctccactatctgcttccaggacattttcatcttcccaatcactccccttctttacaaagggattgtgaggttccttcttgccctgaccttctgagaacacccatgaagagctgagtcttttatctgaggtcagctaggccatgactgaaataaagggccctgctcacttagtggcctggaggattaaatgagataacccgcgggagagcctccaccagggtcagctcaccacacatgtttgataacgggcagctgtgtggggcatggcggcatgaggagggcgggagacagagacaggcttccacaaggtttgtttcctagaattgtggaacgttctcgaggaaagaacattccctctccaaacaccacgagaacttattcacgagcttgtcgataaaacagtgaaatgctgtcccacccagtccactccaatcaaacatttgagccacttgcttggcctggccaggacatgtgctctgtaggcccaggtggatctatgacccaagcagcctctgaaaggtggggggcgtggtgcggcagcgtgtgcaagaaagagacctggaatgcaaacacgctatgcgttcactgacagctgtgctgatggcctgagctccgtgtgcgcctgtgacctgatcgtgcttgggataaatatgtttccagaggttcggggaccacagagcctttcctatgttgcagccacattcatacattgatagac

SEQ ID NO: 98213 - DNA, 19679 bp, Homo sapiens
gcccccatggcccctcccactggtcaggtcgagggccaggcctcagagcggcccctgtgtccacgcaggtgtttggtcttgggaacaagacctacgagcacttcaatgccatgggcaagtacgtggacaagcggctggagcagctcggcgcccagcgcatctttgagctggggttgggcgacgacgatgggaagtgagtgcccaccctgccaccatgatcagcgcggcgggcttaggcaggggccgtggaacgtgaggggcgcgcacaccattgtgtcagctgagactcagcgacacgcacctccaacacagagggaaggggctctcctgcctctgccctgcccctgccagttttgcttttcggcttgcccaactccctggagccttcctgatgctctgggtttatgtcgctgggtgccccagggtgcacagtcctgagctttggggatggggtggggtcggggcgtgcctggcaccaggtaccgttgccacatgggcctcccctgagccgctccccctctcctctcctcggcccagcttggaggaggacttcatcacctggcgagagcagttctggccggccgtgtgtgaacactttggggtggaagccactggcgaggagtccaggtgagcaagtgcccgcaggtgcggtgggtggcctgggcgggtcctgtgccgagggcagccaccctggaacaagggctggcagtgggtcgcagcaaggttagaagacactccgtcatagggtcgaggagggaccttggtcccagccaaggactcactctgccacgttgctctgcactgccctggggcagcggggtgcatcccacctctcgacaaggacacatcgcatcgggctctgtggctaggttcaactttggcaaaagggctcatttccttaaaatctgcctccacagacttggccaaaaacataacgttcctctctgtgcccttgatggcccctgggtgctgcccgggcttccttaccttctcccagatggaagcctgcccagccctgccccggcttctgggcgtctggcccccggcagctccacgctgcctccctccttgctccctcgcctgccctccttgtgcatctgcagcaggggctcccctgcttcttgtcgtatgtacctgggacctcaccccaaaggccatgcacggtctcccctgtagtccaacccctccctctcgggactgacccctgccgcttcccggcctcacccttggtctcccctttccagcattcgccagtacgagcttgtggtccacaccgacatagatgcggccaaggtgtacatgggggagatgggccggctgaagagctacgagaaccagaagccgtgagtggagggagcgtggcttggggcagacggctctatggccactggtgcaccccaggctcagtctgccgtgtatccccatatccccacagggcccttctcaccagaccccgtgccccgagtgggtgtgagtgtccacgacctgtccacggcccggccccaggagactggcactcgcccagtttgtactgagctcacttagccaccttactctgcactgcccagggcagcggggcacatcccacttctcgactaggacagtgcattggcctctgtggctaggatcctctttggcagaagggctcattttcttagaatctatctccatagatagacttgggggagaaacctggcgttcctctctgtgcccttgatggcccctggttgctgcccagattcctgcccgagccacccagggaagtcctcgtgccactgcatccaagaccagctgccctgctttctgtaggcctgccccagcctggctggagcgagaagccctgcatgtcggtggctttccggagtgcaagtttctctcttgtccacggtgtagtccaggacgtgtgggggtgggggagctgtgctcctcatttggggaccagccaccttccagcctgtggcaccgtcagcttgggcctcacagttcttttaggggccagcctcagtttccacatctgtaaacagacactgatgacccagctctgcccatgtggtgggactatagagagaactgcattagggctgggcgaggtggctcacagctctaatcccagcactctgggaggccgaggtgggtgaatcacctgaggtcaggagttcaagaccagcctggccaacatggtgaaaccccgtctctagtaaaaatataaaagttaaccaggcatggtggcgaatgcctgtaattccagctgctcaggaggctgaggcaggagaattgcttgaacctgggaggcagaggttgcagtgagccgagatcgcgccgctgcactccagcctgggtggcagagcgaaactctgtctcaaaaaaaaaaagagaactgcattggaccaggctgggagagcccttgatgtaaccggtgagatttcctcatggagatctctgagattccctgtgctttgtgcaaccagaagggtccttggagacagagactcagatcaaagccccggccgctcactgtgcttctctcctccccacccagcccctttgatgccaagaatccgttcctggctgcagtcaccaccaaccggaagctgaaccagggaaccgagcgccacctcatgcacctggaattggacatctcggactccaaaatcaggtaccagctgccactgtcaccccctgaaccctcactctgggcctcctgacctggggcagggccagccttccgcccctcccgagcctcacatctccctccaggtatgaatctggggaccacgtggctgtgtacccagccaacgactctgctctcgtcaaccagctgggcaaaatcctgggtgccgacctggacgtcgtcatgtccctgaacaacctggatggtgagtgccacagtcagggcgccctgccgggctcaggcagccgcgggattgggcctgtaggaaggccctgggttgagcttctgcttaggcctgaagccccggtgcctgggaggcccttgcaccgagactccacggttacaggatcccaagcaaacgggaggcggggtggccctaggggtctagccctctctgtcggggttccccctaccccgtcactgtcatagtcctttaagggagtgaggtgctgaggcctggtggcagaggcagccctggctcccccatggccactgtgtcctgctgggaaggagggcctggctccacgacccacctctgccggcctggggctgcccccacctcctcactgaagtcaggagtcagcagccctcccaggcccccaagggtgcacagtggtgccgagtggcagtagccattacgcggggctgcctgggcctggtggggctgcccagcctgagcctcccgctgtgaagccctcggaccccactggtcaccaacctgggccgagcccacctcgccccacccctgcttgccggtcctcagctgccatgccagggctgcccttactgtcggcttccacagcccgcctgtagggaagcctgggcggggctgtgtcagaccgtgtagtgtgcggtgaaagcacagcgggtgcgttagtgtgcaggggctcccccgcacctcccctagcagggtcctgcctctgatgaggacttcctgtctggttggaggccccagacttggccccagggccagggaggcatcagagagcataggccttgtttccagcaccagctggggcacctgttgctgcagagctggcccaaggtgtcaccccctcccgccgcagccacccatccccaggaggcggccgcctaccccaagtcctgcctgtgtcttccctgcagaggagtccaacaagaagcacccattcccgtgccctacgtcctaccgcacggccctcacctactacctggacatcaccaacccgccgcgtaccaacgtgctgtacgagctggcgcagtacgcctcggagccctcggagcaggagctgctgcgcaagatggcctcctcctccggcgagggcaaggtgcgccccctcagcccccgcaacctccgccccgtcaccccgccgttttccgagctccgtgggccccaatcagccccatctcacccccgtgtctcttaggagctgtacctgagctgggtggtggaggcccggaggcacatcctggccatcctgcaggactgcccgtccctgcggccccccatcgaccacctgtgtgagctgctgccgcgcctgcaggcccgctactactccatcgcctcatcctccaaggtgagggccggcactgccctgccagccacacgctggaggcccagccctgctcacagcaggcagagtgcaaggcggcacaggagctccgagatctgagccctgagctccagttccagccccagcgcagctccaaatgcctccccaggctgtggactcagtcgggctggcttgtgagattctcagcatctgtccagccccagtccccagaaccagtccgggaagccgctggggagggggcctctgaggtttgggtgccaggtgggctggaagaggccctgggtgagtggggctggcctgcagaacgggacttggggccggggctgggcaagggcctcggcttggcggtggagctcacacggccctccccacaggtccaccccaactctgtgcacatctgtgcggtggttgtggagtacgagaccaaggccggccgcatcaacaagggcgtggccaccaactggctgcgggccaaggagcctgccggggagaacggcggccgtgcgctggtgcccatgttcgtgcgcaagtcccagttccgcctgcccttcaaggccaccacgcctgtcatcatggtgggccccggcaccggggtggcacccttcataggcttcatccaggagcgggcctggctgcgacagcagggtgagtggggtcccatgggggagagggggtgacgactgggagccccgcgctcaccccggcccctgccacgcaggcaaggaggtgggggagacgctgctgtactacggctgccgccgctcagatgaggactacctgtaccgggaggagctggcgcagttccacagggacggtgcgctcacccagctcaacgtggccttctcccgggagcagtcccacaaggtgagacgggcgggcacccacgaaggtgggcatgaggctggcagggccacagccacagtgcccccctcacagcaccacccttggccccaggtctacgtccagcacctgctaaagcaagaccgagagcacctgtggaagttgatcgaaggcggtgcccacatctacgtctgtgggtgagtgagtggggtcactggaatagggggcagggaggacaaggccctgcctgccacagttggcccagcccccagcaccccctcttcctgcccagggatgcacggaacatggccagggatgtgcagaacaccttctacgacatcgtggctgagctcggggccatggagcacgcgcaggcggtggactacatcaagaaactgatgaccaagggccgctactccctggacgtgtggagctaggggcctgcctgccccacccaccccacagactccggcctgtaatcagctctcctggctccctcccgtagtctcctgggtgtgtttggcttggccttggcatgggcgcaggcccagtgacaaagactcctctgggcctggggtgcatcctcctcagcccccaggccaggtgaggtccaccggcccctggcagcacagcccagggcctgcatgggggcaccgggctccatgcctctggaggcctctggccctcggtggctgcacagaagggctctttctctctgctgagctgggcccagcccctccacgtgatttccagtgagtgtaaataattttaaataacctctggcccttggaataaagttctgttttctgtatttgcctggtattgtgtgagtagatctgggacctccacctgcatcaacttaactaactcagaccccaggaacccatgtggtggggccacccagccctcccctcccccaggagaacacacacgctcaggccacctctgggcctctctttattgagggcactgggcccaggtcttccttcagggcccacagcgcccataaaacccaagggagaatagaagagaccccctgatacacgcacactcgaggggcgcctcccatcccctcccacaacacacaggacagaagcccctctgggccggcaggggaaggcccagcctcaatccttcttgctcccgtgccgctgactgtgaaacttgtggtgcacaaccctcagggtggtgaagaaattgccgaggaaaaggagraggaagggaaagccgcacataagcacctgccggaggaatagggtgagggctggacatgggcctggccccccatccatcctgtccagggaccccggctcacctgccactccttgcactgagggtcctgggccaggttgaacaacgtcagcgcgttaaaaagctgccagaactaagcagggaggaggcattttactcagaagwmccagtccctgctggagcccgaaaccggcgcagaggacggacagacaggcagggacacagaggcacgacttacgtgtccaaagaaaagaaaaggcagcaggaaggtgaggccccgccacatccaggactggaagccctctgcggggaggaaggtcagggcacaggayggccagggacagaggggacgctaccactcagacccgggatgggaggaaaggggaatgtccagatgccagggccactcccgactcacccacagtgaggtccatggtgtgccgctcgcccagcgcccgcaggcggtagaggcagccgctctggtagtagtactggagaaactgcacgaagcctgggccgggcggaggacagaggagcagggctgagccccgggaggggttccctgcccctgccccccaccacgggtgcctccagggctcagcacaracatctgggacactcactctggtacatggaaaaggagaggaattggttccggaatttctggtacatgagaccgtcgggcctaaggtaaaaagtggagggcagtgtggggacccttggggatgccrtgtatcccctccttgtcccagctcctgcccctgccggggcccagccactcaccacgtcagcatgactcccgacaggaaggtggacacgtagtgatggaacacccaccagcctttgatcctggagcagagagccaccatcacccccagcgcctgttcctgcttcccggagggtcctggcaccccattccatgctcccctccctcagggcccgccctgcccaccgggagccgttgttgatgaggatgctctcccggatggtcagggtgcagtagtaccagaccagcaggaagttgaaggcagcatctgtcaccctgcggagggaggggaccgagggttggtactgcagcgactggggatggggtgggtcctcggccggggtgggacgcccacctggagttgagcaggaagcggcaagtgaaggagatgaggatgaggatgatggtgaggtagagcttgaacttctcatactcgtccttgtaggcaaacctggggggcgcaggccggtgagacgggtggggtgctggtggggcccatgtgtgcccccaccccgggagggcagctgagccaagggtagtcggatggaggagaaggccgggktggggggtggaggggaaggccaggtggggtggggggtggaggggaaaaccaggttggggggaaagccgggtggaggggtggaggggaaggccgggtggggggctggaggggaaggccaggtggggggctggaggggaagaaggccgggtggggggctggaggggaaggccgggtgggggggtggaggggaaggcggggagggggtgtggaggggaaggcggggagggggtgtggaggggaaggccgggtgggtgtgtggaggggaaggccgggtgggtgtgtggaggggaaggccgggtgggtgtgtggaggggaaggccgggtgggggggtggaggggaaggccgggtggggtggggggtggaggggaaggccgggtggggtggggggtggaggggaaggccgggttggggggtggaggggaaggccgggttccgggggaaggctgggtggaggggtggaggttgagggggggaggggggtagggggctaggggtggaggggtggaggttggggggtggaggctcggcctgattacttagcctgcttgctcaggagcgtgacgttgacgttccccagaaccaggctcaggtacaatctagggaagggggtggcggggtgaggagaagcccgagtgacagacaagccaccggtactcagccaagcctgccaggccagagcctgggccaccaccccaccccctcaccygctgctttccgcagggccttggcatcgggttctgaccttggaggctgcagacccactccctgccatgcccagccttcctggccgcctgctccggaatcctgacccccggaggaaacagtgttcccccccatctccagagtcttgyctgaaactcccccacctcagggcacaagagaacccggctctccctccctgctgagggccgtccccctgtccccgattgctcccctgtgcgatggccaccacctaccccccagctccctgccacctcccctccagaacctgcagtactaggttccacttcagagacccacacgcctggccacatctaggacgacctcccaaaccagaacagaaactcagagctctgactgtgggctgaccccaagtactcagcctcccggggcgtttcttcccaccacgaccccccttgtccctcaccgaggcccccacgctctccagtcccagatctcatcagagctggctgagtccccaggccacccgccaattacaccacttttttgccaatccccttcatgtccagcctccacacccaccaactgagatcatcttgcccttctctgccagagatactccaagaggtgacagcaaagtcacggtcactttctcagcacctgccccagacacatgggctcttgttcacactcaagccaaacagacagaggctcagcatggttaggcaatttgccccaaggccacaaagaacttctgggacagccatgcttctccctctacagaatgctcccggcacagtgctccccaagcaggccagcttcagcctccactgccaacccaccaggctgcggatgtgtccccactcagctcgccatctggttcccagcactcgcctctccacatcctctccccgaaaccctctaccctgtctcctcccacctcgggccccacctgcaacactgcagagaagacagcctgactcctgctctatggggagcactatgccaggagcactgtgccaggagcactcctcactctcatctctgcaccctccatcccccactagcccttctcgctctccccaggcttccctccatcacctcctgcccttctcctgggtctttcccctctcggcccctcttctcagcaggtggatgtgctcgagtcttcccagaggcaaagtaaccccacaaacaggcagtagctgcccctcaacccagtgctaatttccagttcctagttgctaattctctccctccactcacagccaagctctaaaaagtctcccagagggctgggtgcggtggctcacacctgtaatcccagcactttgggaggccgaggcgggtggatcatgaggtcagaagatcgagaccagcctgaccaacatggtgaaaccccatctctactaaaaatacaaaatacaaaaatacaaaaattagccgggtgtggtggcgggcacctgtaatcccagctactccggaggctgaggcaggagaatcgcttgaaccacggagacagaggttgcagtgagccgagatcaagtgactgcactccagcctagcgacagagtgagactctgtctcaaaaaaaaaaaaaaaaaaaaaaagtctcctagacttggctgtctcccttccttggctcttctgtcatccccaagatcgacatccatccccttccaccaaatggttctgccaagatgacccaacttccaggaagcgcatccccttccttatcacaggactgaccccaggctacggacactcctttcttctccctgccttctgggccacgccctctcccagctatctccctgcctgcagcctctgctgggattttttgctcagcagggggttttgcactgccccatccgtcctcctgggtgacagctgctggcctttccaggtgcacattccaccgcccccgcccgcctactgggctcaaggcaagagctgcagcccagcaaagcctctgatctcttggctgcctctcacctcccgccccgacctctagccactacaagttctcatggcccgtccacctgctgctacctctcgccctcagcccatgtgtctgcctcattttttttatttatttacttatttattttttaagacagagtctcactctgttgcccaggctacagtccggtggtgcgatctcagctcactgcagcctccgcctcccgggttcaagtgattctcctgtctcagcctcccaagtagctgggattacaggtgcatgccacaatgcccggctaatttttgtatttttagtagagatgggttttaccatgttgcccaggcgggtcttgaactcccgacctcaagcgatctgccttggcttcccaaaaaagtgctgggattacaggcatgagccaccgcgcccagcctatttgttctttttaaataaatagagacatagggtctcagtatgtcacccaggctggtcttgaactcctgagttcaagtgatcctcccacctccatctcccagagtgctgagattacaggtgaaagccaccacgcccggcccactctttattctgtaagactcagcccacccatcccctaatccaggaagccttctgcgacctcctggactgggtcaggtgtccctcactgtgccacctcattccccatgctacaaagcacctatcacagtgaaatgtcactctcagccaggtgtctcccctgaagtcagcactgtgcctcattgctcagcctgtactgggcccagggaacatttgctgactataatgaccaagaggaggcagcacccggcttcaggagtggctgtgaactgagctgggggtggcggtgggggccctcacccattcttcttaggcaaataggcctccatgtcaaagaagaggccttggcgctctttcatctggttctccagctcctgtgcggccccctcggcctctgctgggagggagggtttgcatctgcgggtaaggccagaaacagtcagggcaagaggactcccaagtgtcctccctgactcccacaggggcagaagggcaaacasggcccagagaggggaggggcggtgcccagggtctcacagcgccagccctcccaccccacactctgcccatggcgggtggggtaggggatcctaacttcttcagggcgagggccagctcctggagccgcttcttctgccgcgtgatggagctggtgcaattgttctraagtttggtcagctcctccagcttcaggcggtagagccgatgggtctcctgggggccggaggggagaggctcaggccagttggggagctactgagccagagcctgcaggcaggacgtggcgctcaggctcccccagggctgctgggagggtctcgctcagcgggaaaggaggtagaactgtgcctgcccagggatgaggtggctgtctccccaaggcaggcaaggacctgggtgtcctcctgtgagcccagagacccccacagcacccctcctccaaaaacagactaggtgtttttgtttttgtttttgttttgagacagtctcgttctgttgcccaggctgaagtgcaatggcaggatctcagctcactccaacctccgcctcccgggttcaaaccattcttctgcctcagcctcccaagtagctaggattacaggcacctgccatcatgcccggctaatttttgtatttttgtagagacagggtttcaccatgttggccaggctggtcttgaactcctgacctcaggtgatccgcctgcctcggcctcccaaagtgctgggattacaggcataagccaccgcacccagccaaggttttcttagtctcagcccatctgctagttgtccccaccctacaaggacagactctttctcctaccttgagtctggagcttaggcccccagggccacctcctggaccaagcaggcagcccagagccacccctctatcctctcagctcctcctgcctatctagccttccagtacaggaggagctcaggttctcaggaatccctgacatcttcttcccaggttaaaggtcatcaggtttcaaccctagagcctcctgctctaaggccagccccactcccttcccctagcacctttggcccaaggattccccaagcactttgccctggtaggtgagtctcaagaaggcgcagcctagagatggggcaaggggcagtgtgaggagagccaagmaggggctgtggccaggacagcggcggccaggcggggagactgggtctgctcagtctctggggagaagcaccaatggcaggggccttggcagggccaggggcagctgggtttcaatgcccacaggaagcagttggaaccagtccaggagaggccaagggctaaccaagccatcagctggccagggctctactctgtctggatcttgtttctcatgcccaggaggggtcaccacgccccctcggaccccagcacgtgccacttctgcccacccacagccaccgccctcttccctgcctggatgaggccaacagcctcctcctccctggcctctggacagaacagccacggtggccctggggagctcagtccagacaattcctcccgtagctttccactggcctcggagggactctgatctctgccaggccagagcgtccctgcagggcctagccccgcccacccctcccacccgtcccacccctcccctggttctccttgatgcagccacatgggcctgtcaagtcccctctttccttccaaaggcctcggcggcgcgcggtatccctctgcctggggcgtcccccatccaggccgaggacacccccctaaacgctgctcccccgacctgggctgcctctcgggcgctgcccgctgcgcgtttgctgagtggctgacccaaggctgggcccgcccgtgtgtgactcaggcggccgctctcttctgggaagggacggggtcggggtctgggcccctttccaaggccctcattggaagccgaggtcgcccagcgcgatggggtcccgccggggttcccggacactggaggtggtggcagtggacaccaggaccaggggcctcgccccccttggcagtgacgccagggccccgacccctgacccttagctccccactgcctgacccagggctgcccgacccttgaccctgagccagcgagacgcggctcgggggcgacccggcgtccgcagcggcgctaacctggatgttctggaagtcctgctgtagatcctcccagtcccgcaggcagtcgcccagcgggcccgggggcgggggctgcatggctgcagcgccagtagccagtagtggaggacggcgcagcaaccccggcccacccgaggctcctccgccaccgcccccgtccgcttccgggctcgcgccgccacgggcaccaatggggaaaggccacgccccccgccccagccaatccgggacaggggcggggtatgggcggggccgtatgcaagggcggttgctagccccgggactcgcggcctggaccgggactgggacggctgcagcccccgggcctggactgcactgactgtgccagccgcgtggtgcagccagcagggctctggcccgtcatgctgagagcaaaccaaggtccagggaggtgacacctgcttgcaacattttcgtccttgggaagctgagcctctttggggaagggagttagagctgcttctctcgcttggatttttacagcggcctcctttctccctgcctcacctccactgtcccttctcgcggccaccggactgcccttcccaaaacacaaggctgattccccatcatgttcatgcttaaaactttccagcggctgtgtcctgcctaccaggaggtccctaatcggagctctgcagccatcccgggctctgtcccaactcacaccctgaggaaagccagggctgtgtgtaaagccgttccccctctggcaaaaccccactcctccttgaaggcctgcccttctgttgaggggaatcccccaccccctcccacccccatccctccacagagcgcgctaagtggtgggacggcattcatctctctgttcccagccccacccacgcggtggcagggaatggttgccgaatggacttggggaaggtcctgcatggatggacatcctaatcccctaccagtcccctagtctgtgccgtctcctgatgcccagtttgttctgtgggtgctgccagctttggagaagtgcatttggaaaacaacttccaactgggtgccgtggcccacacctgtaatcccagcattttggggaggccgaggctggaggatcacttgagcccagaagttcgagaccagcctaggcaacagagcaagaccctgtttctacaaaaataaaaataaattagccaggtgtgatggtgcatgcctgcattcccagctactcactcaggaggttgaggtgggaggatcgcttgagcccagggaagttgaggctgcagtgagccatgattgcgccactgcactccagcctgagagacacagcaagaccgtgcctccaaaaaaaaggaaagggggtaaaaaaaaggaaaacttttaagaccttaggaatttctagaaacgtggatagggagatgggggagggggtgagaatctctccttggtgaacacagccaggcagaaatgagtggggagcagggaaagaaaatctgtttcaaggggtggatggcaggaagcgctggggatgaggcaagggtgtgatcccattctaggagcctgggggctagacaaggctgggcttggtatctctgggactaggggactgcctattggtggctattgtgacatcctctgtgaaccaacacaggcaacctctgggtacccccaggcagcctccaaagggtctaagtcaccagggggatgcagggcagctgctctagcagccagatgctcttccagaggcagcctcaggggtgcagttgggatggcccgcgacacctcagggatgcgggttcttggtgaacctgagcagggcgcatcagctaggtggcgtgaacaggcacttgggaagaatcagtacaggaggctaacatgagactttcaggcagcaaaggccttctccttccagacaagcctgggtatacacactctggccctccacccacaaaatgcccccaggtgaggctcttcagtacccttcggtgggcctcggagaagatcagtagagcggatccatgatgtttgtgatggaatctccaaggatagtcttctcccattccagcagctggctcaccaatccccgatttggacacatgttgtttttgcacttcttgacataggcccaggacctctatgaatacaaagagagaaagtgaacttcacgattggtcctgggccctttccacttggatcagaggcagctttcagagacaggaggcacttgcacagtgccagcaacacggcttaagggctggatgcagaaacagggcagcctggcatgaatgcatcagtgctgggagtcatgggagctgactctgccttgggcaagcccctctgcttctaaatctggtgacagaaataattcctatttcaaacagcttctgggaagattaagacaatatacatgaaaccacctgtggatggcaaacactatgccaagcctagtgcagtctcaacaaaggtttgcattgtgactggacaaattaatggaaagaggaagagaactgtgggcaaattctctgaagaagaaaattcaagctgccctccttcaggcatccaccttaaagtacaggaagtgttgctgcatgaaggagggtgagcacctggtctccatctggattgaggacaaacgaaaaagggaaaggcaagagtggtgcctaaaactaggaacagaaggaaatggccaggcacagtggctcatgcctgtaatcctggcactttggggggccgagacgggtggatcacctgaggtcaggagttcgagactagcctggccaatgtggcgaaaccctgtctctactaaaaaaatgcaaaaattagccaagtatggtggcacatgcctgtaatcccagctacttgggtggctgaggcaggaaaattgcttgaacctgggaggcggaggttgcagtgagccgagattgcaccactgcactccagcctgggtgacagagcaagactctgtctcaaaaacaaaaaaggaaggaagtgatgtcaacctgataaaggccatatatgagaagcccacagctaacatcacactcaatggcgaaagataaagtttttcctctaagatcgggaacaaggcaagggtgcttgctttcatcacttctgttcaacatagtcctagaagtcctagccagaacaatgaggcaagaaaaagaaataaaaggcatctacaatggataggaagaagtaaccttacctctggtttgaagatgacatgatttcatatgtagaaaaccctaaagattacacacacacacaacacacacacacagctaataaattcagcaaggatgcaggatacaaaaccaacatgcaaaaattagttgcatgtctatatactaaacaattcaaaaaggaaattaagaaaacaattccatttacagtagcatcaaaaagaataaaatatttaaccaaggaggcaaaagacttgtacactgaaaactccaaaacagtgctgaaagaaattaaaggtacaaacaaatgaaaagacatcctgtgttcatgggttggaaagcttaatattattaagatgccaatacaactcaaagtaatccacaggtttaaggcaatccctatcaaaatcccaacaacattttttgtagaaatagaaaaatccatcctaaaattcatatggaatctcaaaggaccccataaaaaatatttaaaaagaacaaagttgtaggtctcacacttcctgatttcaaaccttagtctaacaaaactacagtaatcaaaacagtatggtatggacatgaagacaaagagactagtggaatagaatagccagcctagcctagaaataaacccttacctatatggtcaagcaatttttttttttttttgagactgagtctcactctgttgcccaggctggagtgcaattgtgcaatctcagcttactgcaacctccgcctcctgggttcaagtgatccttgtgcctcagcctcccaagtaactgggattacaggcatgtgccaccacgcctggctcatttttgtatttttagcagagacgaggttttgccatgtcagccaggctggtctcaaactcctgacctcaggtgatctgcccacctctgcctcccaacctgctgggattacaggtgtgagccactgcaccgggcctgtcaaggaatttttgatagtatgccaagaccattcgatgggggaaaaggacagtcatttcaacaaatggtgctaggaaaactagatacgccatgcaaagaatgaaattgaaaacaggaaatcaatagagaaaatcaaaaaaaccaaaagccggttctttgaaaagatcaataaaatcgatacactgctagccaggctaacttaaagagaagacacaaattactaatacagaagtgaaagagaagacattgctacagatcccacagacattaaaaggataatagaagaatattcatatccacaaatgtgattgatcaattccttgaaagacacagactgccaaaactcacacaagaagaaacagacaatctgaataggcctacatatattaaagaaattgagtggtggcagatgcctgtagtcccagttactcgggaggctgaggcagaagaatggcatgagcccgggaggcagagcttgcagtgagtcgagattgtgctactgtactccagcctgggtgacagagcgagactccgtctcaaaaataaataaataaataaataaaataacaataataaattgaatcaataattagtaaccttccaaaacagaaagcacccagcctagatgggtttattggtgaattccacacatataatggaatattattcagccttaaaaggaaggaacttatataaggtacctagagtagtcaaattcacagagacaaaaagtagaatggtggttcccacggggcgatgaagaggggaaagtaaagagttgctgtttcaggtttgcaagatggaaaagtttgggagattagttgtacaataatgtgaatgtacttaatgctcctaagctatacattttaaaatagttaagatggtaatttttttgttgtgtgtgtgtgtgtgtgtatgtgtgtgtgtgtgtgtgtgtgtgtgtgtgtgtgtgtgtgtatatttttttttgagacagagtttcgctcttgtcacccaggctggagtacaatggtgcaatctcagctcactgctgcctctgcctcccagcttctagcgattctcctgcctcagcctccagagtagctgggattacaggcacgcaccaccacgcccagctaatttttgtatttttagtagagggggtttcactatgttggccaggctggtcttgaactcctgacctcaggtgatctgcccgcctcggcctcccacaatgctgggattacaggcgtgagccaccgcgcccggcctgttatgtatattttaaccacaattttttttaaagtggtgtgaggggcagagctgtgcagtcaaaaggcttactatgtcctcgctgggtcagaacaggccctggaggaagaatcgtaaaccacccatcccccaccaccaccccacacatcgcctggccaagatggtgaaaccctgtctctactaaaaatacaaaaattagccgggcatggtgacacggacctgtaatcccagctacgcgggaggcagagacaggagaatcgcttgaacccaggaggcagagggtgcagtggaggttcaagaatcgcttgaacccaggaggtggagattgcaccactgcactccagcctgggcaacagaacaagactccatctcaaaaaaaaaaaaaaaaaaaaaaaaaggactttctagcctacaacttcacccccaaagtgcacatgggggcaacaaccgaagccactggccaacgagttttattctttgtccctctccttcccccaaaaacatccctgggcaaatgttggggctttgtaggtcctatcaagccctctggggatcacgaacaggctgtgacaggcagggcaggccctcgagaaaggtgctgtgagttaggagccccgagttccgcctgggtttgctgcgatgggtccctgcttccctctcttctctggaccctgcgcccaaggtacagggagatagacgggagtgggtgggcgcctgtgctgcagctctgggactccaagcagttctcccttgggcaacaccaaacaaacacaggtggacggcctgacagcagtgggggctgcaggacagcct

SEQ ID NO: 98214 - DNA, 27412 bp, Homo sapiens
cgcacccctctgctgctttacctaaaactgctcctttgaatggtcacttgaagccccatctcctataagcatatctgcccatattatttatttagcattagcaacatgctatcttctactgttctaaaattcatttttaaaacagataccctacctccccaattaaaaatgtaattttttttgatgtcaagaaccctgttgtaaacctacagatccccaaaacttacctgtgtactttgcgtaaggcaatgataccctaaaacatcctatcaaagttattggtaatgtgttctgcctacattaatagctagtgttgtccaggcacagtggctcatgcctgcaatcccagcactttgggaggccaaggcgggaggatcacttgagtccaggattttgaagcttcagtaagccatgatctgtatcactgcactccagcctgggtgacagaacaagatcctgtctctaaaaaactaacttaattaattaattttaaaaatagctaatgtttactgattatttataatgagtcagctgctctaagtacttaagaacatttattatgagtcagctgttccaagttctcaggttaagaggtgtgtcattccaaagagaaaggcaagagggtgagagaaggtgagagtgagaaatgaggggagagaaagagagagcaagagaaggccaaagttgtcctttaatgaggaactcattctctcaaaaacagcattaataatttacgaggccagttcccctatttagaggtgacagcatgctggcagccctcgcttgctctcggtgcctcgcctcctcggcctcggcgcccattctggccacgcttgaggagcccttcagcccaccgctgcaccgtgggagcccttctctaggctggccaaggctggagccagctccctcggcttgcggggaggtgtggagggagaggcatgggcgggaaccagggctgcgtggcgcttgtgggccagctagagttcccggtgggcgtgggcttggcaggccctgcactcggagcggccggcaggccctgcggccccgggcagtgaggggcttagcacccaggccagcagctgtggagggtgcgccgggtcccccagcagtgctggcccaccggcgccgcgctcgatttctagccaggccttagctgcctctccgcggggcaggccccgggacctgcagcccaccatgcctgagtctccccgccaccgccagtgggctcctgcacggcctgagcctccccgacgagcgccaccccctgctccactgcacccagtcccatcaaccgcccaagggctgaggagtgcaggcacgaggcgcgagactggcgggcagctccacctgcggcactggtgcaagatccactgggtgaggccagctgggctcctgagtctagtggggacttggagaacctttgtgtctagctaagggattgtgagtgcaccaatcagcactcagtgtctagctcaaggtttgtgaacacaccaatcagcaccctgtgtctagctcagggtttgtggatgcaccaatcggtactctgtatctagctaatctggtggggacttgaagaatctttatgtctagctaagggattgtaaatacaccaatcagcactctgtatcaagctcagggtttgtggatgcaccaatcggtactctgtatctagctaatctggtggggacttgaagaatctttatgtctagctaagggattgtaaatacaccaatcagcactctgtatcaagctcaaggtttgtaaatgcaccaatccgcactctgtgtctagttcagggtttgtaaatacaccaatcagcactctgtatctagctaatctagtggggaggtggagaacttttgtgtctagctcagggattgtaaatgcaccaatcagcaccctgtcaaaacagaccaatccaatcagctgtctgtaaaacagaccaatcaggctgccgagccagcagtggcaatccaatcgggtccccttccacactgtggaagctttgttctttagctctttgcaataaatcttgccgctgctcaatctttgagtccacactgcctttatgagctgtaacactcaccgcgaaggtctgcagcttcactcctgaagccagcgaggccacaagcccaccgggaggagcgaacaactccagatgtgccgccttaagagctgtaacactcaccgtgaaggtctgcagcttcactcctgagccggtgacaccacaaacccaccagaaggaagaaactccgaacacatccgaacatcagaaggaacaaactccagacacaccgcctttaagaactgtagcactcaccgcgagggtccgtggcttcattcttgaagtcagtgagaccaagaacccaccaattctggacacactatgacccaaacacttcccattaggccccaccactcaaaacctccgcactggggatcaagcttccaacacatgaattttgggggacacattcaaaccatttgtgttctctctacctggatgccaaatatatgtccagaaaaaatacttctggttttgttgaagagcaaaaagttaaacaacaagaattatatgtattttggcagctgctgtctggcagatgtccagagaattaactgaacaagaattcacgtcaaggatatttgtcaagaatcacctcttggctgggtgcaatggctcatgcctgtaatcccagcattttggagggtgaggtgggaggatcgcttgaggccaggagttccagaccagcctggccaacacagtgagacctcatctctacaaaacactttaaaaattagccaggtgcagtgacacatgcctgtggtcctagctcccggggagctgaggtcagagaatcacttgagccaggagttcaaggttacggtgagctatgatcacgccactacactccagcctgggcaagagagtgaaaacttgtctaaaaaaaaaaaaaatcatctcttaaaagacatcaagcggcctggtgtggtggctcacgcctgtaatcccagcattttgggaggccatggcgggtggatcatgaagttaggagtttgagaccatttccatcttgctgaccaagatggtgaaaccccatctgtactaaaactacaaaaattagccaggcaaggtggcaggcgcctgtaatcccagttactcgggaggctgaggcaggagaatcgctcgaatccgggtggcataggttacagtgaactgagatcgcaccacagcactccaacctgggcgacagagtaagactccgtctcaaaaaaaaaaaaaaaaagatatcaagctacattaaaatgctttggaaccacaggttaactacaaggtccaattctccactaattgggttgcttagaccaaatgggcaggacagttctaatccatctgcaggactaggagagaccttctgagaaggcaggggtaggctgaaggtcagcattgcaatctgattgttatgtgacttgggaacactggttattgcctccgagttcctcatttgcaagatgaagccactaatatacctacttcagaggtttacaggaagagtaaatagggtagtgggtgtaaaatgctgtccctggtctacaataagtgagtaaatgctagctttccatttgcctctggatagaaaccaaaattagccctaccttgcatttctccccactccatgccacttgtgtccacagccatctacctacactgtggcatgaggaaactccaaagctcttgaccttcaatggctcctcacaatccaaaaggatcaacccccaattccctaaagtggcctcagtccccttttgttgcagttttctgaccactcctttcccctcctaaactctaacccagcttccaaagagcctatcacttccccaatggtcctagtcatttctatcttctgaatctgcacgcagactgtagccccttaggatttgttccacacctacatgacatggggttagttgcacatagttctaacctttcctctaaaagataaacttcttggaggtagagtattttattcattattacatctggcatagcacacaatgcttcgtgcatggcagtaagagctgatatttaccgagagctgactacattccgagcactattctaagtgccttacatgaacatatgagctcatttaattttcacaacaattttggaatacgcacaattattctctccatttacagaccaggaaactgagacccaaagcataacctgtccaaggttataccactaggaagtgagagggcctgggttcagatccaagcagcctagctacagaacctacgttcttaaccactatgctacagtcgatgttcaatcaatttagctaatttatgtaaaagagcttcaaaaactataaaggactataagccacaataaaccaaaagttcaaacaaaataggtttttgatatctctaaggacggggagacagtagtatatgaaggttaagtttagaatcagaccagagttcgaataccaccagctctatccctttctatctgtgggcaagctattattctttttcagcatctgcaagattaaactacttgttaagatggttgtgagaattgagatgactcaggtagaacgagaacgtgcctaccacagagtatgcggtcaataaattttggctctaaaacagagtcaaattgtaaaaccaaagaaattttctttgctaagttattaaccaacaattataaacagtattaaacaataatcacttactgttttttattgcacttcaggcctgtaaaacagtcaaataacattaattatctctaataagaaaaagggtcagagttctgcctctgggcataagactgaagcagcagttggaaagcctaactcattaaagcaaatgcaaaggaaacattaaaagcacacgtaagcagtgggaaaattcccagtgaagtgtactgacaaatacaagtgtatccaaatgtgtatgttctgaaaagcatgctatataataggtccaaggggtgaagagcataggatgttaacacaggggctgttaacagtttgtgtgggtgcacagataagaattaagcacaacaagaggctggtttcagcttaagttcatggaagagggaccggcaccggctccggctcccctgggcggcggtgagtctatccacggaagatacccaggctccagacatgagataaggggcagagggaactctgtccctggccgggaagcccgaacaactccgaagtcccttactacctttgagcggggccgcggaaggaaggacagggagacacctgctcagaatgagactgggcctatattttaactatcttttttgggggagggggtgtgaaatgtaatcactcgggaaaggtgcgttagggcatcagggaggtgacatctgtgcaaaatgcatccagagatccagagatccagactcggtggctctcaggacgcaacggcctgcaaaggacatcttgcggacgcgaccctccgactccactcaaggtacttgctccgccaaagcagcttctagacagccccgacccccttgccaccagctgcctccaccagaggcctgaagggggtcggggtcatagactgcccgcgggtaaagagtctggggacccaggacgtggagcggggctcaggccggcgccccgaggcccgttagaaggctctgccagctgcgattccaggggccaaggtcgccctgggcccccaggacgccagcctcgaacgcactcaccagcctgctgccgcgcagcaaccgcactgccaggccctccatcctcgccgcaggcctctccgctctgcgcctctgggtctctagccagcccctgggagttacccgagcaaggccccgcccactcagtacccgccccgcacacacccccccttaatccctgccccctgctgcctacggaaccccaagagagacaaacaggcccctcctcgctttcgccctccatcctgctcacgcgagacttgagcaaggcaggggggcgggaagggagtcggagacacaacaaagatggcggcggygactgtgacggtgacgaagacggcggcggcggcgacggcatttaacaaggcggtgtggtttactccatgcagttgtcaggaggtaagtagcaggctgccggctcggacggcggcgacgcggcaggacagggcggataagaaggagcggccggagactggagctgggttcgtggcgggccggctgatccggacggagactcagttcagtggagggtcgggcgtggtcggtaggcgggcaggtgatggcccgggacctcyttagccggagggcagtggactgcggcgcctatggccgcgagaaccccgagggagcggggtctcctgctgtcattgccttcgagcaggagctcggaggctccggggcggggactgttgcttggctctgacaggtggttctgcgggaggcgtcccgaggtttgcgtcttcacggggtcccaggggctgggagtcagccgggcgmgggtctcctaggtgtttcgaatcctggcgaggatgtcgctccgaatcttggtgaggctgctgccccgacgccggtcccaggctgatygttgggagaaggacgtttaaagccttcgtattttatctaatgatcctgcccggatccgtctctactgcatgggcacccttattttaggaacatgtgagatttgagaaagacattgtagcaaataactattcaggttcattcggggtttagatctttggataaactgtgtggagcgcgagtagccaagcctagcatgctcgatgactggatctgaagctaaacaagttctagcaaacactaaccacgtggcctgcttagagtccccttgatgtgctggtcagaacccgaaagacgtgtgacaagcggaagaagacataaaggcgtcttaaattgtgtgatctgaggaaattcagttttgaaagaacagaatgtatttaaaacaacttttttttaaacgtaggaactaacaattttaaaaattcaatttaattttgatttatgtcgtgttgtcacaacagctaaaggttattattattgatgagagttcgttacagtgaattgaaatgtctggtgttattttcccctagcggtccaggatgtttcccagaaaaccgtagctgttttgtgttatgataggataagaaggatgggattcagatgtgcccttatcgggtgtgcatgttttttttgtttttgtatttaaagccctttcccatttccctacttaggactatgcgttgtttttatgcaactacagctgttcagcagtactaagcttgaccgttttggaagtgtgctgtgactaaatgaagttaatcttaatttctttaaactgaagtttaacttaaatttagacattaaaaatcttgccaaaaactaatccaccagtgagaaaacggtagtcacaccagttattctttggtgatcctatggagcttttgctgaagtgaagctactgctttgttctttgattaatctgtcagttcgttttcttttcagctaatgyaatgataagattggcataagttastagctcattcaacctgtagatgctaattaagtttttatcttaaaggttttgatttgtggtgtgctgtttgttttttatgcagacctctgtatggcttttcaattttagttgaaattctctctccatggccttttggagtcccttgctgtatctccgaagtaaatttcaattactctacatttcatcaatgttggagtggcaagaaaaaggaggaacagatttggggtgaaaaggttagwttgtataatttctcttctggatttctttcaacatggttttacttatgttttatttttatgttttgatttctgatttctcagagcctcataatttctttttttgccttcaagagtttttgacagttctgaaatcaggaattgtgttccaattattttggaaggcccatgttactccatagaaaccaatccttatttgtcaacgttgtctgtttatatgtgttctatagcagagtaaatctcagtgaccataattattaggctatggagggtaaacacatctattgaactgtaatcactttatgtgtataggcctgccttacccataaattattatgtaagtaaattagttgctaatattgtattcttccttatggttacctatgagaagtaagacttctcatgaatgctaggtgaacgaaacatatcctgctgttccctaatcatgttctcaaaattctcccacagtttataaaaaagatagaaggaagaaggaagataggttagagagcttcttctctggttgtttcatagttgtgaatgccttctaatttgcatttcagtgcctgtgttttaaattattagctactggttaagaggctggggggggtgcacatatatacacacatgtaattgtgtgtgtgtgcttgtatatatgcttgcattgatcaacagcttcccrtttatgagactgaagaagaaagatcagacgacttcatacaaaatamatcctttatcagaaaccaaggaagatcggaaattagcctaaattacctacttgaggtagaggttttcctgttctttgggatatcaaagcttaattctcttatacctcttttccccctaccggcttgcatagcctctggttgttttctgaaagcattgattttgagccttgaataataaattgggggacgctactggcatgacaatactttaggtataccctagccagtttctatatagatatccacctacaccccatggaattccatactatattcaacttaactttaatcagaataatcacaggaaggatttgggaattttgctatatcataaggaacaatcatcataaagtatggggatattgttctctttggttgatatgattagatatcttagttcaggttgctgtaacgaattaccatagactgagtggtttaaacaaacatttatttctcacagttctggaggctgggaaatcttaatatgaaggtgccakcagatcaggtatctggggagggcttgctttctgattgtatcctctcatggcaaagagcagagaggaagcaagatctctggatctcttcacaaggcactaatcccatttagaggacttcacctttacaacccaattatttctcaaaggccccactccagatgccatcarattgggggttagaatttcaacatatcagcttttggggacataaacattcagtccatgacgataccagcagaaagagtacatctgagttgtaataacaccacccacatctgtaataatactggagaatacttaagtatatttcttgttcagatgacatgatatcatacattgaaattttgtgttaagtaagtaattttttggctaacaaacaccaaggtattgagttcatgtccagtataggaaagataccactaaaaaaattatagcttgtggattttctaaagtatattttgttatgtttgcaaaggttttaaaatttatcaatgccttagaggcatctctgggtatcagttaatttgtggagttcctagattaaactttgagacttgagactgatgataattacatcaaagacaggaaaatggctcagatagaaaacctttattttctttctataagaggaagtcttttgtagttccagaawttttttttttcttttaaaaattagagatgaggtctcgctctgttgcctggactggtcttgaactcctgagctcaggcagtcctcccaccttagcctctgaaagtgctgggattgtagtcataagccaccatgtccagcccagtttcagaattattactatttttcaatttattatgcttagaaatattgacttgagatgtagaaagctgagttttgagccgaagactctacttcactttaggcacctttcattcatatatgtctctactatagactagggctttgcaagcacctgtcataccctgtgtatatggatatatgggatagaggccatacaggtcaagtgggcacaaaaatgcttagggacgaaatgacacctaatttttaaatcatgacaggatgtttaaggttataaagcatactaatatatttaaaattctaatttaagaagagtttttcttcatgtttgcaatgttacagtgttctctatttcatagacatgcttttttttttttttaagtttatcatgcattgtggttgaaaagcagcacacaatttatggcaaggaacacagtgaagtttataatgtgacaatgtgataatagccaagactgtcaaaatatgccagccatyctctgtaattaggctcatttgtgttcttaaacttgagatgcatgtataaaaatatcattttcttctgcttgctttctggcagtcttgtgtgtttttactgcactgtcacgttgtactgtagcaacgttatgctttctaatcaagatttggtaaggattatcttgcttccagaagcctgtcaaagtatattcagacattttccaggagaaatgtatagttttcatgtgaactgattggcaagaagtgatgctaagttacaatgtaaatactgggatttctttcttaattatagcttttataattagaaygcagacaatctrtagggctatacagcttttacaaattaaaaaaatattttcccagatcttattcttgatagtctttttcactggagctgactagcttacattttcccaccaagagcaaatttaaaggacagataatcagcacaatcaactgtagtcacaaaacaaatagtaacacaatgataaagaaacagagaactagttcaaataaacatgataagatggggaaaaaaacaacggaaacaaatgtgttcaaaagccaacaataatccttaagattcagaaagctgagccagactaaagcaagtgatttaaagaggtggcctataagtaaaataagcaaagatctgtttgagaaattgcaaagtgatttgaaaaattgcaaattggaattacttgagactaaggtggaacatgtttgtttcgttgtaactaagaaacagatgctcagtatatttttcaaccacgttgatgaacccatagaaaaaggggaataacggaatcaggggtggtgagaattttaaaatcyaagttataaccattttttctatttgctacaaaaataattattagaaaaatagccrccattttctgatagcctaccatatgtgatacatgtcacaatatgctttatgtatacttacctataaaacttaagatagcactgcaagttggattatgattmcattttacaaaataggaaactaaggctgagagaggtccctgttcatagtcttaaagttgtccctccatatctggtaggtactggttccaggacccctgtagatagcaaaatttgcgggtgctccagtcctttatataaaatggcttagtatttgcatataactcacaatctcatcctcttgcatactttaagctctagattatttataatacctaatacaatgtaaatgctatgtaaatagttacactgtattgtttagggaattatgacccccccccccacaaaagtctggtgaaaccccctctctacyaaaaatacaaaaaatatcagccgggtgtggtagcgggcacctgtaatcccagctactctggaggctaaggcaggagaattgcttgaacctgggaggcagaggttgcagtgagccgagatcacgccattgcactccagcctgggcaacaagaacgaaactccgtctcaaaaaaaaaaaaagaaaagaaaaagtctgtacgtgtttaatatagatgcaaccatccattttttccaaataatcttgttttgcagttggttgaatcaacagataacagaacctgtggatatagagttgactatactctacttgtccagaggataaactttcagtagtctcaacttcctagacaattttctaaaaaataggcttttctacctgaaaaggggtagtaatactaataatgttttggttttttttttttttttttagacggagtcttgctctgtcttccaggctggagtgcagtggcacaatctcagcttactgcagcctccacctcctgggttcaatcaattcttctgccaccacgcctggctaatttttttgtatttttagtagagacggggtttcacccatgctggccaggctggtctcgaactcctgacctcgtgacctgcctgcctcggcctcccaaagtgctggaattacagatatgagccaccgtgcctggcactaataattttttttttttttttggagacagaattttgctctgtcgccaggctggagtgcagtggtgcgatctgggctcactgcaacctctgcctcccgggttcaagcgattctcctgcctcagcctaccgaaaagcagggattacaggcgcctgctgccatgcccggctaatttttttggtatttttagtagagatggggtttcaccatgttggccagcatggtctccatctcttgacctcgtgatccacccacctcggcctcccaaagtgctgggattacaagcgtgagccacygcgcccggccactaataatttttaaaagcccctagaactaccgtagcttctaaaaagggaggaaaggaacgattcacaagtattgaattaagaaaagagaattcagttacctgtaagtccttatttggctaaatatgtttggaacaaagaagagactagatgtgaagagagaagacaagaagtacgaaaataagatagatcagtctgaagccaggaaacagggaaaacaaaaacagccctgttactgagtggttgtaaagtacaataattcatattaatggtatgtcaaatgttggtctatttccagtagatttcgagttaagtcaaagaagaagttttgattcttaaaaagttggtcatatttttgtaaattggaaaatctgcttttgcagaaccccctcattcctcaaccctacagttctactatttaaaaacttaggctgaaaaggcccaagaacagcctattcttgaagaagaaaaacaaagcagggggacttaaattactgtgatagcaagacttattattaagagtatctggtatggcagcaaggacagataggctagtggaacagaacagagaatccagaagcagagccacatacgtgcatataaccatttgatttaaaaagaagacatcagagcttagtagagaaaggccgatctgttaggtacacattgctgggacagttggatatctctttggaaaaaagtatgctttgactcttatctcacaccatacacaaaactcaagtccagataaaaatatgaaaggtaaaataaaaagcatttagaagaaagtataggagaacatcttcaagtaagatgtaggcaaggatttcttaactaggacacaaacaactctaaatgtaaaggataaaaatgggtaaattgtactatattaagaacttctgttcatcaaaaattaccattaagaaagtgaaggccgggcgcagtggctcacgtctgtaatcccagccctttgggaggccgaggtgggcagatcacaaggtcgggagatcgagaccatcctggctaacacggtgaaaccacatctctactaaaaatacaaaaaaattaactgggcgtggtggcggacacctgtagtcccagctactcgggaggctgaggcaggtggcgtgaacctgggaggtggagcttgcagtgagccgagatcacggcactgcaccccagcctgggcgacagagtgagattctgtttcaaaaaaaaaaaaagaaaagaaaagaagagaaaacgaaaaggcaaccacagtgggagaagatacttaagatgcacatatcctaataaaggactcattataaagcattcttccatattagaaaaagacaacacaatagaaaaataagcaaaaggtatgagcagacattatacaacagagggtatctaagtggttaattagtatatattaaaaagtttacatcttcattagtcaccaaggaatgtaaattaaaagtaatgtgataccactagacacccaccagaacggctaaaacgaaaaaggcaaaacatgcccaagtattgtcaaggatgtggagcagcagcagttttgtttactgctagtgggagtgtaaattgctataatcactttgaaaacctatttgacattatctaaaactgaatatatgcatgcctttgatccagcagtttcacttctatacaaccaacagaaatatgtacgtaatcaaaaaacgtgtagtaatatgttcatagaaactttattcacagcagccaattactggaaattacccaaatgatctaaaaacagtataagagataaatgagttgtggcatggtcatacaacagactccagcagtaaatttgagcaaacttcagttgcatgcaacaatatggatgaatcttacaattacaatgttgagtgacagaagccagacaaaggttcatagtgtgtgattccatttacataaagctgaagaacagacaaaactaatctacagagtcagaagtcaggatggctgtaacccttgtcagggcagagggtcctagcattggaagggtacacgaggggggtttctgggatgccggcatccttctgtttcttgattgtggtgctgattttatgaatgtgttcattttgtgacaattcattgagctctgctcttatgatttatgtgcttttctatatatgtacaagacttcaacaaaaagttaagcatatatgctgaaagtgagtaattttttgtctaccactggctactaaagatggaagcttgtttagatggaaaattattcattaaatagtttgagtttagaaaaagaagattttataaggtatatttaccagagaattgtacttatttgcataaaaattgtttttcctrgaagaaaagaccttttttatcccaggtgctagacttcatcttattcttactagaaaacttttttggctattttatttgtgaatttgggccataaacctatgtgaagaccagcttgtgattgcagaacacacaagagactttccctttctacactacggtcagggattttcttttacttttttatttttccctagtcttggagtggataggatgataggtagtagaggtggtgatttggatatttctagagcaggggttgggaagctaaggcctgtaggccaaatctggctcaacgcctgttgttataaagtctaattggaacatagccccacccatttgtttacatactgtctgtggctgcctattgtctgtggcttcttaccgtgacacagttgagtaattgcagcaaagatgagcatggcttgcaaagcctaaaatatttactaactggcccttcataaaaactttgcaacccctagttctagaccacttatttgcagactactcattcatgtgaacactatgtctaagagcctttgctggtagttactagctgcatgcagctatttctatttaaattaataacattaaaaactcaggtcatatgtattagccaaatttcaagtgcctcagtagctatatgtggctagtagcaactgcgtaggaatagcacagataagaaacatgtccatcatccagaaaatagtctccttytgtcaaccaggttggagtccagtggtgcaatcacggctcactgcagccttgaccactcagacccaagcaattctcctgcctcagcctcctgagtagctgggaccatcagcatgtgccaccactcagctaattaaaaacacttttttttgtagggacaagttctccctatgttggtctccggtctccttggtttcttgtcttcttcatcaataatctctgcttgtgttcttatttatttaatctgaacttgttttctctttttttctgcctttgaaatttcttcccatcctctgtgactaagtttgaatccgtatttatatttaattattaaatatattgattttttaccattttgtgtatgtctttagttcaccagtaagattataagatgctgaaaggcaggcactgtgttttctcttgctttatatagtgtcttgcacaaaatagcttttgtcatttgtttgctatgtactagatctccctaaatagtgtaaaattgtttcagttttgttttctaggtctaacaaactgtaaatgttaaaaaagcaaagatgggtgaaaaaaaaccagagcctttggacttcgtgaaagattttcaggaatacctgactcagcagacccatcacgtgaacatgatttctggatcagttagtggggacaaagaagcagaggctcttcagggaggtagactcattttaatactactaagtaattcactttttatacacgtactatgattgcgtgtagctgttactgtgaagaccactgcgcattaatgtgaatcattctgttttttctagaaagatacagggcatttttyyccccttttttaaacatatcagacttctgctggagagtacttaacatggtctggagatgcattatggtcttgttggaaggttaggggctccaaatacccttcctgtcctccagtttttatgagctaccattagacacaaagaacccaaaggggattggaatatcagcttcactatacaaaccattaggccatcaggaaatctggattcgacctgagataaaaataggggtttcagtttcttctctcttaaaatgaagaaagggctgaccatgtttacctatccaagaagagaaatgaaaatagagaaagtggtgacctccttgagcctgctagaggtaaattttgtctaatttgcttgccacaaaaaactggwatttattcctaacctagctcggaggtcagcaaactatagcccgtgggccccatctggactgctgtttttgtatggcctgcaagctaagaatggtttttacatttaaagatggttttaaaagtgtcaaaaggagaataatgtaatgatacatgaaaattctgtgaagttcaaacttgagtccacataagtaaaatttaattggaacacagatatgctcatttgtttacatattttctgtagctgtttttgtttgttttgctaaaacagcagagttgagcagttgtggtagagaccatatggcccacaaagcctgaagtatttactatttcatgcctatagaaaaagtttgctgacccctgacctagatagtctgggtacggccttataatgcagggactagcagcagggaccaggcatcacccgggagcttgttaaaaatacaaaacaccagacaccaccccagatctactgaattataatctgtgttttaataagatcccccaagtaattcacatacacattaaaatgtgatagtgactggcttgggaaagcagtgggagagaggaagacactgagccttgtccctcgaatgcagtgtagccctcttggatattggtcttgtctcaaccagcagaatcacttctcctagtgaggagtgaggaaccggtgaagcagggggcttgaattgtgcatgccaggactgttacctcctgaaatggagtagaccttttcccatgaagctgtaggaatggaaatttccctcctaacgcacagatttccaaacaggattcaagagaccagggttgtagtcccagccatttgccgattttcctgattatgagcatcaggtctcttcagtttctttctacaaaaaagtagtcagattagattaaaagcaaacagccaaacatgttttatctctgagattcttaaaaccttaaccttcagaggtatcagggacgatactttcctttatgggcttaattagaattttaagatcctaaatggaacagagatctagaacgtacatataaacactgggatgtggaaaacttattcactgcttcagactaaaataaatagagttagggttttggagattctttgactgccagtttcagttgtagaaatagcgagggtgctaaacacctgtgtgtaactgtgccatcactctccagtgaatctctttattcccctccctcctcacctgttcacttcttcaaaaacatgttaaggaccagtacaatgtgtgtgtaagtaattttgttttctttgtttttgagacacagtcttgctctgtcgcccaggctggagtacagtggcacaatcttggctcactgcaacctctgcctcctggattccagcgattctcatgcctcagcctcctgagtagctgggactacaggtgtgcaccaccatgcccagctaatttttgtaatttttttttttttttttaagtagagacagggttttgccatgttggctaggctggtctctaactcctggcctcaagctatccccccacctctgcctcccaaagttctgggattacaggtatgagccactgcactggccttgtgtaaataatttgagatcccccaataaaaggttctcagaatataatacagaatgtattactgcttttgtataaaattagcctcagttcagaaagtctgttataaaatggacttaacttttgtgagaagtgaactgtcaatttataagatttttcaaccacttaaaactgaaatgctaaattgagttgattctgagatgcataatttcttttgcggtactttgtttatagctggaacagatggtgatcaaaatggacttgatcacccatctgttgaagtttccttggatgaaaactcaggaatgttagtagacgggtttgaaaggacctttgatgggaagcttaagtgtcggtactgcaactatgccagcaaaggaacagcccggcttattgaacacatcagaatccacacaggtaatggaaagacagctggaaaaagcatttctgtgagggcaggagaggggccaaggggggcaggttggtttgtcatagaaatagttttaatattcaaaaatgaaggtttatgtaaagttcgaataaatgggamagttactccatttttcaaagcaacaacataacaacatacaaacaggtcagaagtgatgccctttgtagatcctctccttccttagccgtgtttccctcttgatccaaataatctctcaacatctgcctgcctctcagattgggaaggaataatgctaaagcactgcgatgtgataaaatgttttaatctttatcctattacgtttcatttgccgaaagggggaaaggtttcagaaagtatacagttgcagatggtactgctaatcmcagatctcactttagctgtcccttctgagaaactttcccaactacatctgcccyctgcccaagaccaggtcagacgtccttcctgtgtgcttcatgcatcctgtgctcattcatcacatcattgtagcctgagagcctcttgaggacagggcaattgtgacaagaccatctttgtacccccagagcctaggagggcatgtgacacatacttactagatgaatgactctaaatctcatattccaaatgtttatttcacataattgggcagtcttcagttaacaacattaactatagttgttccttctggcagctgaagagtaggaagatggaggagaagcactagcaattttgaagggatgctttgcataactcagactagcaagcccatttcaattctgagctttctatttcatataaggactttaaaaaaagctttttttgtatttttttttctgtgagcaaagggtatgcatatgtgtgtgtgtgaatatgaatgtatataaatgtatacatgaatatataactgagacatacttttgataaactcattattatgtaagactattactagaatatttcarttgtactgtttcttctctctaaatgcattcgaagccataayagtttttatactgtattgactaatacaacatcaatgcatatttcaggttgttgctgatgagttcttaagctttatttcaatttgtgggtttatttacaaattttaacaatctcatatgctatgcaaatatgactttctgaaagcattttctttttgatcaatttccagttgtccaatgaatggacaagcaaaactttccataaatgaactactcttgtagtttctccatcatttttcttttgaaacaggtgaaaaacctcatcgatgtcatctttgtccatttgcatctgcttatgagcgtcatctggaagcccatatgcgttctcatactggagaaaaaccatacaaatgtgaattatgttccttccgctgcagtgatcgaagtaacttgtcccatcatcgaaggcgcaagcataaaatggtaccaattaaaggtactaggtcttccttaagcagcaagaaaatgtggggggttttacagaagaaaacaagcaatctgggctatagcagaagagcactaatcaacttaagtccaccttccatggtggttcagaaaccagactaccttaacgattttacccacgaaatcccaaatatccagactgactcctatgaaagtatggcaaaaaccacaccaactggtggccttccaagggacccccaagaactcatggttgataaccctttgaatcagctctcgactctagcagggcagttgtccagtctgccacccgaaaaccaaaaccctgcatcccctgatgtagttccctgccctgatgaaaagcctttcatgattcagcagccctctacccaagcagtagtttctgccgtatcagcaagtattcctcagagctcctctcccacaagcccagaacctcggccatcccatagtcaaaggaactatagtccagtggcaggtccaagcagtgagccaagtgcccacacgagcactcccagcataggaaacagccagccaagcaccccagccccagccctgccggtccaggaccctcagcttctgcaccactgccagcactgtgataygtactttgcagacaacatcctttacactattcatatgggatgtcatgggtatgaaaatccttttcagtgtaatatatgtggatgcaaatgtaaaaacaagtatgattttgcctgtcattttgcaagagggcaacataaccaacattgattgaaaatagtcatattttacttagttttgctgtttttgtggtttggttttttttkttttttgttttggtcatccctaataaagtgtctgctaattcaaggcttatacattatatttatagaatataaatttgtcagtggaataaaatttcccctttttttcataaaaatctggtcagggtcatttatatattagaacagttagacacattggtgtctcttttttcctttcctttcgacattggagaattggagtgcagtcataatcttacaagatgttcatttgaatttctcacatttatggtccataaaaacttcaaggcttatccatacttttgatgtttcaatatgcattgaactggatgttatttctgccatatttcaaaatggtagaataaattacagaatttattactactcatttcagtgtttagtacagaaattgccttaaaaattgctattaattgaaatatcatttagttcacattccttaagttgaatcggtagtttcatttcaactgataatagtaaagctatttcagtttagtaaaaattttcttttttccacaagaggaaatgtaaaacagttaagacttgaaattgaaaattcttttaatatttaaaataacttgtttattcaatgtctaaacacatgtcagttttccactggatttttattttcacaggtaaatacactagagtgctagatgcctttttcccctgtcagtttgactttcatttaaatccttcattctgatatcattactgttaggtgaggtggataactataatgagaatctcttattcttcctattcctttgatgaccaaagagataaagtgaagtcatccttattattaaaatgcagcctccaaacaaatttctcaagattccttttccttccttctatccattttctgcccataatttccaagaaaaggtgggtatggaaacacatgagagaatgtgatagtgaagtcatatttacaaaactgagaacatgtccaaaatggattcttgtctcctcttcagaattagccatttaaaatattttctgtgacttcaaattgtaattcttatttgcagttttaccagtcttcatgtacagtgacgaaactgtgtagaaactaaatcatcgctttagtaagaaaggataaaaaggtgtggaaatgaatataaaatgcatctaaacatgacatttaatttgtttataaaaataagacttactaaatatagagtaattcattttgaataggaggctattgtttttatattgtgtaataactcacgtactctgaagagagcttggtcaaacaataaaatacattgttactaacttggtttcttttctgtgtactttgcaaaaattctatttttaattttgttcatatgttgaatgtgcccctaattggcatcttaaagagaatagtaagcatctattaaccaaaaaagaactctaatagtaaaggaaagggaaatattggtggtatgtacccacaaaacccccaagtgccaagttaatggaatctctgctttccctttcagatgctagaaagccactgtaatgagttcttgcagtttagcatccagtctaagctactgcattgtttaaagagcagcatcaaggacactttctccaaactggaactctcttctttgtcaaatcttgtactttaaaattctacaattctgttacattgttgtttaaatcacagactgctcagatccattttactgcagtagtttccaagtgtgtaacttggctttagtatttatcagttgccagaaagaaacaggttgtcatttggaagtttttgtggttattttttcccatttttattcttcagataaaagcagtaccccaaaatagaaaatgaaaattttcatgaaacaaagagaactcccttgttaaaaccagcttattaactctgtattctgtcaaatgcatttttttctaacaactgaccatggatgttgtgaaggtgcattttaatttaaacatggaaaagatttttttcataattacatactagaatgtaaaattataattttgccatgacttaaagagcacagttgatatcccaaaggttttgatgctaagaagctacagttattctaaatgcactaaaatgtttgaggcaaatctaccttagaggcttttttggtatggtattttttaaaatatttagattttatttaaatttcctgtgagttattctgtatttgaaaagatgttcgtgtcttcccctctgtattgaatgtttcactcattttatttttaatcaaatattttatagaaatgagttgttgggaagagtttaacatgcactatttatagtactttgccgttaacaggcaatgttctgaaactaaatttatttttgttcagtgaacataagtttagatttttaaagttggtagataatttatctccactaatatttttttaagaaactgtgaagagattaactgggaataattttatttcagattttactaatgtagtatgtagctacaacttcttgaacttcaagttaaggctagacatttactttgaaaaaattccactgggtgtttccagggctatttcattttagaaataagtgtttgccattcttctgcaaaaactggacaaggggaatactacaaaaaatactcagagataaaatcctcatttcaagttctacaaaatatttatcaaatgaatgttaatttttttttaattccctgctaaagacgttttcattagtcttagagggtatatgctttctagaacttgtttttgttaacatgtgctttgatgtaaagaacatattttgtatgcaaaacataacttgcattatggttgtacaatacactatattgtttagggattccggaaagcagtttaatgcagaaataactatatctagtatgcagttcatattgtgaatgaagctttgcttttgtaataaataaataagactttctaatgaccttggtttttcttttttggaaaataagatcaaattagtgttttagtaattttccactagtgaaatgttaagttaatgaaagaaatagattttatgactacactgctttgaatttctaaaataccttacctgagaagatttatcacgagttaaaaaacaaaacagctccatacatccgcaacttgtccccctcctagtttcttctctttattcaagatccatttaacttgactcccgtcccccaagccctaccctaagtgccctggcacatgaggaaggctgcctctgtgcttaattatccacatcacatctgacaagtgactgactcactctggcattactagcctagaaaacatcgtaatacaacaccgttgttttaacaaatttgtaaaagcttaccaaaatgagacatttgattggcagttcagaaattttaatgctgctttgaaaaatacttctgtacaatattatctttctcataatgaaaaaaagaaatgacatctggtatgtcaatggtttgctgaaagcacagatattttttgtttccttgttttaggtcttccaaaaactctgctttgagcttgttaagttcttctgctagaagcttcaagttgtgaggaagcacttgttcatctaaaataaaaagatattctcaaattactggtgtaaattaaagtaatccggggtgtctaatgacattaggaaattaatttgattaaacaaaccagttagattctataaacaatcacaattgagttagtgtaatatatagaaaaaaggtctcaatgtgatactcaaaaatcatctgaaacacgtcaaagaatttaaataacttgttaggaaacgtgtgagcagaaaagactaacctgaaagggactttttgttgttgttgccaagaaaactcaagacagctgacttactaccttactgaattaagcagaaaggcaaaaaagcagaaatagatgacaatttagttttgaacctgataaataatatctagaacagtagttgtccaacataactttctgcagtgatggacctgttctatatctgctttattcaatacagcagccaatagccacacgtgggcagtgttactgagaagctgaactttatttttctgttagctttattaggacataattcacatacagtttacccatttaatctgtatgatacagtgttttttttatatactcacagatatgtgcaaccatcaccagttaattttagaacattttcatcatctcaaaaacccatatcctggtggctcaagcctgtaatcccagcactgtgggtggccgaggtgggcggatcacctgaggtcgggcgttcgagaccagactggccaacatggtgaaacccctcctctactaaaaatacaaaaattagcggggcatggtggcacatccctgtaatcccagctactcgggaggctgaggcaggagaatcacttgaacccgggaggtggaggttgcagtgagccaagatcgtgccattgtactccagcctgggcaacagagcaagactccatctcaaaaacaaagcaaaacaaaaacccatatcctttagctatcatcctccttaccaccttcccttctgcccaccccgcccaccccccgccccccatctctaagcaaccacacatccactgtctatctcaagatttccctgttcaggacatttcgtatgactggaagtatacatacacttggtctttgggactgacttcttgcactttgcatcatgttttcaaggttattccacattgtatagcacatatcagcatttcattcctttttatggctgaataatattttgttgtatggatacaccaaattttgttggtcagctgacggacatgtgggttattttcatattttggctattaggaataatgctgccattaacatacatgtacaagtttttatgtgaacatgttttcatctctcttgggtatacacctgagaatggaattgttgggtcatgtgctaacggtatgtttgagggactgctagctgttttccaaagcagctgtaccatctgacattcctaacatttctacacatcctcaacacttggacgttttaattctagacctcctagtgggtgtgaagtgctatcttatggttttgatttgtatttccccaatgactaatcatgttgagcatgtctactcagatcctttgcccttttaaaaattgggttgtgtttattattgagtggtaagagttctttatatattttggatacaagtcccttatgagatatatgtctgcaaatactttttcccatctatgggttgtcttttcactttcctgatggtagaggaactgaatttttaattaagcacaaattaaaaactactactacctcccctgaccccaaaaaatatatataatatatgtatatatatatggctctctctctatctgtatgtttttaaataggtgggatataagagtgatttgggcataaccctaccccccacaatcccccaggaccttgcttcattttatagacagaaaagaagaaaggcaaatggttgagtgagaactcctggaactattttttgtcttattttatttatgatgccatttctgttccggtcctctgtttctcaaacttattaatgttacccattaataagtggcaatcggtatttttctaaaatgaaatcaagtagaacacagagttcattaaacatgtgaaggtgttttgtgaaacttgtttccacacgagttcgtgtactgggttataccctgggttacaatataaaatcaactggtagatcatagttttatacaaattcaaaaacagtatggctggtatattgtttccttttccagtgttctaagcttttgtaaaggtaataaatgatggtgatgcaggggagcagaatgggaagcacagactggaactggatgtaattctggaccccaggttacccaaatatttagtagctgttcagtcttggacaagttacttgttcctctatgaacttccatttccccatttgtaaaattacacctaccttataggactgtgaagattagaaacagtatttgtaaagcgcttaacgtatagaaaggtgctcaaaaaatgttcattgctggtttttaaaggtacaattttaaatatagcaatacagtattcaaaacctaatggaattactgtgtaaaactctagttaccacatatttcatctattatgtaaattcagatttataatacattgactttactcaaattccatgctgatcttacacctggcccctgactacctttccccccttcttacctcaccccgtgctcaatggcctcttctcgattctgcaacactgcaaccagccaacctttgcgcttctgcacttgatgtgttcattgcctagaatgatcct
